(19) United States
(12) Patent Application Publication
(10) Pub. No.: US 2004/0033502 A1
(43) Pub. Date: Feb. 19, 2004

(54) Gene expression profiles in esophageal tissue

(76) Inventors: Amanda Williams, Gaithersburg, MD (US); Joseph F. Boland, Gaithersburg, MD (US); Reginald V. Lord, Gaithersburg, MD (US); Christopher Alvares, Gaithersburg, MD (US); Jon C. Wetzel, Gaithersburg, MD (US); Uwe Scherf, Gaithersburg, MD (US); Joseph G. Vockley, Gaithersburg, MD (US)

Correspondence Address: MORGAN LEWIS & BOCKIUS LLP, 1111 PENNSYLVANIA AVENUE NW, WASHINGTON, DC, 20004, US

(21) Appl. No.: 10/240,425

(22) PCT Filed: Mar. 28, 2001
(86) PCT No.: PCT/US01/09847

(51) Int. Cl. C12Q 1/68; A61K 31/00

(52) U.S. Cl. 435/6; 514/1

(57) ABSTRACT

The invention concerns a novel nucleic acid fragment of the genome of rice pathogenic fungus Magnaporthe grisea comprising a gene coding for a protein (hereafter referred to as gene 763) whereof the presence and integrity are indispensable for pathogenesis of said fungus with respect to rice and barley. The invention also concerns the promoter of said gene, the gene coding for protein 763, protein 763 and uses thereof for identifying potential biological targets for novel fungicide molecules and for isolating genes coding for proteins controlling biochemical functions essential to the pathogenesis of the fungus Magnaporthe grisea with respect to rice and barley. The invention further concerns compounds inhibiting pathogenesis of fungi related to the expression of gene 763.

### BACKGROUND OF THE INVENTION

[0001] There are two main types of esophageal cancer; squamous cell carcinoma (SCC) and adenocarcinoma. The worldwide incidence of esophageal SCC is higher than that of adenocarcinoma; however, in the last few decades, the incidence of adenocarcinoma in Western countries has been increasing at a dramatic rate. As a result, esophageal adenocarcinoma is the most common cancer type among Caucasian patients in some populations (Blot & McLaughlin, Semin. Oncol. (1999) 26,2-8).

[0002] The main risk factor for development of esophageal adenocarcinoma is the presence of Barrett's esophagus, a disease in which the normal squamous epithelium of the lower esophagus is replaced by columnar mucosa in response to injury caused by chronic gastroesophageal reflux (Lagergren et al., N. Engl. J. Med. (1999) 340, 825-831; Barrett et al., Nat. Genet. (1999) 22, 106-109; Reid & Weinstein, Annu. Rev. Med. (1987) 38, 477-492). Barrett's esophagus is a disorder in which the lining of the esophagus undergoes cellular changes in response to chronic irritation and inflammation of reflux esophagitis. This condition is more common in men than women. The patient with Barrett's esophagus is at an increased risk of developing cancer of the esophagus. Symptoms are similar to those of reflux esophagitis and include heartburn, difficulty swallowing and pain relief with antiacid use or eating. The diagnosis of Barrett's is made by a biopsy of the esophageal mucosa through an endoscope. Treatment includes control of reflux disease, weight reduction and avoidance of alcohol, tobacco, fatty foods and lying flat after eating. Close follow-up is recommended to be certain the individual does not develop cancer of the esophagus.

[0003] The precursor cell for Barrett's epithelium has not been identified, leaving the origin of Barrett's esophagus open to speculation. One theory suggests that denudation of the squamous epithelium layer by reflux acid allows gastric columnar cells to move into the site and take over (Bremner et al., Surgery (1970) 68, 209-16). More recently, cytokeratin expression data has been used to suggest that Barrett's epithelium evolves from a basal cell in the esophageal squamous epithelium (Boch et al., Gastroenterology (1997) 112, 760-765; Salo et al., Arm. Med. (1996) 28, 305-309).

[0004] The advent of cDNA and oligonucleotide arrays has enabled researchers to map tissue-specific expression levels for thousands of genes (Alon et al., Proc. Natl. Acad. Sci. USA (1999) 96, 6745-6750; Iyer et al., (1999) Science 283, 83-87; Khan et al., Cancer Res. (1998) 58, 5009-13; Lee et al., Science (1999) 285, 1390-1393; Wang et al. Gene (1999) 229,101-108; Whitney et al., Ann. Neurol. (1999)46,425-428). Instead of assigning individual genes to a disease phenotype, expression profiles can be created which identify changes in total gene expression in the diseased tissue in relationship to normal adjacent tissue. Present day cancer research, particularly research in the field of adenocarcinoma, has focused on the determining the expression levels of individual genes with little effort expended on determining the global changes in gene expression that are correlated with the development and progression of adenocarcinoma.

[0005] There remains a need in the art for materials and methods that permit a more accurate diagnosis of esophageal cancer and, in particular, esophageal adenocarcinoma. In addition, there remains a need in the art for methods to treat and methods to identify agent that can effectively treat esophageal cancer. The present invention meets these and other needs.

### SUMMARY OF THE INVENTION

[0006] The present invention is based in part on the global changes in gene expression associated with esophageal cancer identified by examining gene expression in tissue from normal and diseased esophagus. The present invention also includes expression profiles which serve as useful diagnostic markers as well as markers that can be used to monitor disease states, disease progression, drug toxicity, drug efficacy and drug metabolism.

[0007] The invention includes methods of diagnosing esophageal cancer in a patient comprising the step of detecting the level of expression in a tissue sample of two or more genes from Tables 2-8; wherein differential expression of the genes in Tables 2-8 is indicative of esophageal cancer. In some preferred embodiments, the method may include detecting the expression level of one or more genes selected from a group consisting of apolipoprotein C-1, galectin 4, keratin 18, annexin A10, cathepsin E, homeobox C10, MPP1, transglutaminase 1, aquaporin 3, trefoil peptide1, trefoil peptide 2 or mucin 5J.

[0008] The invention also includes methods of detecting the progression of esophageal cancer. For instance, methods of the invention include detecting the progression of esophageal cancer in a patient comprising the step of detecting the level of expression in a tissue sample of two or more genes from Tables 2-8; wherein differential expression of the genes in Tables 2-8 is indicative of esophageal cancer progression. In some preferred embodiments, the progression may be the progression of Barrett's esophagus to esophageal cancer. In some preferred embodiments, the method may include detecting the expression level of one or more genes selected from a group consisting of apolipoprotein C-1, galectin 4, keratin 18, annexin A10, cathepsin E, homeobox C10, MPP1, transglutaminase 1, aquaporin 3, trefoil peptide1, trefoil peptide 2 or mucin 5B.

[0009] In some aspects, the present invention provides a method of monitoring the treatment of a patient with esophageal cancer, comprising administering a pharmaceutical composition to the patient and preparing a gene expression profile from a cell or tissue sample from the patient and comparing the patient gene expression profile to a gene expression from a cell population comprising normal esophageal cells or to a gene expression profile from a cell population comprising esophageal cancer cells or to both. In some preferred embodiments, the gene profile will include the expression level of one or more genes in Tables 2-8. In other preferred embodiments, one or more genes may be selected from a group consisting of apolipoprotein C-1, galectin 4, keratin 18, annexin A10, cathepsin E, homeobox C10, MPP1, transglutaminase 1, aquaporin 3, trefoil peptide1, trefoil peptide 2 or mucin 5B.

[0010] In another aspect, the present invention provides a method of treating a patient with esophageal cancer, comprising administering to the patient a pharmaceutical composition, wherein the composition alters the expression of at least one gene in Tables 2-8, preparing a gene expression profile from a cell or tissue sample from the patient comprising tumor cells and comparing the patient expression profile to a gene expression profile from an untreated cell population comprising esophageal cancer cells.

[0011] In one aspect, the present invention provides a method of diagnosing esophageal adenocarcinoma in a patient, comprising detecting the level of expression in a tissue sample of two or more genes from Tables 2-8, wherein differential expression of the genes in Tables 2-8 is indicative of esophageal adenocarcinoma.

[0012] In another aspect, the present invention provides a method of detecting the progression of esophageal adenocarcinoma in a patient, comprising detecting the level of expression in a tissue sample of two or more genes from Tables 2-8; wherein differential expression of the genes in Tables 2-8 is indicative of esophageal adenocarcinoma progression.

[0013] The present invention also provides materials and methods for monitoring the treatment of a patient with a esophageal adenocarcinoma. The present invention provides a method of monitoring the treatment of a patient with esophageal adenocarcinoma, comprising administering a pharmaceutical composition to the patient, preparing a gene expression profile from a cell or tissue sample from the patient and comparing the patient gene expression profile to a gene expression from a cell population comprising normal esophageal cells or to a gene expression profile from a cell population comprising esophageal adenocarcinoma cells or to both. In some preferred embodiments, the method may include detecting the level of expression of one or more genes selected from a group consisting of apolipoprotein C-1, galectin 4, keratin 18, annexin A10, cathepsin E, homeobox C10, MPP1, transglutaminase 1, aquaporin 3, trefoil peptide1, trefoil peptide 2 or mucin 5B.

[0014] In a related aspect, the present invention provides a method of treating a patient with esophageal adenocarcinoma, comprising administering to the patient a pharmaceutical composition, wherein the composition alters the expression of at least one gene in Tables 2-8, preparing a gene expression profile from a cell or tissue sample from the patient comprising esophageal adenocarcinoma cells and comparing the patient expression profile to a gene expression profile from an untreated cell population comprising esophageal adenocarcinoma cells. In some preferred embodiments, one or more genes may be selected from a group consisting of apolipoprotein C-1, galectin 4, keratin 18, annexin A10, cathepsin E, homeobox C10, MPP1, transglutaminase 1, aquaporin 3, trefoil peptide1, trefoil peptide 2 or mucin SB.

[0015] The invention further includes methods of screening for an agent capable of modulating the onset or progression of esophageal cancer, comprising the steps of exposing a cell to the agent; and detecting the expression level of two or more genes from Tables 2-8. In some embodiments, the esophageal cancer may be an esophageal adenocarcinoma. In some preferred embodiments, one or more genes may be selected from a group consisting of apolipoprotein C-1, galectin 4, keratin 18, annexin A10, cathepsin E, homeobox C10, MPP1, transglutaminase 1, aquaporin 3, trefoil peptide1, trefoil peptide 2 or mucin 5B. Preferred methods may detect all or nearly all of the genes in the tables.

[0016] The invention further includes compositions comprising at least two oligonucleotides, wherein each of the oligonucleotides comprises a sequence that specifically hybridizes to a gene in Tables 2-8 as well as solid supports comprising at least two probes, wherein each of the probes comprises a sequence that specifically hybridizes to a gene in Tables 2-8. In some preferred embodiments, one or more genes may be selected from a group consisting of apolipoprotein C-1, galectin 4, keratin 18, annexin A10, cathepsin E, homeobox C10, MPP1, transglutaminase 1, aquaporin 3, trefoil peptide1, trefoil peptide 2 or mucin 5B.

[0017] The invention further includes computer systems comprising a database containing information identifying the expression level in esophageal tissue of a set of genes comprising at least two genes in Tables 2-8 and a user interface to view the information. In some preferred embodiments, one or more genes may be selected from a group consisting of apolipoprotein C-1, galectin 4, keratin 18, annexin A10, cathepsin E, homeobox C10, MPP1, transglutaminase 1, aquaporin 3, trefoil peptide1, trefoil peptide 2 or mucin 5B. The database may further include sequence information for the genes, information identifying the expression level for the set of genes in normal esophageal tissue and cancerous tissue and may contain links to external databases such as GenBank.

[0018] Lastly, the invention includes methods of using the databases, such as methods of using the disclosed computer systems to present information identifying the expression level in a tissue or cell of at least one gene in Tables 2-8, comprising the step of comparing the expression level of at least one gene in Tables 2-8 in the tissue or cell to the level of expression of the gene in the database. In some preferred embodiments, one or more genes may be selected from a group consisting of apolipoprotein C-1, galectin 4, keratin 18, annexin A10, cathepsin E, homeobox C10, MPP1, transglutaminase 1, aquaporin 3, trefoil peptide1, trefoil peptide 2 or mucin 5B.

### BRIEF DESCRIPTION OF THE DRAWINGS

[0019] FIG. 1 shows the results of a cluster analysis. FIG. 1a shows genes under expressed in BA while FIGS. 1b, 1c and 1d show genes overexpressed in BA.

[0020] FIG. 2 shows the results of a cluster analysis. FIG. 2a shows genes identified as markers for squamous epithelial cells. FIG. 2b shows genes involved in extracellular matrix (ECM) modification. FIG. 2c shows genes involved in cell adhesion, migration, proliferation and differentiation.

### DETAILED DESCRIPTION

[0021] Many biological functions are accomplished by altering the expression of various genes through transcriptional (e.g., through control of initiation, provision of RNA precursors, RNA processing, etc.) and/or translational control. For example, fundamental biological processes such as cell cycle, cell differentiation and cell death, are often characterized by the variations in the expression levels of groups of genes.

[0022] Changes in gene expression also are associated with pathogenesis. For example, the lack of sufficient expression of functional tumor suppressor genes and/or the over expression of oncogene/protooncogenes could lead to tumorgenesis or hyperplastic growth of cells Marshall, (1991) Cell, 64, 313-326; Weinberg, (1991) Science, 254, 1138-1146). Thus, changes in the expression levels of particular genes (e.g., oncogenes or tumor suppressors) serve as signposts for the presence and progression of various diseases.

[0023] Monitoring changes in gene expression may also provide certain advantages during drug screening development. Often drugs are screened and prescreened for the ability to interact with a major target without regard to other effects the drugs have on cells. Often such other effects cause toxicity in the whole animal, which prevent the development and use of the potential drug.

[0024] Applicants have examined tissue from normal esophageal tissue and tissue from esophageal tumors to identify global changes in gene expression between tumor biopsies and normal tissue. These global changes in gene expression, also referred to as expression profiles, provide useful markers for diagnostic uses as well as markers that can be used to monitor disease states, disease progression, drug toxicity, drug efficacy and drug metabolism.

[0025] Expression profiles of genes in particular, tissues, disease states or disease progression stages provide molecular tools for evaluating toxicity, drug efficacy, drug metabolism, development, and disease monitoring. Changes in the expression profile from a baseline profile can be used as an indication of such effects. Those skilled in the art can use any of a variety of known techniques to evaluate the expression of one or more of the genes and/or ESTs identified in the instant application in order to observe changes in the expression profile.

[0026] The present application has identified differences in gene expression between normal esophageal tissue and esophageal adenocarcinoma. Barrett's epithelium was identified adjacent to many of the cancers. In some cases, the tumor involved an extensive area of esophageal mucosa suggesting that it had overgrown the Barrett's epithelium from which it derived. Genes and ESTs have been found whose expression significantly varies (>3 fold change up or down) between normal and malignant tissue. In preferred embodiments, the expression level of one or more of these genes and/or ESTs can be determined using as interrogators probes specific to one or more of these genes and/or ESTs. This permits the determination of the expression pattern in unknown cells or samples and their identification as benign or malignant. The expression patterns of the genes and ESTs which were examined are listed in Tables 2-8. The complete sequences of the genes and ESTs are available from GenBank using the Accession numbers shown in each table.

[0027] Definitions

[0028] In the description that follows, numerous terms and phrases known to those skilled in the art are used. In the interest of clarity and consistency of interpretation, the definitions of certain terms and phrases are provided.

[0029] The present invention provides compositions and methods to detect the level of expression of genes that may be differentially expressed dependent upon the state of the cell, i.e., normal versus cancerous. As used herein, the phrase “detecting the level expression” includes methods that quantify expression levels as well as methods that determine whether a gene of interest is expressed at all. Thus, an assay which provides a yes or no result without necessarily providing quantification of an amount of expression is an assay that requires “detecting the level of expression” as that phrase is used herein.

[0030] As used herein, oligonucleotide sequences that are complementary to one or more of the genes described herein, refers to oligonucleotides that are capable of hybridizing under stringent conditions to at least part of the nucleotide sequence of said genes. Such hybridizable oligonucleotides will typically exhibit at least about 75% sequence identity at the nucleotide level to said genes, preferably about 80% or 85% sequence identity or more preferably about 90% or 95% or more sequence identity to said genes.

[0031] “Bind(s) substantially” refers to complementary hybridization between a probe nucleic acid and a target nucleic acid and embraces minor mismatches that can be accommodated by reducing the stringency of the hybridization media to achieve the desired detection of the target polynucleotide sequence.

[0032] The terms “background” or “background signal intensity” refer to hybridization signals resulting from non-specific binding, or other interactions, between the labeled target nucleic acids and components of the oligonucleotide array (e.g. the oligonucleotide probes, control probes, the array substrate, etc.). Background signals may also be produced by intrinsic fluorescence of the array components themselves. A single background signal can be calculated for the entire array, or a different background signal may be calculated for each target nucleic acid. In a preferred embodiment, background is calculated as the average hybridization signal intensity for the lowest 5% to 10% of the probes in the array, or, where a different background signal is calculated for each target gene, for the lowest 5% to 10% of the probes for each gene. Of course, one of skill in the art will appreciate that where the probes to a particular gene hybridize well and thus appear to be specifically binding to a target sequence, they should not be used in a background signal calculation. Alternatively, background may be calculated as the average hybridization signal intensity produced by hybridization to probes that are not complementary to any sequence found in the sample (e.g., probes directed to nucleic acids of the opposite sense or to genes not found in the sample such as bacterial genes where the sample is mammalian nucleic acids). Background can also be calculated as the average signal intensity produced by regions of the array that lack any probes at all.

[0033] The phrase “hybridizing specifically to” refers to the binding, duplexing or hybridizing of a molecule substantially to or only to a particular nucleotide sequence or sequences under stringent conditions when that sequence is present in a complex mixture (e.g., total cellular) DNA or RNA.

[0034] Assays and methods of the invention may utilize available formats to simultaneously screen at least about 100, preferably about 1000, more preferably about 10,000 and most preferably about 1,000,000 or more different nucleic acid hybridizations.

[0035] The terms “mismatch control” or “mismatch probe” refer to a probe whose sequence is deliberately selected not to be perfectly complementary to a particular target sequence. For each mismatch (MM) control in a high-density array there typically exists a corresponding perfect match (PM) probe that is perfectly complementary to the same particular target sequence. The mismatch may comprise one or more bases.

[0036] While the mismatch(s) may be located anywhere in the mismatch probe, terminal mismatches are less desirable as a terminal mismatch is less likely to prevent hybridization of the target sequence. In a particularly preferred embodiment, the mismatch is located at or near the center of the probe such that the mismatch is most likely to destabilize the duplex with the target sequence under the test hybridization conditions.

[0037] The term “perfect match probe” refers to a probe that has a sequence that is perfectly complementary to a particular target sequence. The test probe is typically perfectly complementary to a portion (subsequence) of the target sequence. The perfect match (PM) probe can be a “test probe”, a “normalization control” probe, an expression level control probe and the like. A perfect match control or perfect match probe is, however, distinguished from a “mismatch control” or “mismatch probe.”

[0038] As used herein a “probe” is defined as a nucleic acid, preferably an oligonucleotide, capable of binding to a target nucleic acid of complementary sequence through one or more types of chemical bonds, usually through complementary base pairing, usually through hydrogen bond formation. As used herein, a probe may include natural (i.e., A, G, U, C or T) or modified bases (7-deazaguanosine, inosine, etc.). In addition, the bases in probes may be joined by a linkage other than a phosphodiester bond, so long as it does not interfere with hybridization. Thus, probes may be peptide nucleic acids in which the constituent bases are joined by peptide bonds rather than phosphodiester linkages.

[0039] The term “stringent conditions” refers to conditions under which a probe will hybridize to its target subsequence, but with only insubstantial hybridization to other sequences or to other sequences such that the difference may be identified. Stringent conditions are sequence-dependent and will be different in different circumstances. Longer sequences hybridize specifically at higher temperatures. Generally, stringent conditions are selected to be about 5° C. lower than the thermal melting point (Tₘ) for the specific sequence at a defined ionic strength and pH.

[0040] Typically, stringent conditions will be those in which the salt concentration is at least about 0.01 to 1.0 M sodium ion concentration (or other salts) at pH 7.0 to 8.3 and the temperature is at least about 30° C. for short probes (e.g., 10 to 50 nucleotide). Stringent conditions may also be achieved with the addition of destabilizing agents such as formamide.

[0041] The “percentage of sequence identity” or “sequence identity” is determined by comparing two optimally aligned sequences or subsequences over a comparison window or span, wherein the portion of the polynucleotide sequence in the comparison window may optionally comprise additions or deletions (i.e., gaps) as compared to the reference sequence (which does not comprise additions or deletions) for optimal alignment of the two sequences. The percentage is calculated by determining the number of positions at which the identical subunit (e.g., nucleic acid base or amino acid residue) occurs in both sequences to yield the number of matched positions, dividing the number of matched positions by the total number of positions in the window of comparison and multiplying the result by 100 to yield the percentage of sequence identity. Percentage sequence identity when calculated using the programs GAP or BESTFIT (see below) is calculated using default gap weights.

[0042] Homology or identity may be determined by BLAST (Basic Local Alignment Search Tool) analysis using the algorithm employed by the programs blastp, blastn, blastx, tblastn and tblastx (Karlin et al., (1990) Proc. Natl. Acad. Sci. USA 87, 2264-2268 and Altschul, (1993) J. Mol. Evol. 36,290-300, fully incorporated by reference) which are tailored for sequence similarity searching. The approach used by the BLAST program is to first consider similar segments between a query sequence and a database sequence, then to evaluate the statistical significance of all matches that are identified and finally to summarize only those matches which satisfy a preselected threshold of significance. For a discussion of basic issues in similarity searching of sequence databases, see Altschul et al., ((1994) Nature Genet. 6, 119-129) which is fully incorporated by reference. The search parameters for histogram, descriptions, alignments, expect (i.e., the statistical significance threshold for reporting matches against database sequences), cutoff, matrix and filter are at the default settings. The default scoring matrix used by blastp, blastx, tblasta, and tblastx is the BLOSUM62 matrix (Henikoff et al., (1992) Proc. Natl. Acad. Sci. USA 89, 10915-10919, fully incorporated by reference). Four blastn parameters were adjusted as follows Q=10 (gap creation penalty); R=10 (gap extension penalty); wink=1 (generates word hits at every winks position along the query); and gapw=16 (sets the window width within which gapped alignments are generated). The equivalent Blastp parameter settings were Q=9; R=2; wink=1; and gapw=32. A Bestfit comparison between sequences, available in the GCG package version 10.0, uses DNA parameters GAP=50 (gap creation penalty) and LENz=3 (gap extension penalty) and the equivalent settings in protein comparisons are GAP=8 and LEN=2.

[0043] Uses of Differentially Expressed Genes

[0044] The present invention identifies those genes differentially expressed between normal esophageal tissue and cancerous esophageal tissue. One of skill in the art can select one or more of the genes identified as being differentially expressed and use the information and methods provided herein to interrogate or test a particular sample. For a particular interrogation of two conditions or sources, it is desirable to select those genes that display a great difference in the expression pattern between the two conditions or sources. At least a two-fold difference is desirable, but a three, five-fold or ten-fold difference may be preferred. Interrogations of the genes or proteins can be performed to yield information on gene expression as well as on the levels of the encoded proteins.

[0045] Diagnostic Uses for the Esophageal Cancer Markers

[0046] As described herein, the genes and gene expression information provided in Tables 2-8 may be used as diagnostic markers for the prediction or identification of the malignant state of the esophageal tissue. For instance, an esophageal tissue sample or other sample from a patient may be assayed by any of the methods known to those skilled in the art, and the expression levels from one or more genes from Tables 2-8, may be compared to the expression levels found in normal esophageal tissue, tissue from esophageal adenocarinoma or both. Expression profiles generated from the tissue or other sample that substantially resemble an expression profile from normal or diseased esophageal tissue may be used, for instance, to aid in disease diagnosis. Comparison of the expression data, as well as available sequence or other information may be done by researcher or diagnostician or may be done with the aid of a computer and databases as described herein.

[0047] Use of the Esophageal Cancer Markers for Monitoring Disease Progression

[0048] Molecular expression markers for esophageal cancer can be used to confirm the type and progression of the cancer made on the basis of morphological criteria. For example, squamous cell carcinoma could be distinguished from adenocarcinoma based on the level and type of genes expressed in a tissue sample. In some situations, identifications of cell type or source is ambiguous based on classical criteria. In these situations the molecular expression markers of the present invention are useful.

[0049] In addition, progression of esophageal squamous cell carcinoma to adenocarcinoma can be monitored by following the expression patterns of the involved genes using the molecular expression markers of the present invention. Perturbed expression can be observed in the diseased state. Monitoring of the efficacy of certain drug regimens can also be accomplished by following the expression patterns of the molecular expression markers.

[0050] Although only a few different disease progression time points have been observed, as shown in the examples below, other developmental stages can be studied using these same molecular expression markers. The importance of these markers in development has been shown here, however, variations in their expression may occur at other times. For example, one could study the expression of these markers at benign stages for comparison to expression at malignant states.

[0051] As described above, the genes and gene expression information provided in Tables 28 may also be used as markers for the monitoring of disease progression, for instance, the development of esophageal cancer. For instance, an esophageal tissue sample or other sample from a patient may be assayed by any of the methods known to those of skill in the art, and the expression levels in the sample from a gene or genes from Tables 2-8 may be compared to the expression levels found in normal esophageal tissue, tissue from esophageal cancer, in particular, Barrett's-associated esophageal adenocarcinoma (BA), or both. Comparison of the expression data, as well as available sequence or other information may be done by researcher or diagnostician or may be done with the aid of a computer and databases as described herein.

[0052] Use of the Esophageal Cancer Markers for Drug Screening

[0053] Potential drugs can be screened to determine if application of the drug alters the expression of one or more of the genes identified herein. This may be useful, for example, in determining whether a particular drug is effective in treating a particular patient or patient population with esophageal cancer. In the case where the expression of a gene is affected by the potential drug such that its level of expression returns to normal, the drug is indicated in the treatment of esophageal cancer. Similarly, a drug that causes expression of a gene which is not normally expressed by epithelial cells in the esophagus, may be contraindicated in the treatment of esophageal cancer.

[0054] According to the present invention, the genes identified in Tables 2-8 may be used as markers to evaluate the effects of a candidate drug or agent on a cell, particularly a cell undergoing malignant transformation, for instance, an esophageal cancer cell or tissue sample. A candidate drug or agent can be screened for the ability to stimulate the transcription or expression of a given marker or markers (drug targets) or to down-regulate or inhibit the transcription or expression of a marker or markers. According to the present invention, one can also compare the specificity of the effects of a drug by looking at the number of markers affected by the drug and comparing them to the number of markers affected by a different drug. A more specific drug will affect fewer transcriptional targets. Similar sets of markers identified for two drugs indicates a similarity of effects.

[0055] Assays to monitor the expression of a marker or markers as defined in Tables 2-8 may utilize any available means of monitoring for changes in the expression level of the nucleic acids of the invention. As used herein, an agent is said to modulate the expression of a nucleic acid of the invention if it is capable of up- or down-regulating expression of the nucleic acid in a cell.

[0056] Agents that are assayed in the above methods can be randomly selected or rationally selected or designed. As used herein, an agent is said to be randomly selected when the agent is chosen randomly without considering the specific sequences involved in the association of the a protein of the invention alone or with its associated substrates, binding partners, etc. An example of randomly selected agents is the use a chemical library or a peptide combinatorial library, or a growth broth of an organism.

[0057] As used herein, an agent is said to be rationally selected or designed when the agent is chosen on a nonrandom basis which takes into account the sequence of the target site and/or its conformation in connection with the agent's action. Agents can be rationally selected or rationally designed by utilizing the peptide sequences that make up these sites. For example, a rationally selected peptide agent can be a peptide whose amino acid sequence is identical to or a derivative of any functional consensus site.

[0058] The agents of the present invention can be, as examples, peptides, small molecules, vitamin derivatives, as well as carbohydrates, lipids, oligonucleotides and covalent and non-covalent combinations thereof. Dominant negative proteins, DNA encoding these proteins, antibodies to these proteins, peptide fragments of these proteins or mimics of these proteins may be introduced into cells to affect function. “Mimic” as used herein refers to the modification of a region or several regions of a peptide molecule to provide a structure chemically different from the parent peptide but topographically and functionally similar to the parent peptide (see Grant, (1995) in Molecular Biology and Biotechnology Meyers (editor) VCH Publishers). A skilled artisan can readily recognize that there is no limit as to the structural nature of the agents of the present invention.

[0059] Assay Formats

[0060] The genes identified as being differentially expressed in esophageal cancer may be used in a variety of nucleic acid detection assays to detect or quantify the expression level of a gene or multiple genes in a given sample. For example, traditional Northern blotting, nuclease protection, RT-PCR and differential display methods may be used for detecting gene expression levels.

[0061] The protein products of the genes identified herein can also be assayed to determine the amount of expression. Methods for assaying for a protein include Western blot, immunoprecipitation, radioimmunoassay. It is preferred, however, that the mRNA be assayed as an indication of expression. Methods for assaying for mRNA include Northern blots, slot blots, dot blots, and hybridization to an ordered array of oligonucleotides. Any method for specifically and quantitatively measuring a specific protein or mRNA or DNA product can be used. However, methods and assays of the invention are most efficiently designed with array or chip hybridization-based methods for detecting the expression of a large number of genes.

[0062] Any hybridization assay format may be used, including solution-based and solid support-based assay formats. A preferred solid support is a high density array also known as a DNA chip or a gene chip. In one assay format, gene chips containing probes to at least two genes from Tables 2-8 may be used to directly monitor or detect changes in gene expression in the treated or exposed cell as described herein.

[0063] Additional assay formats may be used to monitor the ability of the agent to modulate the expression of a gene identified in Tables 2-8. For instance, as described above, mRNA expression may be monitored directly by hybridization of probes to the nucleic acids of the invention. Cell lines are exposed to an agent to be tested under appropriate conditions and time and total RNA or mRNA is isolated by standard procedures such those disclosed in

[0064] In another format, cell lines that contain reporter gene fusions between the open reading frame and/or the 3′ or 5′ regulatory regions of a gene in Tables 2-8 and any assayable fusion partner may be prepared. Numerous assayable fusion partners are known and readily available including the firefly luciferase gene and the gene encoding chloramphenicol acetyltransferase (Alam et al., (1990) Anal. Biochem 188, 245-254). Cell lines containing the reporter gene fusions are then exposed to the agent to be tested under appropriate conditions and time. Differential expression of the reporter gene between samples exposed to the agent and control samples identifies agents which modulate the expression of the nucleic acid.

[0065] In another assay format, cells or cell lines are first identified which express one or more of the gene products of the invention physiologically. Cells and/or cell lines so identified would preferably comprise the necessary cellular machinery to ensure that the transcriptional and/or translational apparatus of the cells would faithfully mimic the response of normal or cancerous esophageal tissue to an exogenous agent. Such machinery would likely include appropriate surface transduction mechanisms and/or cytosolic factors. Such cell lines may be, but are not required to be, derived from esophageal tissue. The cells and/or cell lines may then be contacted with an agent and the expression of one or more of the genes of interest may then be assayed. The genes may be assayed at the mRNA level and/or at the protein level.

[0066] In some embodiments, such cells or cell lines may be transduced or transfected with an expression vehicle (e.g., a plasmid or viral vector) containing an expression construct comprising an operable 5′-promoter containing end of a gene of interest identified in Tables 2-8 fused to one or more nucleic acid sequences encoding one or more antigenic fragments. The construct may comprise all or a portion of the coding sequence of the gene of interest which may be positioned 5′- or 3′- to a sequence encoding an antigenic fragment. The coding sequence of the gene of interest may be translated or un-translated after transcription of the gene fusion. At least one antigenic fragment may be translated. The antigenic fragments are selected so that the fragments are under the transcriptional control of the promoter of the gene of interest and are expressed in a fashion substantially similar to the expression pattern of the gene of interest. The antigenic fragments may be expressed as polypeptides whose molecular weight can be distinguished from the naturally occurring polypeptides. In some embodiments, gene products of the invention may further comprise an immunologically distinct tag. Such a process is well known in the art (see Sambrook et al., (1989) Molecular Cloning—A Laboratory Manual, Cold Spring Harbor Laboratory Press).

[0067] Cells or cell lines transduced or transfected as outlined above are then contacted with agents under appropriate conditions; for example, the agent comprises a pharmaceutically acceptable excipient and is contacted with cells comprised in an aqueous physiological buffer such as phosphate buffered saline (PBS) at physiological pH, Eagles balanced salt solution (BSS) at physiological pH, PBS or BSS comprising serum or conditioned media comprising PBS or BSS and serum incubated at 37° C. Said conditions may be modulated as deemed necessary by one of skill in the art. Subsequent to contacting the cells with the agent, said cells will be disrupted and the polypeptides of the lysate are fractionated such that a polypeptide fraction is pooled and contacted with an antibody to be farther processed by immunological assay (e.g., ELISA, immunoprecipitation or Western blot). The pool of proteins isolated from the “agent-contacted” sample will be compared with a control sample where only the excipient is contacted with the cells and an increase or decrease in the immunologically generated signal from the “agent-contacted” sample compared to the control will be used to distinguish the effectiveness of the agent.

[0068] Another embodiment of the present invention provides methods for identifying agents that modulate the levels, concentration or at least one activity of a protein(s) encoded by the genes in Tables 2-8. Such methods or assays may utilize any means of monitoring or detecting the desired activity.

[0069] In one format, the relative amounts of a protein of the invention produced in a cell population that has been exposed to the agent to be tested may be compared to the amount produced in an unexposed control cell population. In this format, probes such as specific antibodies are used to monitor the differential expression of the protein in the different cell populations. Cell lines or populations are exposed to the agent to be tested under appropriate conditions and time. Cellular lysates may be prepared from the exposed cell line or population and a control, unexposed cell line or population. The cellular lysates are then analyzed with the probe, such as a specific antibody.

[0070] The genes and ESTs of the present invention may be assayed in any convenient form. For example, they may be assayed in the form mRNA or reverse transcribed mRNA. The genes may be cloned or not and the genes may be amplified or not. The cloning itself does not appear to bias the representation of genes within a population. However, it may be preferable to use polyA+ RNA as a source, as it can be used with less processing steps. In some embodiments, it may be preferable to assay the protein or peptide encoded by the gene.

[0071] The sequences of the expression marker genes are in the public databases. Tables 2-8 provide the Accession numbers and name for each of the sequences. In Tables 2-6, the number following the notation gb=is the GenBank accession number. The sequences of the genes in GenBank are expressly incorporated by reference and are publicly available at, for example, www.ncbi.nih.gov. IMAGE gives the clone number from the IMAGE consortium.

[0072] Probe Design

[0073] Probes based on the sequences of the genes described herein may be prepared by any commonly available method. Oligonucleotide probes for assaying the tissue or cell sample are preferably of sufficient length to specifically hybridize only to appropriate, complementary genes or transcripts. Typically the oligonucleotide probes will be at least 10, 12, 14, 16, 18, 20 or 25 nucleotides in length. In some cases longer probes of at least 30, 40, or 50 nucleotides will be desirable.

[0074] One of skill in the art will appreciate that an enormous number of array designs are suitable for the practice of this invention. The high density array will typically include a number of probes that specifically hybridize to the sequences of interest. See WO 99/32660 for methods of producing probes for a given gene or genes. In addition, in a preferred embodiment, the array will include one or more control probes.

[0075] High density array chips of the invention include “test probes.” Test probes may be oligonucleotides that range from about 5 to about 500 or about 5 to about 50 nucleotides, more preferably from about 10 to about 40 nucleotides and most preferably from about 15 to about 40 nucleotides in length. In other particularly preferred embodiments, the probes are about 20 or 25 nucleotides in length. In another preferred embodiment, test probes are double or single strand DNA sequences. DNA sequences may be isolated or cloned from natural sources or amplified from natural sources using natural nucleic acid as templates. These probes have sequences complementary to particular subsequences of the genes whose expression they are designed to detect. Thus, the test probes are capable of specifically hybridizing to the target nucleic acid they are to detect.

[0076] In addition to test probes that bind the target nucleic acid(s) of interest, the high density array can contain a number of control probes. The control probes fall into three categories referred to herein as (1) normalization controls; (2) expression level controls; and (3) mismatch controls.

[0077] Normalization controls are oligonucleotide or other nucleic acid probes that are complementary to labeled reference oligonucleotides or other nucleic acid sequences that are added to the nucleic acid sample. The signals obtained from the normalization controls after hybridization provide a control for variations in hybridization conditions, label intensity, “reading” efficiency and other factors that may cause the signal of a perfect hybridization to vary between arrays. In a preferred embodiment, signals (e.g. fluorescence intensity) read from all other probes in the array are divided by the signal (, fluorescence intensity) from the control probes thereby normalizing the measurements.

[0078] Virtually any probe may serve as a normalization control. However, it is recognized that hybridization efficiency varies with base composition and probe length. Preferred normalization probes are selected to reflect the average length of the other probes present in the array, however, they can be selected to cover a range of lengths. The normalization control(s) can also be selected to reflect the (average) base composition of the other probes in the array, however in a preferred embodiment, only one or a few probes are used and they are selected such that they hybridize well (i.e., no secondary structure) and do not match any target-specific probes.

[0079] Expression level controls are probes that hybridize specifically with constitutively expressed genes in the biological sample. Virtually any constitutively expressed gene provides a suitable target for expression level controls. Typical expression level control probes have sequences complementary to subsequences of constitutively expressed “housekeeping genes” including, but not limited to the β-actin gene, the transferrin receptor gene, the GAPDH gene, and the like.

[0080] Mismatch controls may also be provided for the probes to the target genes, for expression level controls or for normalization controls. Mismatch controls are oligonucleotide probes or other nucleic acid probes identical to their corresponding test or control probes except for the presence of one or more mismatched bases. A mismatched base is a base selected so that it is not complementary to the corresponding base in the target sequence to which the probe would otherwise specifically hybridize. One or more mismatches are selected such that under appropriate hybridization conditions (e.g., stringent conditions) the test or control probe would be expected to hybridize with its target sequence, but the mismatch probe would not hybridize (or would hybridize to a significantly lesser extent). Preferred mismatch probes contain a central mismatch. Thus, for example, where a probe is a twenty-mer, a corresponding mismatch probe may have the identical sequence except for a single base mismatch (e.g., substituting a G, a C or a T for an A) at any of positions 6 through 14 (the central mismatch).

[0081] Mismatch probes thus provide a control for non-specific binding or cross hybridization to a nucleic acid in the sample other than the target to which the probe is directed. Mismatch probes also indicate whether a hybridization is specific or not. For example, if the target is present the perfect match probes should be consistently brighter than the mismatch probes. In addition, if all central mismatches are present, the mismatch probes can be used to detect a mutation. The difference in intensity between the perfect match and the mismatch probe (I_{(PM)}-I_{(M-M)}) provides a good measure of the concentration of the hybridized material.

[0082] Nucleic Acid Samples

[0083] As is apparent to one of ordinary skill in the art, nucleic acid samples used in the methods and assays of the invention may be prepared by any available method or process. Methods of isolating total mRNA are also well known to those of skill in the art. For example, methods of isolation and purification of nucleic acids are described in detail in Chapter 3 of Laboratory Techniques in Biochemistry and Molecular Biology: Hybridization With Nucleic Acid Probes, Part I Theory and Nucleic Acid Preparation, Tijssen, (1993) (editor) Elsevier Press. Such samples include RNA samples, but also include cDNA synthesized from a mRNA sample isolated from a cell or tissue of interest. Such samples also include DNA amplified from the cDNA, and an RNA transcribed from the amplified DNA. One of skill in the art would appreciate that it may be desirable to inhibit or destroy RNase present in homogenates before homogenates can be used.

[0084] Biological samples may be of any biological tissue or fluid or cells from any organism as well as cells raised in vitro, such as cell lines and tissue culture cells. Frequently the sample will be a “clinical sample” which is a sample derived from a patient. Typical clinical samples include, but are not limited to, sputum, blood, blood-cells (e.g., white cells), tissue or fine needle biopsy samples, urine, peritoneal fluid, and pleural fluid, or cells therefrom.

[0085] Biological samples may also include sections of tissues, such as frozen sections or formalin fixed sections taken for histological purposes.

[0086] Solid Supports

[0087] Solid supports containing oligonucleotide probes for differentially expressed genes can be any solid or semisolid support material known to those skilled in the art. Suitable examples include, but are not limited to, membranes, filters, tissue culture dishes, polyvinyl chloride dishes, beads, test strips, silicon or glass based chips and the like. Suitable glass wafers and hybridization methods are widely available, for example, those disclosed by Beattie (WO 95/11755). Any solid surface to which oligonucleotides can be bound, either directly or indirectly, either covalently or non-covalently, can be used. In some embodiments, it may be desirable to attach some oligonucleotides covalently and others non-covalently to the same solid support.

[0088] A preferred solid support is a high density array or DNA chip. These contain a particular oligonucleotide probe in a predetermined location on the array. Each predetermined location may contain more than one molecule of the probe, but each molecule within the predetermined location has an identical sequence. Such predetermined locations are termed features. There may be, for example, from 2, 10, 100, 1000 to 10,000, 100,000 or 400,000 of such features on a single solid support. The solid support, or the area within which the probes are attached may be on the order of a square centimeter.

[0089] Oligonucleotide probe arrays for expression monitoring can be made and used according to any techniques known in the art (see for example, Lockhart et al., Nat. Biotechnol. (1996) 14, 1675-1680; McGall et al., Proc. Nat. Acad. Sci. USA (1996) 93, 13555-13460). Such probe arrays may contain at least two or more oligonucleotides that are complementary to or hybridize to two or more of the genes described herein. Such arrays my also contain oligonucleotides that are complementary or hybridize to at least 3, 4, 5, 6, 7, 8, 9, 10, 20, 30, 50, 70 or more the genes described herein.

[0090] Oligonucleotide arrays are particularly useful for creating gene expression profiles comparing cancer tissue to adjacent normal tissue.

[0091] The use of available oligonucleotide arrays enabled the determination of the expression levels of numerous genes and ESTs simultaneously. From this mass of expression data, differentially expressed genes were identified using Fold Change and Gene Signature Differential analysis.

[0092] Gene Signature Differential analysis is a method designed to detect genes present in one sample set, and absent in another. Genes with differential expression in cancer tissue versus normal tissue are better diagnostic and therapeutic targets than genes that do not change in expression.

[0093] Methods of forming high density arrays of oligonucleotides with a minimal number of synthetic steps are known. The oligonucleotide analogue array can be synthesized on a solid substrate by a variety of methods, including, but not limited to, light-directed chemical coupling, and mechanically directed coupling (see Pirrung et al., (1992) U.S. Pat. No. 5,143, 854; Fodor et al., (1998) U.S. Pat. No. 5,800,992; Chee et al., (1998) 5,837,832

[0094] In brief, the light-directed combinatorial synthesis of oligonucleotide arrays on a glass surface proceeds using automated phosphoramidite chemistry and chip masking techniques. In one specific implementation, a glass surface is derivatized with a silane reagent containing a functional group, e.g., a hydroxyl or amine group blocked by a photolabile protecting group. Photolysis through a photolithogaphic mask is used selectively to expose functional groups which are then ready to react with incoming 5′ photoprotected nucleoside phosphoramidites. The phosphoramidites react only with those sites which are illuminated (and thus exposed by removal of the photolabile blocking group). Thus, the phosphoramidites only add to those areas selectively exposed from the preceding step. These steps are repeated until the desired array of sequences have been synthesized on the solid surface. Combinatorial synthesis of different oligonucleotide analogues at different locations on the array is determined by the pattern of illumination during synthesis and the order of addition of coupling reagents.

[0095] In addition to the foregoing, additional methods which can be used to generate an array of oligonucleotides on a single substrate are described in Fodor et al., (1993). WO 93/09668. High density nucleic acid arrays can also be fabricated by depositing premade or natural nucleic acids in predetermined positions. Synthesized or natural nucleic acids are deposited on specific locations of a substrate by light directed targeting and oligonucleotide directed targeting. Another embodiment uses a dispenser that moves from region to region to deposit nucleic acids in specific spots.

[0096] Hybridization

[0097] Nucleic acid hybridization simply involves contacting a probe and target nucleic acid under conditions where the probe and its complementary target can form stable hybrid duplexes through complementary base pairing (see Lockhart et al., (1999) WO 99/32660). The nucleic acids that do not form hybrid duplexes are then washed away leaving the hybridized nucleic acids to be detected, typically through detection of an attached detectable label. It is generally recognized that nucleic acids are denatured by increasing the temperature or decreasing the salt concentration of the buffer containing the nucleic acids. Under low stringency conditions (e.g., low temperature and/or high salt) hybrid duplexes (e.g., DNA-DNA, RNA-RNA or RNA-DNA) will form even where the annealed sequences are not perfectly complementary. Thus, specificity of hybridization is reduced at lower stringency. Conversely, at higher stringency (e.g., higher temperature or lower salt) successful hybridization requires fewer mismatches. One of skill in the art will appreciate that hybridization conditions may be selected to provide any degree of stringency. In a preferred embodiment, hybridization is performed at low stringency, in this case in 6×SSPE-T at 37° C. (0.005% Triton x-100) to ensure hybridization and then subsequent washes are performed at higher stringency (e.g., 1×SSPE-T at 37° C.) to eliminate mismatched hybrid duplexes. Successive washes may be performed at increasingly higher stringency (e.g. down to as low as 0.25×SSPE-T at 37° C. to 50° C. until a desired level of hybridization specificity is obtained. Stringency can also be increased by addition of agents such as formamide. Hybridization specificity may be evaluated by comparison of hybridization to the test probes with hybridization to the various controls that can be present (e.g., expression level control, normalization control, mismatch controls, etc.).

[0098] In general, there is a tradeoff between hybridization specificity (stringency) and signal intensity. Thus, in a preferred embodiment, the wash is performed at the highest stringency that produces consistent results and that provides a signal intensity greater than approximately 10% of the background intensity. Thus, in a preferred embodiment, the hybridized array may be washed at successively higher stringency solutions and read between each wash. Analysis of the data sets thus produced will reveal a wash stringency above which the hybridization pattern is not appreciably altered and which provides adequate signal for the particular oligonucleotide probes of interest.

[0099] Signal Detection

[0100] The hybridized nucleic acids are typically detected by detecting one or more labels attached to the sample nucleic acids. The labels may be incorporated by any of a number of means well known to those of skill in the art (see Lockhart et al., (1999) WO 99/32660).

[0101] Databases

[0102] The present invention includes relational databases containing sequence information, for instance for the genes of Tables 2-8, as well as gene expression information in various esophageal tissue samples. Databases may also contain information associated with a given sequence or tissue sample such as descriptive information about the gene associated with the sequence information, or descriptive information concerning the clinical status of the tissue sample, or the patient from which the sample was derived. The database may be designed to include different parts, for instance a sequences database and a gene expression database. Methods for the configuration and construction of such databases are widely available, for instance, see Akerblom et al., (1999) U.S. Pat. No. 5,953,727, which is specifically incorporated herein by reference in its entirety.

[0103] The databases of the invention may be linked to an outside or external database. In a preferred embodiment, as described in Tables 2-8, the external database is GenBank and the associated databases maintained by the National Center for Biotechnology Information (NCBI).

[0104] Any appropriate computer platform may be used to perform the necessary comparisons between sequence information, gene expression information and any other information in the database or provided as an input. For example, a large number of computer workstations are available from a variety of manufacturers, such has those available from Silicon Graphics. Client-server environments, database servers and networks are also widely available and appropriate platforms for the databases of the invention.

[0105] The databases of the invention may be used to produce, among other things, electronic Northerns to allow the user to determine the cell type or tissue in which a given gene is expressed and to allow determination of the abundance or expression level of a given gene in a particular tissue or cell.

[0106] The databases of the invention may also be used to present information identifying the expression level in a tissue or cell of a set of genes comprising at least one gene in Tables 2-8 comprising the step of comparing the expression level of at least one gene in Tables 2-8 in the tissue to the level of expression of the gene in the database. Such methods may be used to predict the physiological state of a given tissue by comparing the level of expression of a gene or genes in Tables 2-8 from a sample to the expression levels found in tissue from normal esophageal tissue, tissue from esophageal adenocarcinoma or both. Such methods may also be used in the drug or agent screening assays as described herein.

[0107] Without further description, it is believed that one of ordinary skill in the art can, using the preceding description and the following illustrative examples, make and utilize the compounds of the present invention and practice the claimed methods. The following working examples therefore, specifically point out the preferred embodiments of the present invention, and are not to be construed as limiting in any way the remainder of the disclosure.

### EXAMPLES

### Example 1

### Tissue Sample Acquisition and Preparation

[0108] For tissue specimens, nine normal esophagus samples and eight BA tissue samples, which included seven matched tumor-normal sets, were used. Six of the eight BA samples were lymph node invasive.

[0109] With minor modifications, the sample preparation protocol followed the Affymetrix GeneChip Expression Analysis Manual. Frozen tissue was first ground to powder using the Spex Certiprep 6800 Freezer Mill. Total RNA was then extracted using Trizol (Life Technologies). The total RNA yield for each sample (average tissue weight of 300 mg) was 200-500 μg. Next, mRNA was isolated using the Oligotex mRNA Midi kit (Qiagen). Since the mRNA was eluted in a final volume of 400 air, an ethanol precipitation step was required to bring the concentration to 1 μg/μl. Using 1-5 μg of mRNA, double stranded cDNA was created using the SuperScript Choice system (Gibco-BRL). First strand cDNA synthesis was primed with a T7-(dT₂₄) oligonucleotide. The cDNA was then phenol-chloroform extracted and ethanol precipitated to a final concentration of 1 μg/μl.

[0110] From 2 μg of cDNA, cRNA was synthesized according to standard procedures. To biotin label the cRNA, nucleotides Bio-11-CTP and Bio-16-UTP (Enzo Diagnostics) were added to the reaction. After a 37° C. incubation for six hours, the labeled cRNA was cleaned up according to the RNeasy Mini kit protocol (Qiagen). The cRNA was then fragmented (5× fragmentation buffer: 200 mM Tris-Acetate (pH 8.1), 500 mM KOAc, 150 mM MgOAc) for thirty-five minutes at 94° C.

[0111] 55 μg of fragmented cRNA was hybridized on the human and the Human Genome U95 set of arrays for twenty-four hours at 60 rpm in a 45° C. hybridization oven. The chips were washed and stained with Streptavidin Phycoerythrin (SAPE) (Molecular Probes) in Affymetrix fluidics stations. To amplify staining, SAPE solution was added twice with an anti-streptavidin biotinylated antibody (Vector Laboratories) staining step in between. Hybridization to the probe arrays was detected by fluorometric scanning Hewlett Packard Gene Array Scanner). Following hybridization and scanning, the microarray images were analyzed for quality control, looking for major chip defects or abnormalities in hybridization signal. After all chips passed QC, the data was analyzed using Affymetrix GeneChip software (v3.0), and Experimental Data Mining Tool (EDMT) software (v1.0).

### Example 2

### Gene Expression Analysis

[0112] All samples were prepared as described and hybridized onto the Affymetrix Human Genome U95 array set.

[0113] Each chip contains 16-20 oligonucleotide probe pairs per gene or cDNA clone. These probe pairs include perfectly matched sets and mismatched sets, both of which are necessary for the calculation of the average difference. The average difference is a measure of the intensity difference for each probe pair, calculated by subtracting the intensity of the mismatch from the intensity of the perfect match. This takes into consideration variability in hybridization among probe pairs and other hybridization artifacts that could affect the fluorescence intensities. Using the average difference value that has been calculated, the GeneChip software then makes an absolute call for each gene or EST.

[0114] The absolute call of present, absent or marginal is used to generate a Gene Signature, a tool used to identify those genes that are commonly present or commonly absent in a given sample set, according to the absolute call. For each set of samples, a median average difference was figured using the average differences of each individual sample within the set. The Gene Signature for one set of samples is compared to the Gene Signature of another set of samples to determine the Gene Signature Differential. This comparison identifies the genes that are consistently present in one set of samples and consistently absent in the second set of samples.

[0115] The Gene Signature Curve is a graphic view of the number of genes consistently present in a given set of samples as the sample size increases, taking into account the genes commonly expressed among a particular set of samples, and discounting those genes whose expression is variable among those samples. The curve is also indicative of the number of samples necessary to generate an accurate Gene Signature. As the sample number increases, the number of genes common to the sample set decreases. The curve is generated using the positive Gene Signatures of the samples in question, determined by adding one sample at a time to the Gene Signature, beginning with the sample with the smallest number of present genes and adding samples in ascending order. The curve displays the sample size required for the most consistency and the least amount of expression variability from sample to sample. The point where this curve begins to level off represents the minimum number of samples required for the Gene Signature. Graphed on the x-axis is the number of samples in the set, and on the y-axis is the number of genes in the positive Gene Signature. As a general rule, the acceptable percent of variability in the number of positive genes between two sample sets should be less than 5%.

### Example 3

### Expression Profiles

[0116] Using the above described methods, genes that were predominantly over-expressed in BA, or predominantly under-expressed in BA were identified. The revealed genes were used to identify gene clusters generated by hierarchical clustering that exhibited a consistent fold change and/or dominant expression pattern between the normal and diseased sample sets. Genes with consistent differential expression patterns provide potential targets for broad range diagnostics and therapeutics.

[0117] First, the expression profiles of the nine normal esophagus samples were pooled and used to determine the genes that are commonly expressed or commonly not expressed. To find the expression pattern consistent to disease, the same procedure was followed with the eight samples from patients with BA. Table 1 lists, by array type, the number of genes with expression patterns common to the majority of normal or diseased samples.

[0118] Next, the unique pattern of genes over-expressed in the disease was identified by determining those genes that were commonly expressed in BA, but commonly NOT expressed in normal esophagus. Similarly, the unique pattern of genes under-expressed in disease was found by identifying genes that were expressed in the majority of normal esophagus samples, but NOT expressed in the majority of BA samples. Table 1 lists the number of genes uniquely under-expressed and over-expressed in. BA by array type. With this method 423 genes were identified to be unique for BA.

### Example 4

### Fold Change Analysis

[0119] The data was first filtered to exclude all genes that showed no expression in any of the samples. The ratio (tumor/normal) was calculated by comparing the mean expression value for each gene in the BA sample set against the mean expression value of that gene in the normal esophagus sample set. Genes were included in the analysis if they had a fold change ≧3 in either direction, and a P value <0.05 as determined by a two-tail unequal variance t-test. Out of the 60,000 genes surveyed by the Human Genome U95 set, 1584 genes were present in the overall fold change analysis, 701 were over-expressed in BA and 883 were under-expressed in BA. Out of the 423 unique genes for BA (244 under-expressed and 179 over-expressed) previously identified, 170 were also present in the fold change analysis. Determining these 170 genes independently by both methods overcomes the limitations of accuracy inherent in either method. These 170 key disease-related genes have both significant overall fold changes, and 87 are not detectable in BA while the remaining 83 are not detectable in normal esophagus.

[0120] The genes identified in the fold change analysis are listed in Tables 2-6. Table 2 lists those genes identified using the Human Genome U95A chip, Table 3 lists those genes identified using the Human Genome U95B chip, Table 4 lists those genes identified using the Human Genome U95C chip, Table 5 lists those genes identified using the Human Genome U95D chip and Table 6 lists those genes identified using the Human Genome U9SE chip.

### Example 5

### Cluster Analysis

[0121] The data was first filtered to exclude all genes that showed no expression in any of the samples. To normalize the data, fold change values for the samples were calculated by dividing each gene expression value by the mean of the expression values for all samples, both normal esophagus and BA, for that gene. Genes were included in the cluster analysis if they had at least one instance of a fold change ≧3 in either direction, and a P value of <0.05 as assessed by a two-tail unequal variance t-test. Using a hierarchical clustering algorithm, genes were grouped according to their expression pattern similarities across all samples (Eisen, et al., Cluster analysis and display of genome-wide expression patterns. Proc. Natl. Acad. Sci. USA 95, 14863-14868 (1998)).

[0122] For the Human Genome U95A array, 1100 full-length known genes or ESTs (8.7% of the genes present on the array) were included in the cluster analysis. The resulting dendrogram (FIG. 1) grouped all nine normal esophagus samples and seven of the eight BA samples into separate trees. BA sample 316 clustered in a branch with its matched normal esophagus sample (315) rather than with the other tumors. A number of genes on the Human Genome U95A array are present in duplicate. In most cases the duplicate genes cluster next to each other or in close proximity of each other, verifying internal microarray reproducibility. Four clusters were chosen for in-depth analyses, based on the presence of a portion of the 170 key disease-related genes previously identified by our fingerprinting and fold change analysis methods. FIG. 1 shows the results obtained using a hierarchical clustering to measure expression variation for 1100 full-length genes present on the Affymetrix Human Genome U95A oligonucleotide array. Four clusters (a-d) are presented that include genes from the 170 gene list identified by both our analysis methods. Those genes are labeled in red. Cluster (a) contains genes under-expressed in Barrett's-associated esophageal adenocarcinoma (BA), while clusters (b-d) contain genes over-expressed in BA. The dendrogram summarizes the expression similarities between samples. Each gene is represented by a single row, and each sample by a single column Relative to the mean expression level of all samples, red squares represent an over-expression, green squares represent an under-expression, black squares represent no expression change, and grey squares denote a missing sample. The overall fold change (FC), the fold change calculated between the two groups of samples, for each gene is also listed.

[0123] FIG. 2 shows the results obtained from a clustering analysis performed for 4,521 genes from the Human Genome U95 array set. A representative cluster was chosen that contained a number of genes from the U95A FIG. 1 cluster d). Genes in common between clusters are labeled in green. Based on expression similarities to known genes, the biological function of ESTs can be determined. The genes thus identified are listed in Table 8.

[0124] The cluster analysis also identified genes not identified in the fold change analysis. Table 7 provides a list of those genes identified as present in the U95A chip cluster analysis but not identified as present in the fold change analysis.

[0125] The clusters of genes thus identified contain genes that exhibit a consistent fold change between the normal and diseased sample sets, providing targets for broad range diagnostics and therapeutics.

### Example 6

### Tissue Markers

[0126] As the progression from normal esophagus to BA occurs, squamous epithelial cells are replaced with a heterogeneous population of columnar cells that exhibit both intestinal and gastric-like characteristics. The methods of the present invention were used to identify clusters containing genes differentially expressed in all normal or diseased samples. The genes thus identified were screened for the presence of marker genes corresponding to gross morphological changes.

[0127] The stratified squamous epithelial terminal differentiation markers, transglutaminase 1, transglutaminase-3, involucrin, envoplakin, periplakin and sciellin were all present in the cluster of genes under-expressed in BA (FIG. 1a). A distinct cluster (FIG. 1c) was also identified that included over-expressed genes associated with the Barrett's esophagus phenotype (see Labouvie, et al., Differential expression of mucins and trefoil peptides in native epithelium, Barrett's metaplasia and squamous cell carcinoma of the oesophagus. J. Cancer Res. Clin. Oncol. 125, 71-6 (1999) and Westerveld, et al., Gastric proteases in Barrett's esophagus. Gastroenterology 93, 774-8 (1987)). The genes trefoil peptide 1(TFF-1), trefoil peptide 2 (TFF-2), mucin 5B, and pepsinogen C were present in this cluster.

### Example 7

### Metastasis-Related Genes

[0128] The majority of BA tumors in this study (6 out of 8) displayed regional lymph node invasion. Genes with expression changes that correlate highly with the metastatic phenotype are very valuable diagnostic markers. The first step in metastasis is the loss of cell adhesion at the primary site. Desmosomes are multi-component structures involved in epithelial cell to cell adhesion and intracellular anchoring of intermediate filaments. The desmosomal components, desmoglein 3, desmocollin 2, and desmoplakin, are all present in the cluster of genes under-expressed in BA (FIG. 1a).

[0129] Once cell to cell adhesion is broken, the extracellular matrix (ECM) must be breached to enable movement into metastatic sites. A number of proteases, including metalloproteinase 1 (MMP-1), metalloproteinase 11 (MMP-11), cathepsin E, cathepsin K, and urokinase plasminogen activator (u-PA), that are involved in basement membrane and ECM degradation are spread throughout the clusters containing genes over-expressed in BA (FIGS. 1b-1d). MMP-1, MMP-11, and u-PA expression has previously been correlated with metastasis and/or poor prognosis in esophageal carcinoma (see Murray, et al., Matrix metalloproteinase-1 is associated with poor prognosis in oesophageal cancer. J Pathol. 185, 256-61 (1998), Porte, et al., Overexpression of stromelysin-3, BM-40/SPARC, and MET genes in human esophageal carcinoma: implications for prognosis. Clin. Cancer Res. 4, 1375-82 (1998) and Hewin, et al., Plasminogen activators in oesophageal carcinoma. Br. J. Surg. 83, 1152-5 (1996)).

[0130] In parallel with the expression increase in ECM proteinases, an expression decrease was seen in a number of proteinase inhibitors, including squamous cell carcinoma antigen 1 (SCCA1), squamous cell carcinoma antigen 2 (SCCA2), cystatin 6, and ELANH2 (FIG. 3A, i). The loss of inhibitory proteinases may allow metastatic tumor progression to occur more rapidly.

[0131] As the tumor moves through the stromal compartment into secondary sites, a balance must be reached between ECM degradation and renewal. The tumor requires the break down of ECM components to enable invasion, but the stromal environment must also be altered to create an environment with which the tumor can adhere and migrate. SPARC/osteonectin, SPP1/osteopontin, and thrombospondin-2 are secreted proteins involved in mediating cell to matrix interactions. These genes cluster together (FIG. 1d), and are over-expressed in BA. SPARC, SPP-1, and thrombospondin-1 have previously been linked to oesophageal carcinoma (see Porte, et al., supra, Casson, et al., Ras mutation and expression of the ras-regulated genes osteopontin and cathepsin L in human esophageal cancer. Int. J. Cancer 72, 739-45 (1997) and Oshiba, et al., Stromal thrombospondin-1 expression is correlated with progression of esophageal squamous cell carcinoma Anticancer Res. 19, 4375-8 (1999)).

[0132] Further denoting the changes in the stromal environment, the ECM components, chondroitin sulfate proteoglycan 2, collagen type X alpha 1, and collagen type X alpha 1, are also present in this cluster (FIG. 1d).

### Example 8

### Other Gene Clusters

[0133] A number of additional clusters, besides those directly related to the metastatic process, have been identified. Reflecting a change in the tumor's transcriptional program, one distinct cluster under-expressed in BA contained the homeobox genes, PITX1, PAX9 and BARX2 (FIG. 1a). The homeobox gene, HOXB7, was over-expressed in BA (FIG. 1b). Homeobox genes are nuclear transcription factors that regulate development. Another cluster contained genes elicited by the body's anti-tumoral immune response FIG. 1b). Two genes induced by interferon alpha and beta, IFI35 and IFI30, two genes induced by interferon gamma, ISG15 and GIP3, and interferon-induced complement component C2 were present in a cluster over-expressed in BA (FIG. 1b). Natural killer transcript 4 (NK4) also clusters with these genes.

### Example 9

### EST Clustering

[0134] Clustering was performed for the full Human Genome U95 set. After filtering, 4521 genes (7.5% of the genes present on all 5 arrays) were analyzed via hierarchical clustering and the results are shown in FIG. 2. A list of the genes thus identified is provided in Table 8. A hierarchical clustering was used to measure expression variation for 4,521 known genes or ESTs from the Affymetrix HG-U95 array set. Three clusters are shown that include genes from the HG-U95A analysis (see FIG. 1). Genes in common between clusters are labeled in green. The dendrogram summarizes expression similarities between samples. Each gene and sample presentation is the same as in FIG. 1. The overall fold change (FC), fold change between the groups of tissue samples, are also listed for each gene. Based on expression similarities to known genes, the biological function of some EST's can be assigned. Cluster A represents a number of marker genes for squamous epithelial cells. ESTs grouped around these genes are novel diagnostic markers whose expression loss follows BA progression. Cluster B represents a number of genes involved in ECM modification. Cluster C represents genes involved in cell adhesion, migration, proliferation and differentiation. Interestingly, EST AA877900 clusters around the cell surface protein encoded by tetraspanins and shows homology to the mouse cell surface antigen 114/A10 precursor. The resulting dendrogram grouped all nine normal oesophagus and all eight BA samples into separate trees. FIG. 2 shows the incorporation of these additional genes, consisting primarily of ESTs, into the Human Genome U95A cluster (FIG. 1). The U95A cluster contained a number of proteins involved in extracellular matrix modification and structure. Based on expression similarities to known genes, the biological function of surrounding ESTs can be postulated. Supporting this theory, the extracellular matrix proteins, collagen type V alpha 2, biglycan, and SPP1 (osteopontin) are represented in the new cluster (FIG. 2).

[0135] The present invention provides methods to identify genes and ESTs that are differentially expressed in normal and cancerous esophageal tissue. The method entails using several tissues of the same disease type to identify the gene expression patterns that are unique to normal and diseased tissues, comparing these patterns to determine the expression patterns that uniquely identify the disease, and performing fold change analysis to discover which genes are the most important determinants of disease. Applying the method, Applicants have identified key disease-related genes, and furthermore demonstrate that these weighted genes, can be used to identify significant clusters generated by hierarchical clustering algorithms. This overall approach, can potentially determine novel targets for diagnostic and therapeutic intervention in a wide variety of tissues, as demonstrated here with BA.

[0136] Although the present invention has been described in detail with reference to examples above, it is understood that various modifications can be made without departing from the spirit of the invention. Accordingly, the invention is limited only by the following claims. All cited patents and publications referred to in this application are herein incorporated by reference in their entirety.

TABLE 1

| | HG-U95A | HG-U95B | HG-U95C | HG-U95D | HG-U95E | Totals |
|---|---|---|---|---|---|---|
| A) | | | | | | |
| No. of genes whose expression was detected in normal esophagus | 5652 | 4394 | 2743 | 699 | 1266 | 14754 |
| No. of genes whose expression was not detected in BA | 5123 | 6158 | 8162 | 10397 | 8017 | 37857 |
| No. of genes uniquely under-expressed in BA | 101 | 62 | 46 | 20 | 15 | 244 |
| B) | | | | | | |
| No. of genes whose expression was detected in BA | 5433 | 4659 | 2772 | 934 | 1667 | 15465 |
| No. of genes whose expression was not detected in normal esophagus | 4170 | 5347 | 7184 | 9621 | 8163 | 34485 |
| No. of genes uniquely over-expressed in BA | 47 | 51 | 19 | 25 | 37 | 179 |
| Sum of genes unique for BA | | | | | | 423 |

A) Affymetrix probe array data was used to determine the number of genes expressed in normal esophagus and the number of genes NOT expressed in Barrett's-associated esophageal adenocarcinoma (BA). Relative to gene expression in normal esophagus, 244 genes were uniquely under-expressed in BA.
B) The number of genes expressed in BA was compared against the number of normal esophagus genes whose expression was NOT detectable. 179 genes were uniquely over-expressed in BA.

[0137] TABLE 2
U95_A Fold Change Genes (>3 over-expressed in Barrett's associated
esophageal adenocarcinoma (BA), <0.33 under-expressed in BA)

| Affy ID | Gene Name | Fold Change | P-value |
|---|---|---|---|
| 38469_at | Cluster Incl M35252: Human CO-029 /cds = (137,850) | 33.86361231 | 0.000002 |
| | /gb = M35252 /gi = 180925 /ug = Hs.84072 | | |
| | /len = 1083 | | |
| 38582_at | Cluster Incl AI961220: wt15b04.x1 Homo sapiens cDNA, | 30.1318728 | 0.000014 |
| | 3 end /clone = IMAGE-2507503 /clone_end = 3″ | | |
| | /gb = AI961220 /gi = 5753933 /ug = Hs.181286 /len = 510″ | | |
| 765_s_at | AB006781 /FEATURE = /DEFINITION = AB006781 | 20.91494437 | 0.000002 |
| | Homo sapiens mRNA for galectin-4, complete cds | | |
| 608_at | M12529 /FEATURE = mRNA /DEFINITION = | 16.55132436 | 0 |
| | HUMAPOE Human apolipoprotein E mRNA, complete cds | | |
| 31798_at | Cluster Incl AA314825: EST186646 Homo sapiens cDNA, | 13.40389513 | 0.003038 |
| | 5 end /clone = ATCC-111986 /clone_end = 5″ | | |
| | /gb = AA314825 /gi = 1967154 /ug = Hs.1406 /len = 574″ | | |
| 37186_s_{—} | Cluster Incl U11863: Human clone HP-DAO2 diamine oxidase, | 12.17002487 | 0.000007 |
| | copper/topa quinone containing mRNA, complete cds /cds = (73,2385) | | |
| | /gb = U11863 /gi = 533537 /ug = Hs.75741 /len = 2473 | | |
| 38827_at | Cluster Incl AF038451: Homo sapiens secreted cement gland protein | 11.64190393 | 0.000049 |
| | XAG-2 homolog (hAG-2/R) mRNA, complete cds /cds = (58,585) | | |
| | /gb = AF038451 /gi = 3779225 /ug = Hs.91011 /len = 1059 | | |
| 33327_at | Cluster Incl AB023171: Homo sapiens mRNA for KIAA0954 protein, | 10.57914803 | 0.000175 |
| | partial cds /cds = (0,2682) /gb = AB023171 /gi = 4589551 | | |
| | /ug = Hs.184640 /len = 5057 | | |
| 38239_at | Cluster Incl AI312905: qp84d03.x1 Homo sapiens cDNA, 3 end | 10.52282698 | 0.004857 |
| | /clone = IMAGE-1929701 /clone_end = 3″ /gb = | | |
| | AI312905 /gi = 4018510 /ug = Hs.16762 /len = 493″ | | |
| 41106_at | Cluster Incl AF022797: Homo sapiens intermediate conductance | 9.590462962 | 0.005712 |
| | calcium-activated potassium channel (hKCa4) mRNA, complete cds /cds = | | |
| | (396,1679) /gb = AF022797 /gi = 2674355 /ug = Hs.10082 /len = 2238 | | |
| 34342_s_{—} | Cluster Incl AF052124: Homo sapiens clone 23810 osteopontin mRNA, | 9.533960576 | 0.000045 |
| | complete cds /cds = (87,989) /gb = AF052124 /gi = | | |
| | 3360431 /ug = Hs.313 /len = 1504 | | |
| 575_s_at | M93036 /FEATURE = mRNA /DEFINITION = HUMGA7A08 | 8.991837359 | 0.000002 |
| | Human (clone 21726) carcinoma-associated antigen GA733-2 (GA733-2) | | |
| | mRNA, exon 9 and complete cds | | |
| 35832_at | Cluster Incl AB029000: Homo sapiens mRNA for KIAA1077 protein, | 8.290812823 | 0.000042 |
| | partial cds /cds = (0,2456) /gb = AB029000 /gi = | | |
| | 5689490 /ug = Hs.70823 /len = 4834 | | |
| 32349_at | Cluster Incl AJ238979: Homo sapiens mRNA for annexin A10 protein | 8.241398197 | 0.004318 |
| | (ANXA10 gene) /cds = (117,1091) /gb = AJ238979 /gi = | | |
| | 5689749 /ug = Hs.188401 /len = 1408 | | |
| 271_s_at | J05036 /FEATURE = mRNA /DEFINITION = HUMCTSE | 8.235638183 | 0.000008 |
| | Human cathepsin E mRNA, complete cds | | |
| 39945_at | Cluster Incl U09278: Human fibroblast activation protein mRNA, | 7.883016283 | 0.000057 |
| | complete cds /cds = (208,2490) /gb = U09278 /gi = | | |
| | 1888315 /ug = Hs.418 /len = 2814 | | |
| 1890_at | AB000584 /FEATURE = /DEFINITION = AB000584 Homo sapiens mRNA for | 7.410761415 | 0.000062 |
| | TGF-beta superfamily protein, complete cds | | |
| 37319_at | Cluster Incl M35878: Human insulin-like growth factor-binding | 7.315749117 | 0.00202 |
| | protein-3 gene, complete cds, clone HL1006d /cds = (132,1007) /gb = | | |
| | M35878 /gi = 184522 /ug = Hs.77326 /len = 3446 | | |
| 38124_at | Cluster Incl X55110: Human mRNA for neurite outgrowth-promoting | 7.314122689 | 0.0002 |
| | protein /cds = (25,456) /gb = X55110 /gi = 35086 /ug = | | |
| | Hs.82045 /len = 786 | | |
| 36781_at | Cluster Incl X01683: Human mRNA for alpha 1-antitrypsin /cds = (38,1294) | 7.157108509 | 0.000155 |
| | /gb = X01683 /gi = 28965 /ug = Hs.75621 /len = 1371 | | |
| 38428_at | Cluster Incl M13509: Human skin collagenase mRNA, complete cds /cds = | 6.752025797 | 0.000234 |
| | (68,1477) /gb = M13509 | | |
| | /gi = 180664 /ug = Hs.83169 /len = 1970 | | |
| 33699_at | Cluster Incl M18667: Human pepsinogen C gene /cds = (73,1230) /gb = | 6.70507087 | 0.007673 |
| | M18667 /gi = 189820 /ug = Hs.1867 /len = 1359 | | |
| 41470_at | Cluster Incl AF027208: Homo sapiens AC133 antigen mRNA, complete cds | 6.236624008 | 0.000202 |
| | /cds = (37,2634) /gb = AF027208 /gi = 2688948 /ug = | | |
| | Hs.112360 /len = 3794 | | |
| 1107_s_at | M13755 /FEATURE = mRNA /DEFINITION = HUMIFN15K Human | 6.024908182 | 0.000042 |
| | interferon-induced 17-kDa/15-kDa protein mRNA, complete cds | | |
| 33702_f_a | Cluster Incl L05144: Homo sapiens (clone lamda-hPEC-3) phosphoenolpyruvate | 5.944698576 | 0.000527 |
| | carboxykinase (PCK1) mRNA, complete cds /cds = (121,1989) /gb = | | |
| | L05144 /gi = 189944 /ug = Hs.1872 /len = 2657 | | |
| 38261_at | Cluster Incl AF085692: Homo sapiens multidrug resistance-associated | 5.920947513 | 0.001318 |
| | protein 3B (MRP3) mRNA, complete cds /cds = (36,1568) /gb = | | |
| | AF085692 /gi = 4106443 /ug = Hs.90786 /len = 5327 | | |
| 40079_at | Cluster Incl AA156240: zI50c12.s1 Homo sapiens cDNA, 3 end /clone = | 5.897828308 | 0.000012 |
| | IMAGE-505366 /clone_end = 3″ /gb = AA156240 /gi = | | |
| | 1727858 /ug = Hs.154737 /len = 668″ | | |
| 41585_at | Cluster Incl AB018289: Homo sapiens mRNA for KIAA0746 protein, partial | 5.679597385 | 0.00001 |
| | cds /cds = (0,3091) /gb = AB018289 /gi = 3882212 /ug = | | |
| | Hs.49500 /len = 4086 | | |
| 40201_at | Cluster Incl M76180: Human aromatic amino acid decarboxylase (ddc) mRNA, | 5.655152421 | 0.00268 |
| | complete cds /cds = (69,1511) /gb = M76180 /gi = 181520 | | |
| | /ug = Hs.150403 /len = 1930 | | |
| 39395_at | Cluster Incl AA704137: ag47g01.s1 Homo sapiens cDNA, 3 end /clone = | 5.386956374 | 0.0002 |
| | IMAGE-1119984 /clone_end = 3″ /gb = AA704137 /gi = | | |
| | 2714055 /ug = Hs.125359 /len = 923″ | | |
| 2092_s_a | J04765 /FEATURE = /DEFINITION = HUMOSTRO Human osteopontin | 5.386687312 | 0.008537 |
| | mRNA, complete cds | | |
| 39119_s_{—} | Cluster Incl AA631972: fmfc39 Homo sapiens cDNA /clone = CR7-5 | 5.364323204 | 0.000015 |
| | /gb = AA631972 /gi = 2554583 /ug = Hs.943 /len = 896 | | |
| 34775_at | Cluster Incl AF065388: Homo sapiens tetraspan NET-1 mRNA, complete cds | 5.286352347 | 0.000004 |
| | /cds = (121,846) /gb = AF065388 /gi = 3152700 /ug = | | |
| | Hs.38972 /len = 1278 | | |
| 38181_at | Cluster Incl X57766: Human stromelysin-3 mRNA /cds = (9,1475) | 5.282204273 | 0.001357 |
| | /gb = X57766 /gi = 456256 /ug = Hs.155324 /len = 2247 | | |
| 38615_at | Cluster Incl AF097021: Homo sapiens GW112 protein (GW112) mRNA, complete | 5.282142721 | 0.01537 |
| | cds /cds = (508,1071) /gb = AF097021 /gi = 3860076 | | |
| | /ug = Hs.100347 /len = 2830 | | |
| 33731_at | Cluster Incl AJ130718: Homo sapiens mRNA for glycoprotein-associated | 5.179186526 | 0.001054 |
| | amino acid transporter y + LAT1 /cds = (293,1828) /gb = | | |
| | AJ130718 /gi = 3970724 /ug = Hs.194693 /len = 2214 | | |
| 37117_at | Cluster Incl Z83838: Human DNA sequence from PAC 127B20 on chromosome | 5.160630589 | 0.006643 |
| | 22q11.2-qter, contains gene for GTPase-activating protein similar to | | |
| | rhoGAP protein, ribosomal protein L6 pseudogene, ESTs and CA repeat | | |
| | /cds = (0,926) /gb = Z83838 /gi = 2276307 /ug = | | |
| | Hs.102336 /len = 927 | | |
| 39339_at | Cluster Incl AB018335: Homo sapiens mRNA for KIAA0792 protein, complete | 5.158180582 | 0.000121 |
| | cds /cds = (250,2673) /gb = AB018335 /gi = 3882304 | | |
| | /ug = Hs.119387 /len = 4074 | | |
| 41764_at | Cluster Incl AA976838: oq35c12.s1 Homo sapiens cDNA, 3 end /clone = | 5.012716912 | 0.002917 |
| | IMAGE-1588342 /clone_end = 3″ /gb = AA976838 /gi = | | |
| | 3154284 /ug = Hs.182778 /len = 468″ | | |
| 451_s_at | D13666 /FEATURE = /DEFINITION = HUMOSF2OS Homo sapiens osf-2 | 4.951150996 | 0.000646 |
| | mRNA for osteoblast specific actor 2 (OSF-2os), complete cds | | |
| 36883_at | Cluster Incl X14640: Human mRNA for keratin 13 /cds = (42,1418) | 4.916594286 | 0.000477 |
| | /gb = X14640 /gi = 34032 /ug = Hs.74070 /len = 1691 | | |
| 35703_at | Cluster Incl X06374: Human mRNA for platelet-derived growth factor | 4.875862208 | 0.003643 |
| | PDGF-A /cds = (403,993) /gb = X06374 /gi = 35363 /ug = | | |
| | Hs.37040 /len = 2305 | | |
| 1358_s_a | U22970 /FEATURE = mRNA#1 /DEFINITION = HSU22970 Human | 4.830291781 | 0.000138 |
| | interferon-inducible peptide (6-16) gene, complete cds | | |
| 35822_at | Cluster Incl L15702: Human complement factor B mRNA, complete cds | 4.749292589 | 0.0006 |
| | /cds = (40,2334) /gb = L15702 /gi = 291921 /ug = | | |
| | Hs.69771 /len = 2388 | | |
| 38432_at | Cluster Incl AA203213: zx57e04.r1 Homo sapiens cDNA, 5 end /clone = | 4.746919578 | 0.00033 |
| | IMAGE-446622 /clone_end = 5″ /gb = AA203213 /gi = | | |
| | 1798923 /ug = Hs.833 /len = 879″ | | |
| 40462_at | Cluster Incl AF055022: Homo sapiens clone 24684 mRNA sequence /cds = | 4.654507719 | 0.002269 |
| | UNKNOWN /gb = AF055022 /gi = 3005750 /ug = Hs.168073 | | |
| | /len = 1864 | | |
| 35313_at | Cluster Incl AB002308: Human mRNA for KIAA0310 gene, complete cds | 4.633034993 | 0.000025 |
| | /cds = (1655,4300) /gb = AB002308 /gi = 2224560 | | |
| | /ug = Hs.5716 /len = 5955 | | |
| 40762_g_{—} | Cluster Incl AA705628: zf40a01.s1 Homo sapiens cDNA, 3 end /clone = | 4.598316089 | 0.005112 |
| | 379368 /clone_end = 3″ /gb = AA705628 /gi = 2715546 | | |
| | /ug = Hs.90911 /len = 514″ | | |
| 32306_g_{—} | Cluster Incl J03464: Human collagen alpha-2 type I mRNA, complete cds, | 4.574917305 | 0.000593 |
| | clone pHCOL2A1 /cds = (469,4569) /gb = J03464 /gi = 179595 | | |
| | /ug = Hs.179573 /len = 5416 | | |
| 31901_at | Cluster Incl AF044253: Homo sapiens potassium channel beta 2 subunit | 4.485703929 | 0.000413 |
| | (HKvbeta2.2) mRNA, alternatively spliced, complete cds /cds = | | |
| | (0,1061) /gb = AF044253 /gi = 2827465 /ug = Hs.154417 | | |
| | /len = 1062 | | |
| 35766_at | Cluster Incl M26326: Human keratin 18 mRNA, complete cds /cds = | 4.434133847 | 0.000464 |
| | (51,1343) /gb = M26326 /gi = 186690 /ug = Hs.65114 | | |
| | /len = 1412 | | |
| 36495_at | Cluster Incl U21931: Human fructose-1,6-biphosphatase (FBP1) gene | 4.359840196 | 0.000517 |
| | /cds = (211,1227) /gb = U21931 /gi = 1000077 /ug = | | |
| | Hs.574 /len = 1476 | | |
| 33118_at | Cluster Incl U73167: Homo sapiens cosmid clone LUCA14 from 3p21.3 | 4.325421706 | 0.001122 |
| | /cds = (0,2252) /gb = U73167 /gi = 2880032 /ug = | | |
| | Hs.82222 /len = 2253 | | |
| 38111_at | Cluster Incl X15998: H. sapiens mRNA for the chondroitin sulphate | 4.314531945 | 0.005225 |
| | proteoglycan versican, V1 splice-variant; precursor peptide /cds = | | |
| | (266,7495) /gb = X15998 /gi = 37662 /ug = Hs.81800 | | |
| | /len = 8224 | | |
| 34712_at | Cluster Incl AB023227: Homo sapiens mRNA for KIAA1010 protein, partial | 4.249345789 | 0.006337 |
| | cds /cds = (0,3949) /gb = AB023227 /gi = 4589669 /ug = | | |
| | Hs.23860 /len = 5524 | | |
| 36482_s_{—} | Cluster Incl Y15724: Homo sapiens SERCA3 gene, exons 1-7 (and joined | 4.242412448 | 0.000245 |
| | CDS) /cds = (152,3241) /gb = Y15724 /gi = 3021395 /ug = | | |
| | Hs.5541 /len = 4800 | | |
| 39801_at | Cluster Incl AF046889: Homo sapiens lysyl hydroxylase isoform 3 (PLOD3) | 4.237391894 | 0.001831 |
| | mRNA, complete cds /cds = (216,2432) /gb = AF046889 /gi = | | |
| | 3153234 /ug = Hs.153357 /len = 2735 | | |
| 39959_at | Cluster Incl AL031983: dJ271M21.6 (Diubiquitin) /cds = (18,515) | 4.224484244 | 0.013448 |
| | /gb = AL031983 /gi = 4160199 /ug = Hs.44532 /len = 777 | | |
| 38671_at | Cluster Incl AB014520: Homo sapiens mRNA for KIAA0620 protein, partial cds | 4.204467196 | 0.000003 |
| | /cds = (0,5957) /gb = AB014520 /gi = 3327053 /ug = | | |
| | Hs.105958 /len = 6754 | | |
| 34022_at | Cluster Incl M36821: Human cytokine (GRO-gamma) mRNA, complete cds | 4.186691813 | 0.003842 |
| | /cds = (77,397) /gb = M36821 /gi = 183632 /ug = | | |
| | Hs.89690 /len = 1064 | | |
| 33904_at | Cluster Incl AB000714: Homo sapiens hRVP1 mRNA for RVP1, complete cds | 4.160312065 | 0.009967 |
| | /cds = (198,860) /gb = AB000714 /gi = 2570128 /ug = | | |
| | Hs.25640 /len = 1250 | | |
| 1930_at | U83659 /FEATURE = /DEFINITION = HSU83659 Human multidrug | 4.103745262 | 0.001081 |
| | resistance-associated protein homolog (MRP3) mRNA, partial cds | | |
| 38646_s_{—} | Cluster Incl AI763065: wi64h03.x1 Homo sapiens cDNA, 3 end /clone = | 4.034467285 | 0.045602 |
| | IMAGE-2398133 /clone_end = 3″ /gb = AI763065 /gi = | | |
| | 5178732 /ug = Hs.1032 /len = 670″ | | |
| 35937_at | Cluster Incl U65416: Human MHC class I molecule (MICB) gene, complete cds | 4.031356856 | 0.004886 |
| | /cds = (5,1156) /gb = U65416 /gi = 1815636 /ug = | | |
| | Hs.211580 /len = 2367 | | |
| 36174_at | Cluster Incl X70326: H. sapiens MacMarcks mRNA /cds = (13,600) | 4.021774238 | 0.006155 |
| | /gb = X70326 /gi = 38434 /ug = Hs.75061 /len = 1334 | | |
| 34433_at | Cluster Incl AF035299: Homo sapiens clone 23863 mRNA, partial cds | 3.999547716 | 0.000374 |
| | /cds = (0,1531) /gb = AF035299 /gi = 2661055 /ug = | | |
| | Hs.103854 /len = 1953 | | |
| 34251_at | Cluster Incl M92299: Human homeobox 2.1 protein (HOX2A) mRNA, complete | 3.989655556 | 0.002597 |
| | cds /cds = (275,1084) /gb = M92299 /gi = 184292 /ug = | | |
| | Hs.22554 /len = 2037 | | |
| 1230_g_at | U78556 /FEATURE = /DEFINITION = HSU78556 Human cisplatin | 3.986593947 | 0.007319 |
| | resistance associated alpha protein (hCRA alpha) mRNA, complete cds | | |
| 41812_s_{—} | Cluster Incl AB020713: Homo sapiens mRNA for KIAA0906 protein, partial cds | 3.955302442 | 0.001398 |
| | /cds = (0,2772) /gb = AB020713 /gi = 4240300 /ug = | | |
| | Hs.56966 /len = 4217 | | |
| 33489_at | Cluster Incl U47292: Human spasmolytic polypeptide (SP) gene, 5 region | 3.951274898 | 0.000058 |
| | and /cds = (0,389) /gb = U47292 /gi = 1477544 /ug = | | |
| | Hs.2979 /len = 965″ | | |
| 40712_at | Cluster Incl D26579: Homo sapiens mRNA for transmembrane protein, complete | 3.926351461 | 0.000403 |
| | cds /cds = (9,2483) /gb = D26579 /gi = 1864004 /ug = | | |
| | Hs.86947 /len = 3236 | | |
| 33322_i_a | Cluster Incl X57348: H. sapiens mRNA (clone 9112) /cds = (165,911) | 3.918698039 | 0.000123 |
| | /gb = X57348 /gi = 23939 /ug = Hs.184510 /len = 1407 | | |
| 36976_at | Cluster Incl D21255: Human mRNA for OB-cadherin-2, complete cds /cds = | 3.912909005 | 0.000009 |
| | (476,2557) /gb = D21255 /gi = 575578 /ug = Hs.75929 | | |
| | /len = 3867 | | |
| 39340_at | Cluster Incl M16424: Human beta-hexosaminidase alpha chain (HEXA) gene | 3.895118855 | 0 |
| | /cds = (0,1589) /gb = M16424 /gi = 179457 /ug = | | |
| | Hs.119403 /len = 1590 | | |
| 1586_at | M35878 /FEATURE = expanded_cds /DEFINITION = HUMIBP3 | 3.855842022 | 0.010079 |
| | Human insulin-like growth factor-binding protein-3 gene, complete cds, | | |
| | clone HL1006d | | |
| 925_at | J03909 /FEATURE = /DEFINITION = HUMIIP Human gamma- | 3.854414845 | 0.000001 |
| | interferon-inducible protein (IP-30) mRNA, complete cds | | |
| 37276_at | Cluster Incl U51903: Human RasGAP-related protein (IQGAP2) mRNA, complete | 3.836460946 | 0.004826 |
| | cds /cds = (222,4949) /gb = U51903 /gi = 1262925 /ug = | | |
| | Hs.78993 /len = 5767 | | |
| 37618_at | Cluster Incl M16937: Human homeo box c1 protein, mRNA, complete cds | 3.827480523 | 0.000352 |
| | /cds = (99,752) /gb = M16937 /gi = 184300 /ug = | | |
| | Hs.819 /len = 1359 | | |
| 32609_at | Cluster Incl AI885852: wl62d08.x1 Homo sapiens cDNA, 3 end /clone = | 3.790091828 | 0.000766 |
| | IMAGE-2429487 /clone_end = 3″ /gb = AI885852 /gi = | | |
| | 5591016 /ug = Hs.795 /len = 580″ | | |
| 40118_at | Cluster Incl X07290: Human HF.12 gene mRNA /cds = (0,589) /gb = | 3.770379359 | 0.000033 |
| | X07290 /gi = 32072 /ug = Hs.155470 /len = 1801 | | |
| 2087_s_at | D21254 /FEATURE = /DEFINITION = HUMOSF4A Human mRNA for | 3.756489413 | 0.001994 |
| | OB-cadherin-1, complete cds | | |
| 1482_g_at | L23808 /FEATURE = /DEFINITION = HUMHME Human metalloproteinase | 3.724668585 | 0.001197 |
| | (HME) mRNA, complete cds | | |
| 182_at | U01062 /FEATURE = mRNA /DEFINITION = HUMIP3R3 Human type 3 | 3.723090192 | 0.000948 |
| | inositol 1,4,5-trisphosphate receptor (ITPR3) mRNA, complete cds | | |
| 39542_at | Cluster Incl AF059611: Homo sapiens nuclear matrix protein NRP/B (NRPB) | 3.700905422 | 0.000005 |
| | mRNA, complete cds /cds = (399,2168) /gb = AF059611 /gi = | | |
| | 3309572 /ug = Hs.104925 /len = 4784 | | |
| 32072_at | Cluster Incl U40434: Human mesothelin or CAK1 antigen precursor mRNA, | 3.700537751 | 0.019363 |
| | complete cds /cds = (99,1985) /gb = U40434 /gi = 1145723 | | |
| | /ug = Hs.155981 /len = 2114 | | |
| 36197_at | Cluster Incl Y08374: H. sapiens gene encoding cartilage GP-39 protein, | 3.695365733 | 0.000483 |
| | exon 1 and 2 (and joined CDS) /cds = (126,1277) /gb = Y08374 | | |
| | /gi = 2121309 /ug = Hs.75184 /len = 1925 | | |
| 36184_at | Cluster Incl L06419: Homo sapiens lysyl hydroxylase (PLOD) mRNA, complete | 3.684437007 | 0.000536 |
| | cds /cds = (200,2383) /gb = L06419 /gi = 190073 /ug = | | |
| | Hs.75093 /len = 3115 | | |
| 35362_at | Cluster Incl AB018342: Homo sapiens mRNA for KIAA0799 protein, partial | 3.622214911 | 0.000505 |
| | cds /cds = (0,2138) /gb = AB018342 /gi = 3882318 /ug = | | |
| | Hs.61638 /len = 5613 | | |
| 39649_at | Cluster Incl X78817: H. sapiens partial C1 mRNA /cds = (42,2882) | 3.589352648 | 0.006513 |
| | /gb = X78817 /gi = 840785 /ug = Hs.3109 /len = 3236 | | |
| 1693_s_at | D11139 /FEATURE = exons #1-4 /DEFINITION = | 3.581791533 | 0.001006 |
| | HUMTIMP Human gene for tissue inhibitor of metalloproteinases, partial sequence | | |
| 38566_at | Cluster Incl X60382: H. sapiens COL10A1 gene for collagen (alpha-1 type X) | 3.568272096 | 0.023539 |
| | /cds = (0,2042) /gb = X60382 /gi = 30094 /ug = | | |
| | Hs.179729 /len = 3198 | | |
| 39043_at | Cluster Incl AF006084: Homo sapiens Arp2/3 protein complex subunit | 3.563560014 | 0.000113 |
| | p41-Arc (ARC41) mRNA, complete cds /cds = (80,1198) /gb = | | |
| | AF006084 /gi = 2282033 /ug = Hs.11538 /len = 1408 | | |
| 35926_s_{—} | Cluster Incl AF004230: Homo sapiens monocyte/macrophage Ig-related | 3.560518932 | 0.019359 |
| | receptor MIR-7 (MIR cl-7) mRNA, complete cds /cds = (170,2125) | | |
| | /gb = AF004230 /gi = 2343108 /ug = Hs.204040 /len = 2882 | | |
| 38332_at | Cluster Incl U83993: Human P2X4 purinoreceptor mRNA, complete cds | 3.540548694 | 0.000001 |
| | /cds = (309,1475) /gb = U83993 /gi = 4099120 /ug = | | |
| | Hs.9610 /len = 2031 | | |
| 37542_at | Cluster Incl D86961: Human mRNA for KIAA0206 gene, partial cds /cds = | 3.531781728 | 0.00014 |
| | (0,581) /gb = D86961 /gi = 1503995 /ug = Hs.79299 | | |
| | /len = 4249 | | |
| 33374_at | Cluster Incl L09708: Human complement component 2 (C2) gene allele b | 3.50128085 | 0.043555 |
| | /cds = (271,2529) /gb = L09708 /gi = 2804581 /ug = | | |
| | Hs.2253 /len = 2844 | | |
| 35372_r_a | Cluster Incl M17017: Human beta-thromboglobulin-like protein mRNA, | 3.492697198 | 0.004805 |
| | complete cds /cds = (90,389) /gb = M17017 /gi = 179579 | | |
| | /ug = Hs.624 /len = 1639 | | |
| 38464_at | Cluster Incl X87237: H. sapiens mRNA for processing a-glucosidase I | 3.488460577 | 0.000501 |
| | /cds = (132,2642) /gb = X87237 /gi = 2344809 /ug = | | |
| | Hs.83919 /len = 2854 | | |
| 33730_at | Cluster Incl AF095448: Homo sapiens putative G protein-coupled receptor | 3.420612984 | 0.000001 |
| | (RAIG1) mRNA, complete cds /cds = (99,1172) /gb = AF095448 | | |
| | /gi = 4063889 /ug = Hs.194691 /len = 2288 | | |
| 37310_at | Cluster Incl X02419: H. sapiens uPA gene /cds = (119,1414) /gb = | 3.389908873 | 0.000181 |
| | X02419 /gi = 37601 /ug = Hs.77274 /len = 2344 | | |
| 32305_at | Cluster Incl J03464: Human collagen alpha-2 type I mRNA, complete cds, | 3.385860182 | 0.00189 |
| | clone pHCOL2A1 /cds = (469,4569) /gb = J03464 /gi = 179595 | | |
| | /ug = Hs.179573 /len = 5416 | | |
| 38388_at | Cluster Incl M11810: Human (2-5″) oligo A synthetase E gene | 3.354436847 | 0.00674 |
| | /cds = (0,1202) /gb = M11810 /gi = 189323 /ug = | | |
| | Hs.82396 /len = 1552″ | | |
| 37423_at | Cluster Incl U30246: Human bumetanide-sensitive Na—K—Cl | 3.349808467 | 0.003674 |
| | cotransporter (NKCC1) mRNA, complete cds /cds = (164,3802) /gb = | | |
| | U30246 /gi = 903681 /ug = Hs.110736 /len = 4098 | | |
| 464_s_at | U72882 /FEATURE = /DEFINITION = HSU72882 Human Interferon-induced | 3.328892723 | 0.000109 |
| | leucine zipper protein (IFP35) mRNA, partial cds | | |
| 36732_at | Cluster Incl AI004207: ot94g05.x1 Homo sapiens cDNA, 3 end /clone = | 3.3206594 | 0.004758 |
| | IMAGE-1624472 /clone_end = 3″ /gb = AI004207 /gi = | | |
| | 3213717 /ug = Hs.55879 /len = 517″ | | |
| 32629_f_a | Cluster Incl U90552: Human butyrophilin (BTF5) mRNA, complete cds | 3.282634677 | 0.015555 |
| | /cds = (359,1900) /gb = U90552 /gi = 2062705 /ug = | | |
| | Hs.167740 /len = 3416 | | |
| 38607_at | Cluster Incl AF027204: Homo sapiens putative tetraspan transmembrane | 3.279897454 | 0.001734 |
| | protein L6H (TM4SF5) mRNA, complete cds /cds = (32,625) /gb = | | |
| | AF027204 /gi = 2587053 /ug = Hs.184194 /len = 708 | | |
| 35355_at | Cluster Incl AB020697: Homo sapiens mRNA for KIAA0890 protein, complete | 3.279064388 | 0.00002 |
| | cds /cds = (143,3727) /gb = AB020697 /gi = 4240268 | | |
| | /ug = Hs.6141 /len = 3800 | | |
| 39230_at | Cluster Incl AL022318: bK150C2.2 (Phorbolin 3) /cds = (29,1177) | 3.24749805 | 0.000479 |
| | /gb = AL022318 /gi = 4826439 /ug = Hs.226307 /len = 1512 | | |
| 33813_at | Cluster Incl AI813532: wj83a09.x1 Homo sapiens cDNA, 3 end /clone = | 3.24556325 | 0.001423 |
| | IMAGE-2409400 /clone_end = 3″ /gb = AI813532 /gi = | | |
| | 5424738 /ug = Hs.204298 /len = 733″ | | |
| 40333_at | Cluster Incl U43842: Homo sapiens bone morphogenetic protein-4 (hBMP-4) | 3.244861857 | 0.003231 |
| | gene, complete cds /cds = (435,1661) /gb = U43842 /gi = | | |
| | 3850194 /ug = Hs.68879 /len = 1946 | | |
| 38064_at | Cluster Incl X79882: H. sapiens Irp mRNA /cds = (105,2795) | 3.242458638 | 0.000285 |
| | /gb = X79882 /gi = 895839 /ug = Hs.80680 /len = 2816 | | |
| 36642_at | Cluster Incl J00287: Human pepsinogen gene /cds = (55,1221) | 3.238347007 | 0.004957 |
| | /gb = J00287 /gi = 189798 /ug = Hs.75558 /len = 1381 | | |
| 658_at | L12350 /FEATURE = mRNA /DEFINITION = HUMTHRSPO Human | 3.207772873 | 0.013942 |
| | thrombospondin 2 (THBS2) mRNA, complete cds | | |
| 35345_at | Cluster Incl X83618: H. sapiens mRNA for 3-hydroxy-3-methylglutaryl | 3.189979043 | 0.000053 |
| | coenzyme A synthase /cds = (51,1577) /gb = X83618 /gi = | | |
| | 619876 /ug = Hs.59889 /len = 2043 | | |
| 36194_at | Cluster Incl M63959: Human alpha-2-macroglobulin receptor-associated | 3.189185993 | 0.004792 |
| | protein mRNA, complete cds /cds = (13,1086) /gb = M63959 | | |
| | /gi = 177873 /ug = Hs.75140 /len = 1493 | | |
| 37637_at | Cluster Incl U27655: Human RGP3 mRNA, complete cds /cds = (287,1846) | 3.161911203 | 0.001763 |
| | /gb = U27655 /gi = 1216368 /ug = Hs.82294 /len = 2638 | | |
| 37200_at | Cluster Incl J04162: Human leukocyte IgG receptor (Fc-gamma-R) mRNA, | 3.134424959 | 0.00002 |
| | complete cds /cds = (17,718) /gb = J04162 /gi = 183036 | | |
| | /ug = Hs.763 /len = 1977 | | |
| 33127_at | Cluster Incl U89942: Human lysyl oxidase-related protein (WS9-14) mRNA, | 3.13386346 | 0.020488 |
| | complete cds /cds = (247,2571) /gb = U89942 /gi = 1890107 | | |
| | /ug = Hs.83354 /len = 3432 | | |
| 33890_at | Cluster Incl AB008109: Homo sapiens mRNA for RGS5, complete cds | 3.122107461 | 0.000677 |
| | /cds = (81,626) /gb = AB008109 /gi = 2554613 /ug = | | |
| | Hs.24950 /len = 2076 | | |
| 38363_at | Cluster Incl W60864: zd27g05.s1 Homo sapiens cDNA, 3 end /clone = | 3.115921272 | 0.0026 |
| | IMAGE-341912 /clone_end = 3″ /gb = W60864 /gi = | | |
| | 1367661 /ug = Hs.9963 /len = 541″ | | |
| 39167_r_a | Cluster Incl D83174: Human mRNA for collagen binding protein 2, complete | 3.112282703 | 0.000802 |
| | cds /cds = (87,1343) /gb = D83174 /gi = 1199486 /ug = | | |
| | Hs.9930 /len = 2047 | | |
| 31856_at | Cluster Incl Z24680: H. sapiens garp gene mRNA, complete CDS /cds = | 3.10615755 | 0.000566 |
| | (94,2082) /gb = Z24680 /gi = 439295 /ug = Hs.151641 | | |
| | /len = 4153 | | |
| 1717_s_at | U45878 /FEATURE = /DEFINITION = HSU45878 Human inhibitor of | 3.096213742 | 0.001867 |
| | apoptosis protein 1 mRNA, complete cds | | |
| 659_g_at | L12350 /FEATURE = mRNA /DEFINITION = HUMTHRSPO Human | 3.089235008 | 0.007846 |
| | thrombospondin 2 (THBS2) mRNA, complete cds | | |
| 753_at | D86425 /FEATURE = /DEFINITION = D86425 Homo sapiens mRNA | 3.077550233 | 0.001355 |
| | for osteonidogen, complete cds | | |
| 32193_at | Cluster Incl AF030339: Homo sapiens receptor for viral semaphorin | 3.076341896 | 0.001147 |
| | protein (VESPR) mRNA, complete cds /cds = (249,4955) /gb = | | |
| | AF030339 /gi = 3176761 /ug = Hs.184697 /len = 5121 | | |
| 38612_at | Cluster Incl M69023: Human globin gene /cds = UNKNOWN /gb = | 3.067377921 | 0.000648 |
| | M69023 /gi = 183127 /ug = Hs.100090 /len = 1119 | | |
| 32634_s_{—} | Cluster Incl U38260: Human islet cell autoantigen ICAp69 mRNA, complete | 3.064088746 | 0.002374 |
| | cds /cds = (169,942) /gb = U38260 /gi = 1675205 /ug = | | |
| | Hs.167927 /len = 1415 | | |
| 38311_at | Cluster Incl AF055012: Homo sapiens clone 24615 mRNA sequence /cds = | 3.057506025 | 0.000007 |
| | UNKNOWN /gb = AF055012 /gi = 3005735 /ug = Hs.94785 | | |
| | /len = 1757 | | |
| 34871_at | Cluster Incl W30677: zb75h10.r1 Homo sapiens cDNA, 5 end /clone = | 3.046742301 | 0.00934 |
| | IMAGE-309475 /clone_end = 5″ /gb = W30677 /gi = 1311730 | | |
| | /ug = Hs.5019 /len = 614″ | | |
| 32128_at | Cluster Incl Y13710: Homo sapiens mRNA for alternative activated | 3.044427861 | 0.001745 |
| | macrophage specific CC chemokine 1 /cds = (70,339) /gb = | | |
| | Y13710 /gi = 2326515 /ug = Hs.16530 /len = 779 | | |
| 39421_at | Cluster Incl D43969: Human AML1 mRNA for AML1c protein (alternatively | 3.036973884 | 0.001109 |
| | spliced product), complete cds /cds = (444,1886) /gb = D43969 | | |
| | /gi = 966998 /ug = Hs.129914 /len = 6212 | | |
| 41354_at | Cluster Incl U25997: Homo sapiens stanniocalcin precursor (STC) mRNA, | 3.032061085 | 0.001245 |
| | complete cds /cds = (284,1027) /gb = U25997 /gi = 3006202 | | |
| | /ug = Hs.25590 /len = 3881 | | |
| 35064_at | Cluster Incl X81006: H. sapiens HCG I mRNA /cds = UNKNOWN /gb = | 3.024314786 | 0.005685 |
| | X81006 /gi = 531406 /ug = Hs.104114 /len = 1224 | | |
| 35127_at | Cluster Incl AI039144: ox31b09.s1 Homo sapiens cDNA, 3 end /clone = | 3.011925912 | 0.024025 |
| | IMAGE-1657913 /clone_end = 3″ /gb = AI039144 /gi = 3278338 | | |
| | /ug = Hs.121017 /len = 527″ | | |
| 31720_s_{—} | Cluster Incl M10905: Human cellular fibronectin mRNA /cds = (0,2383) | 0.329485955 | 0.002116 |
| | /gb = M10905 /gi = 182696 /ug = Hs.118162 /len = 2384 | | |
| 32618_at | Cluster Incl X93086: H. sapiens mRNA for biliverdin IX alpha reductase | 0.329108511 | 0.00447 |
| | /cds = (60,950) /gb = X93086 /gi = 1246748 /ug = Hs.81029 | | |
| | /len = 1053 | | |
| 36684_at | Cluster Incl M21154: Human S-adenosylmethionine decarboxylase mRNA, complete cds | 0.328867318 | 0.001013 |
| | /cds = (248,1252) /gb = M21154 /gi = 178517 /ug = Hs.75744 | | |
| | /len = 1805 | | |
| 32668_at | Cluster Incl AL080076: Homo sapiens mRNA; cDNA DKFZp564C0362 (from clone | 0.32860867 | 0.000001 |
| | DKFZp564C0362) /cds = (59,1144) /gb = AL080076 /gi = 5262486 | | |
| | /ug = Hs.169833 /len = 1711 | | |
| 38158_at | Cluster Incl D79987: Human mRNA for KIAA0165 gene, complete cds /cds = | 0.328288405 | 0.000035 |
| | (1113,6500) /gb = D79987 /gi = 1136391 /ug = Hs.153479 | | |
| | /len = 6662 | | |
| 31525_s_{—} | Cluster Incl J00153: Human alpha globin gene cluster on chromosome 16- zeta | 0.328281737 | 0.008516 |
| | gene /cds = (0,428) /gb = J00153 /gi = 183794 /ug = | | |
| | Hs.182374 /len = 429 | | |
| 38010_at | Cluster Incl AF002697: Homo sapiens E1B 19K/Bcl-2-binding protein Nip3 mRNA, | 0.328241183 | 0.005897 |
| | nuclear gene encoding mitochondrial protein, complete cds /cds = (126,710) | | |
| | /gb = AF002697 /gi = 2511528 /ug = Hs.79428 /len = 1518 | | |
| 33559_at | Cluster Incl U61412: Human non-receptor type protein tyrosine kinase (PTK6) | 0.328077412 | 0.003401 |
| | gene /cds = (813,2168) /gb = U61412 /gi = 3551752 /ug = | | |
| | Hs.51133 /len = 3527 | | |
| 41320_s_{—} | Cluster Incl U69609: Human transcriptional represser (GCF2) mRNA, complete cds | 0.327287446 | 0.0018 |
| | /cds = (124,2382) /gb = U69609 /gi = 3421044 /ug = Hs.239894 | | |
| | /len = 3505 | | |
| 39120_at | Cluster Incl AA224832: nc33b06.s1 Homo sapiens cDNA/clone = IMAGE-1009907 | 0.327269934 | 0.000091 |
| | /gb = AA224832 /gi = 1846120 /ug = Hs.94360 /len = 447 | | |
| 36214_at | Cluster Incl U70663: Human zinc finger transcription factor hEZF (EZF) mRNA, | 0.326147693 | 0.003789 |
| | complete cds /cds = (503,1915) /gb = U70663 /gi = 1857160 | | |
| | /ug = Hs.236377 /len = 1953 | | |
| 38508_s_{—} | Cluster Incl U89337: Human HLA class III region containing cAMP response | 0.325801777 | 0.03159 |
| | element binding protein-related protein (CREB-RP) and tenascin X (tenascin-X) | | |
| | genes, complete cds /cds = (0,12869) /gb = U89337 /gi = 1841544 | | |
| | /ug = Hs.169886 /len = 12870 | | |
| 41257_at | Cluster Incl D16217: Human mRNA for calpastatin, complete cds /cds = | 0.32559376 | 0.014175 |
| | (162,2288) /gb = D16217 /gi = 303598 /ug = Hs.226067 | | |
| | /len = 2493 | | |
| 38407_r_a | Cluster Incl AI207842: ao89h09.x1 Homo sapiens cDNA, 3 end /clone = | 0.325385636 | 0.038443 |
| | IMAGE-1953089 /clone_end = 3″ /gb = AI207842 /gi = 3769784 | | |
| | /ug = Hs.8272 /len = 771″ | | |
| 39159_at | Cluster Incl X99656: H. sapiens mRNA for protein containing SH3 domain, SH3GL1 | 0.324435334 | 0.000015 |
| | /cds = (15,1121) /gb = X99656 /gi = 1869809 /ug = Hs.97616 | | |
| | /len = 2349 | | |
| 853_at | S74017 /FEATURE = /DEFINITION = S74017 Nrf2 = NF-E2-like basic | 0.323486825 | 0.002917 |
| | leucine zipper transcriptional activator [human, hemin-induced K562 cells, | | |
| | mRNA, 2304 nt] | | |
| 33839_at | Cluster Incl D26350: Human mRNA for type 2 inositol 1,4,5-trisphosphate receptor, | 0.322681628 | 0.014546 |
| | complete cds /cds = (418,8523) /gb = D26350 /gi = 450468 | | |
| | /ug = Hs.238272 /len = 10524 | | |
| 39693_at | Cluster Incl N53547: yv43b12.s1 Homo sapiens cDNA, 3 end /clone = | 0.320728331 | 0.014542 |
| | IMAGE-245471 /clone_end = 3″ /gb = N53547 /gi = 1194713 | | |
| | /ug = Hs.13662 /len = 665″ | | |
| 40508_at | Cluster Incl AF025887: Homo sapiens glutathione S-transferase A4-4 (GSTA4) mRNA, | 0.320203001 | 0.011333 |
| | complete cds /cds = (73,741) /gb = AF025887 /gi = 3046391 | | |
| | /ug = Hs.169907 /len = 1260 | | |
| 1590_s_at | J00277 /FEATURE = cds /DEFINITION = HUMRASH Human (genomic clones | 0.319460667 | 0.001811 |
| | lambda-[SK2-T2, HS578T]; cDNA clones RS-[3,4,6]) c-Ha-ras1 | | |
| | proto-oncogene, complete coding sequence | | |
| 351_f_at | D28423 /FEATURE = /DEFINITION = HUMPSF82 Human mRNA for pre-mRNA | 0.318411751 | 0.000636 |
| | splicing factor SRp20, 5″ UTR (sequence from the 5″ cap to the start | | |
| | codon) | | |
| 871_s_at | M95585 /FEATURE = mRNA /DEFINITION = HUMHLF Human hepatic leukemia | 0.317171499 | 0.001365 |
| | factor (HLF) mRNA, complete cds | | |
| 33113_at | Cluster Incl U65093: Human msg1-related gene 1 (mrg1) mRNA, complete cds | 0.316986667 | 0.00001 |
| | /cds = (199,840) /gb = U65093 /gi = 1853998 /ug = Hs.82071 | | |
| | /len = 899 | | |
| 32380_at | Cluster Incl Z34974: H. sapiens mRNA for plakophilin (partial) /cds = | 0.316462158 | 0.01096 |
| | (252,2432) /gb = Z34974 /gi = 550114 /ug = Hs.198382 | | |
| | /len = 2680 | | |
| 863_g_at | U04313 /FEATURE = /DEFINITION = HSU04313 Human maspin mRNA, | 0.316356159 | 0.000203 |
| | complete cds | | |
| 32666_at | Cluster Incl U19495: Human intercrine-alpha (hIRH) mRNA, complete cds | 0.316156704 | 0.000461 |
| | /cds = (473,742) /gb = U19495 /gi = 1754834 /ug = Hs.169672 | | |
| | /len = 2244 | | |
| 34197_at | Cluster Incl X80907: H. sapiens mRNA for p85 beta subunit of phosphatidyl- | 0.314829826 | 0.004387 |
| | inositol-3-kinase /cds = (241,2427) /gb = X80907 /gi = 2160047 | | |
| | /ug = Hs.211586 /len = 3201 | | |
| 39908_at | Cluster Incl AF069735: Homo sapiens PCAF associated factor 65 alpha mRNA, | 0.314036765 | 0.001203 |
| | complete cds /cds = (0,1868) /gb = AF069735 /gi = 3335558 | | |
| | /ug = Hs.131846 /len = 1869 | | |
| 33421_s_{—} | Cluster Incl AB016247: Homo sapiens mRNA for sterol-C5-desaturase, complete | 0.313717219 | 0.000009 |
| | cds /cds = (81,980) /gb = AB016247 /gi = 3721881 /ug = | | |
| | Hs.227947 /len = 2104 | | |
| 39669_at | Cluster Incl AJ009985: Homo sapiens mRNA for annexin 31 /cds = (436,1452) | 0.312453495 | 0.002723 |
| | /gb = AJ009985 /gi = 3688369 /ug = Hs.3346 /len = 1762 | | |
| 36496_at | Cluster Incl AF014398: Homo sapiens myo-inositol monophosphatase 2 mRNA, complete | 0.310618357 | 0.002251 |
| | cds /cds = (141,1007) /gb = AF014398 /gi = 2406665 /ug = | | |
| | Hs.5753 /len = 1428 | | |
| 40684_at | Cluster Incl U78190: Human GTP cyclohydrolase I feedback regulatory protein gene, | 0.310587584 | 0.000134 |
| | complete cds /cds = (94,348) /gb = U78190 /gi = 1698996 | | |
| | /ug = Hs.83081 /len = 712 | | |
| 32363_at | Cluster Incl AF059214: Homo sapiens cholesterol 25-hydroxylase mRNA, complete cds | 0.30897539 | 0.000255 |
| | /cds = (10,828) /gb = AF059214 /gi = 4038307 /ug = Hs.194687 | | |
| | /len = 1360 | | |
| 39364_s_{—} | Cluster Incl Y18207: Homo sapiens mRNA for protein phosphatase 1 (PPP1R5) | 0.308335729 | 0.000446 |
| | /cds = (91,1044) /gb = Y18207 /gi = 3805818 /ug = Hs.12112 | | |
| | /len = 1158 | | |
| 33305_at | Cluster Incl M93056: Human mononcyte/neutrophil elastase inhibitor mRNA sequence | 0.307283402 | 0.000768 |
| | /cds = UNKNOWN /gb = M93056 /gi = 188621 /ug = Hs.183583 | | |
| | /len = 1298 | | |
| 37662_at | Cluster Incl AI701164: we10g07.x1 Homo sapiens cDNA, 3 end /clone = | 0.306979084 | 0.000015 |
| | IMAGE-2340732 /clone_end = 3″ /gb = AI701164 /gi = 4989064 | | |
| | /ug = Hs.78563 /len = 777″ | | |
| 1490_at | M19720 /FEATURE = mRNA#2 /DEFINITION = HUMMYC3L Human L-myc | 0.306261149 | 0.000001 |
| | protein gene, complete cds | | |
| 34986_at | Cluster Incl AF030455: Homo sapiens epithelial V-like antigen precursor (EVA) | 0.305646698 | 0 |
| | mRNA, complete cds /cds = (119,766) /gb = AF030455 /gi = 3169829 | | |
| | /ug = Hs.151602 /len = 1342 | | |
| 41359_at | Cluster Incl Z98265: Homo sapiens mRNA for plakophilin 3 /cds = (74,2467) | 0.304122892 | 0.014199 |
| | /gb = Z98265 /gi = 4995640 /ug = Hs.26557 /len = 2808 | | |
| 31737_at | Cluster Incl J00068: Human adult skeletal muscle alpha-actin mRNA /cds = | 0.304080909 | 0.002586 |
| | (103,1236) /gb = J00068 /gi = 178028 /ug = Hs.1288 | | |
| | /len = 1374 | | |
| 33678_i_a | Cluster Incl X02344: Homo sapiens beta 2 gene /cds = (0,1337) /gb = | 0.303098003 | 0.003362 |
| | X02344 /gi = 37493 /ug = Hs.184582 /len = 1338 | | |
| 38086_at | Cluster Incl AB007935: Homo sapiens mRNA for KIAA0466 protein, partial cds | 0.303085926 | 0.000129 |
| | /cds = (0,2104) /gb = AB007935 /gi = 3413893 /ug = | | |
| | Hs.81234 /len = 4974 | | |
| 36040_at | Cluster Incl AI337192: qx88h10.x1 Homo sapiens cDNA, 3 end /clone = | 0.302572056 | 0.000013 |
| | IMAGE-2009635 /clone_end = 3″ /gb = AI337192 /gi = 4074119 | | |
| | /ug = Hs.47438 /len = 925″ | | |
| 35773_i_a | Cluster Incl AA527880: nh86h10.s1 Homo sapiens cDNA, 3 end /clone = | 0.301976692 | 0.000118 |
| | IMAGE-965443 /clone_end = 3″ /gb = AA527880 /gi = 2269949 | | |
| | /ug = Hs.661 /len = 568″ | | |
| 33369_at | Cluster Incl AI535653: P9-C4.T3.P9.D4 Homo sapiens cDNA, 3 end /clone_end = | 0.301863032 | 0.000092 |
| | 3″ /gb = AI535653 | | |
| | /gi = 4449788 /ug = Hs.223018 /len = 590″ | | |
| 40403_at | Cluster Incl Z97171: Homo sapiens GLC1A (trabecular meshwork induced glucocortcoid | 0.301281577 | 0.000355 |
| | response) gene, exon I, joined CDS /cds = (77,1591) /gb = Z97171 | | |
| | /gi = 2425156 /ug = Hs.78454 /len = 2262 | | |
| 36916_at | Cluster Incl X74570: H. sapiens mRNA for Gal-beta(1-3/1-4)GlcNAc | 0.301200654 | 0 |
| | alpha-2.3-sialyltransferase /cds = (162,1151) /gb = X74570 /gi = | | |
| | 414890 /ug = Hs.75268 /len = 1741 | | |
| 32570_at | Cluster Incl L76465: Homo sapiens NAD+-dependent 15 hydroxyprostaglandin | 0.300349654 | 0.003846 |
| | dehydrogenase (PGDH) mRNA, complete cds /cds = (17,817) /gb = L76465 | | |
| | /gi = 1203983 /ug = Hs.77348 /len = 2518 | | |
| 31932_f_a | Cluster Incl M90357: Human basic transcription factor 3a (BTF3a) gene /cds = | 0.299724858 | 0.000004 |
| | (0,476) /gb = M90357 /gi = 457435 /ug = Hs.166033 /len = 487 | | |
| 37225_at | Cluster Incl D79994: Human mRNA for KIAA0172 gene, partial cds /cds = | 0.297788145 | 0.000001 |
| | (0,3923) /gb = D79994 /gi = 1136403 /ug = Hs.77546 | | |
| | /len = 4792 | | |
| 40155_at | Cluster Incl D31883: Human mRNA for KIAA0059 gene, complete cds /cds = | 0.297603964 | 0.000298 |
| | (221,1609) /gb = D31883 /gi = 505093 /ug = Hs.158203 | | |
| | /len = 6754 | | |
| 31605_at | Cluster Incl U72518: Human destrin-2 pseudogene mRNA, complete cds /cds = | 0.297321107 | 0.000296 |
| | (268,798) /gb = U72518 /gi = 1673523 /ug = Hs.199299 | | |
| | /len = 1057 | | |
| 38057_at | Cluster Incl AL049798: Human DNA sequence from clone 797M17 on chromosome | 0.296747826 | 0.04127 |
| | 1q22-24.3. Contains the DPT gene for Dermatopontin, ESTs, an STS and GSSs | | |
| | /cds = (9,614) /gb = AL049798 /gi = 4995638 | | |
| | /ug = Hs.80552 /len = 1705 | | |
| 35730_at | Cluster Incl X03350: Human mRNA for alcohol dehydrogenase beta-1-subunit | 0.295479632 | 0.001241 |
| | (ADH1-2 allele) /cds = (72,1199) /gb = X03350 /gi = 28415 | | |
| | /ug = Hs.4 /len = 2532 | | |
| 34642_at | Cluster Incl U28964: Homo sapiens 14-3-3 protein mRNA, complete cds | 0.295377674 | 0.00066 |
| | /cds = (126,863) /gb = U28964 /gi = 899458 /ug = Hs.75103 | | |
| | /len = 1030 | | |
| 36133_at | Cluster Incl AL031058: Human DNA sequence from clone 512B11 on chromosome | 0.295336914 | 0.00182 |
| | 6p24-25. Contains the Desmoplakin I (DPI) gene, ESTs, STSs and GSSs /cds = | | |
| | (279,8894) /gb = AL031058 /gi = 3395507 /ug = Hs.74316 | | |
| | /len = 9591 | | |
| 41770_at | Cluster Incl AA420624: nc61c12.r1 Homo sapiens cDNA /clone = IMAGE-745750 | 0.293839135 | 0.005885 |
| | /gb = AA420624 /gi = 2094502 /ug = Hs.183109 /len = 533 | | |
| 31831_at | Cluster Incl AI888563: wn33a05.x1 Homo sapiens cDNA, 3 end /clone = | 0.293100784 | 0.000087 |
| | IMAGE-2447216 /clone_end = 3″ /gb = AI888563 /gi = 5593727 | | |
| | /ug = Hs.149098 /len = 678″ | | |
| 32242_at | Cluster Incl AL038340: DKFZp566K192_s1 Homo sapiens cDNA, 3 end /clone = | 0.293076261 | 0.000031 |
| | DKFZp566K192 /clone end = 3″/gb = AL038340 /gi = 5407591 | | |
| | /ug = Hs.1940 /len = 746″ | | |
| 1629_s_at | Tyrosine Phosphatase 1, Non-Receptor, Alt. Splice 3 | 0.292518104 | 0.020967 |
| 757_at | D28364 /FEATURE = /DEFINITION = HUMAI23 Human mRNA for annexin II, | 0.2917755 | 0.007341 |
| | 5″UTR (sequence from the 5″ cap to the start codon) | | |
| 36900_at | Cluster Incl U52426: Homo sapiens GOK (STIM1) mRNA, complete cds /cds = | 0.291126081 | 0.003618 |
| | (565,2622) /gb = U52426 /gi = 2264345 /ug = Hs.74597 | | |
| | /len = 4040 | | |
| 37159_at | Cluster Incl U79259: Human clone 23945 mRNA, complete cds /cds = (636,1403) | 0.2910031 | 0.008274 |
| | /gb = U79259 /gi = 1710213 /ug = Hs.10700 /len = 1683 | | |
| 36105_at | Cluster Incl M18728: Human nonspecific crossreacting antigen mRNA, complete cds | 0.290919286 | 0.000145 |
| | /cds = UNKNOWN /gb = M18728 /gi = 189084 /ug = Hs.73848 | | |
| | /len = 2533 | | |
| 32331_at | Cluster Incl X60673: Human AK3 mRNA for adenylate kinase 3 /cds = UNKNOWN | 0.29044214 | 0.000343 |
| | /gb = X60673 /gi = 28576 /ug = Hs.182740 /len = 1692 | | |
| 37131_at | Cluster Incl AB008390: Homo sapiens mRNA for neuropsin type1, complete cds | 0.290436248 | 0.000002 |
| | /cds = (91,873) /gb = AB008390 /gi = 5672472 /ug = | | |
| | Hs.104570 /len = 922 | | |
| 38627_at | Cluster Incl M95585: Human hepatic leukemia factor (HLF) mRNA, complete cds | 0.288939128 | 0.001437 |
| | /cds = (322,1209) /gb = M95585 /gi = 184223 /ug = Hs.101047 | | |
| | /len = 3865 | | |
| 40409_at | Cluster Incl U46689: Human microsomal aldehyde dehydrogenase (ALD10) mRNA, | 0.288681109 | 0.000525 |
| | complete cds /cds = (449,1906) /gb = U46689 /gi = 1870243 | | |
| | /ug = Hs.159608 /len = 3918 | | |
| 41401_at | Cluster Incl U57646: Homo sapiens cysteine and glycine-rich protein 2 (CSRP2) | 0.287838122 | 0.003583 |
| | mRNA, complete cds /cds = (56,637) /gb = U57646 /gi = 1373337 | | |
| | /ug = Hs.10526 /len = 883 | | |
| 36955_at | Cluster Incl U10362: Human GP36b glycoprotein mRNA, complete cds /cds = | 0.287754466 | 0.003797 |
| | (0,1070) /gb = U10362 /gi = 505651 /ug = Hs.75864 | | |
| | /len = 1407 | | |
| 34738_at | Cluster Incl L11931: Human cytosolic serine hydroxymethyltransferase (SHMT) | 0.285933018 | 0.000091 |
| | mRNA, complete cds /cds = (24,1475) /gb = L11931 /gi = 307421 | | |
| | /ug = Hs.239644 /len = 1669 | | |
| 37972_at | Cluster Incl U75744: Homo sapiens DNase gamma mRNA, complete cds /cds = | 0.285701166 | 0.000029 |
| | (92,1009) /gb = U75744 /gi = 3236319 /ug = Hs.88646 | | |
| | /len = 1093 | | |
| 32522_f_a | Cluster Incl M20469: Human brain-type clathrin light-chain b mRNA, complete cds | 0.285155024 | 0.001194 |
| | /cds = (172,861) /gb = M20469 /gi = 179398 /ug = Hs.73919 | | |
| | /len = 1134 | | |
| 38370_at | Cluster Incl U90902: Human clone 23612 mRNA sequence /cds = UNKNOWN | 0.284903455 | 0.000865 |
| | /gb = U90902 /gi = 1913880 /ug = Hs.82141 /len = 1528 | | |
| 36079_at | Cluster Incl AF010309: Homo sapiens Pig3 (PIG3) mRNA, complete cds /cds = | 0.28144582 | 0.000001 |
| | (527,1495) /gb = AF010309 /gi = 2754811 /ug = Hs.50649 | | |
| | /len = 1670 | | |
| 2049_s_at | M29039 /FEATURE = cds /DEFINITION = HUMJUNCAA Human transactivator | 0.278175501 | 0.009389 |
| | (jun-B) gene, complete cds | | |
| 41365_at | Cluster Incl Y09788: H. sapiens MUC5B gene /cds = (0,2538) /gb = | 0.275992902 | 0.007022 |
| | Y09788 /gi = 2370132 /ug = Hs.102482 /len = 3100 | | |
| 31410_at | Cluster Incl AF023614: Homo sapiens transmembrane activator and CAML interactor | 0.275927919 | 0.001766 |
| | (TACI) mRNA, complete cds /cds = (13,894) /gb = AF023614 /gi = | | |
| | 2554947 /ug = Hs.158341 /len = 1357 | | |
| 39631_at | Cluster Incl U52100: Human XMP mRNA, complete cds /cds = (63,566) /gb = | 0.275453313 | 0.000281 |
| | U52100 /gi = 2474095 /ug = Hs.29191 /len = 690 | | |
| 32275_at | Cluster Incl X04470: Human mRNA for antileukoprotease (ALP) from cervix uterus | 0.273498414 | 0.003954 |
| | /cds = (18,416) /gb = X04470 /gi = 28638 /ug = Hs.169793 | | |
| | /len = 594 | | |
| 37723_at | Cluster Incl U47414: Human cyclin G2 mRNA, complete cds /cds = (135,1169) | 0.273304688 | 0.015963 |
| | /gb = U47414 /gi = 1335886 /ug = Hs.79069 /len = 2044 | | |
| 35330_at | Cluster Incl AJ012737: Homo sapiens mRNA for filamin, muscle isoform /cds = | 0.273256372 | 0.006517 |
| | (18,8096) /gb = AJ012737 /gi = 5419654 /ug = Hs.58414 | | |
| | /len = 8842 | | |
| 179_at | U38980 /FEATURE = /DEFINITION = U38980 Human PMS2 related (hPMSR6) mRNA, | 0.271809973 | 0.001563 |
| | complete cds | | |
| 37926_at | Cluster Incl D14520: Human mRNA for GC-Box binding protein BTEB2, complete cds | 0.270544367 | 0.000116 |
| | /cds = (558,1217) /gb = D14520 /gi = 303596 /ug = Hs.84728 | | |
| | /len = 1301 | | |
| 32847_at | Cluster Incl U48959: Homo sapiens myosin light chain kinase (MLCK) mRNA, complete | 0.270328396 | 0.006524 |
| | cds /cds = (119,5863) /gb = U48959 /gi = 1377819 /ug = | | |
| | Hs.211582 /len = 5926 | | |
| 2094_s_at | K00650 /FEATURE = cds /DEFINITION = HUMFOS Human fos proto-oncogene | 0.270175289 | 0.000004 |
| | (c-fos), complete cds | | |
| 467_at | U63717 /FEATURE = /DEFINITION = HSU63717 Homo sapiens osteoclast | 0.27004121 | 0.000962 |
| | stimulating factor mRNA, complete cds | | |
| 36524_at | Cluster Incl AB029035: Homo sapiens mRNA for KIAA1112 protein, partial cds | 0.262861548 | 0.00005 |
| | /cds = (0,2086) /gb = AB029035 /gi = 5689560 /ug = Hs.6066 | | |
| | /len = 3800 | | |
| 38971_r_a | Cluster Incl AJ011896: Homo sapiens mRNA for HIV-1, Nef-associated factor 1 | 0.261633057 | 0.029949 |
| | beta (Naf1 beta) /cds = (110,2017) /gb = AJ011896 /gi = 3758820 | | |
| | /ug = Hs.109281 /len = 2710 | | |
| AFFX-HU | M33197 Human glyceraldehyde-3-phosphate dehydrogenase (GAPDH) mRNA, complete | 0.261185115 | 0.015471 |
| | cds (_5, _M, _3 represent transcript regions 5 prime, Middle, and 3 prime | | |
| | respectively) | | |
| 39528_at | Cluster Incl L24564: Human Rad mRNA, complete cds /cds = (123,1049) | 0.260631274 | 0.000003 |
| | /gb = L24564 /gi = 439602 /ug = Hs.1027 /len = 1443 | | |
| 36734_at | Cluster Incl M21302: Human small proline rich protein (sprll) mRNA, clone 174N | 0.257892687 | 0 |
| | /cds = (60,278) /gb = M21302 /gi = 338424 /ug = Hs.56306 | | |
| | /len = 683 | | |
| 33849_at | Cluster Incl U02020: Human pre-B cell enhancing factor (PBEF) mRNA, complete cds | 0.256441757 | 0.010246 |
| | /cds = (27,1502) /gb = U02020 /gi = 404012 /ug = Hs.239138 | | |
| | /len = 2376 | | |
| 34951_at | Cluster Incl D10923: Human mRNA for HM74 /cds = (60,1223) /gb = D10923 | 0.254262997 | 0.000014 |
| | /gi = 219866 /ug = Hs.137555 /len = 2041 | | |
| 41198_at | Cluster Incl AF055008: Homo sapiens clone 24720 epithelin 1 and 2 mRNA, complete | 0.254025212 | 0.000352 |
| | cds /cds = (62,1843) /gb = AF055008 /gi = 3005729 /ug = | | |
| | Hs.180577 /len = 2148 | | |
| 34281_at | Cluster Incl AF039555: Homo sapiens visinin-like protein 1 (VSNL1) mRNA, complete | 0.25338608 | 0.015165 |
| | cds /cds = (192,767) /gb = AF039555 /gi = 4104813 /ug = | | |
| | Hs.2288 /len = 1559 | | |
| 34198_at | Cluster Incl U12128: Human protein tyrosine phosphatase 1E (PTP1E) mRNA, complete | 0.252855276 | 0.004144 |
| | cds /cds = (217,7689) /gb = U12128 /gi = 557287 /ug = | | |
| | Hs.211595 /len = 8287 | | |
| 41043_at | Cluster Incl AB006867: Homo sapiens mRNA for hSOX20 protein, complete cds | 0.2523451 | 0.000279 |
| | /cds = (494,1195) /gb = AB006867 /gi = 3061309 /ug = | | |
| | Hs.95582 /len = 1394 | | |
| 36873_at | Cluster Incl D16532: Human gene for very low density lipoprotein receptor, | 0.252075639 | 0.011366 |
| | 5flanking and /cds = (615,3236) /gb = D16532 /gi = 407220 | | |
| | /ug = Hs.73729 /len = 3853″ | | |
| 34933_at | Cluster Incl AJ238381: Homo sapiens pax9 gene, exons 1-2 and joined CDS | 0.251978856 | 0.043656 |
| | /cds = (391,1416) /gb = AJ238381 /gi = 4699895 /ug = | | |
| | Hs.132576 /len = 1630 | | |
| 34651_at | Cluster Incl M58525: Homo sapiens catechol-O-methyltransferase (COMT) mRNA, | 0.250728594 | 0.000702 |
| | complete cds /cds = (204,1019) /gb = M58525 /gi = 179954 | | |
| | /ug = Hs.78534 /len = 1206 | | |
| 32527_at | Cluster Incl AI381790: te41h10.x1 Homo sapiens cDNA, 3 end /clone = | 0.250563902 | 0.014061 |
| | IMAGE-2089315 /clone_end = 3″ /gb = AI381790 /gi = 4194571 | | |
| | /ug = Hs.74120 /len = 544″ | | |
| 38903_at | Cluster Incl AF099731: Homo sapiens connexin 31.1 (GJB5) gene, complete cds | 0.249028452 | 0.000008 |
| | /cds = (27,848) /gb = AF099731 /gi = 4009521 /ug = Hs.198249 | | |
| | /len = 1370 | | |
| 32112_s_{—} | Cluster Incl AI800499: tc11f11.x1 Homo sapiens cDNA, 3 end /clone = | 0.248564076 | 0.000001 |
| | IMAGE-2063565 /clone_end = 3″ /gb = AI800499 /gi = 5365971 | | |
| | /ug = Hs.161002 /len = 403″ | | |
| 36838_at | Cluster Incl AF055481: Homo sapiens normal epithelial cell-specific 1 (NES1) | 0.248424399 | 0.001939 |
| | gene, complete cds /cds = (82,912) /gb = AF055481 /gi = 3065710 | | |
| | /ug = Hs.69423 /len = 1442 | | |
| 32163_f_a | Cluster Incl AA216639: zq95f07.s1 Homo sapiens cDNA, 3 end /clone = | 0.247712958 | 0.010541 |
| | IMAGE-649765 /clone_end = 3″ /gb = AA216639 /gi = 1817337 | | |
| | /ug = Hs.184093 /len = 569″ | | |
| 32200_at | Cluster Incl M24902: Human prostatic acid phosphatase mRNA, complete cds | 0.247567897 | 0.009707 |
| | /cds = (23,1183) /gb = M24902 /gi = 189618 /ug = Hs.1852 | | |
| | /len = 3097 | | |
| 38881_i_a | Cluster Incl AF096870: Homo sapiens estrogen-responsive B box protein (EBBP) | 0.245430421 | 0.000297 |
| | mRNA, complete cds /cds = (227,1921) /gb = AF096870 /gi = 3916726 | | |
| | /ug = Hs.194540 /len = 2568 | | |
| 39171_at | Cluster Incl W21787: 58b10 Homo sapiens cDNA /clone = (not-directional) | 0.24193833 | 0.000959 |
| | /gb = W21787 /gi = 1298717 /ug = Hs.99816 /len = 775 | | |
| 31655_at | Cluster Incl AL031737: Human DNA sequence from clone 8B22 on chromosome | 0.240900298 | 0.027265 |
| | 1p35.1-36.21 Contains gene similar to cytoplasmic dynein light chain 1, GSSs | | |
| | /cds = (92,361) /gb = AL031737 /gi = 4464258 /ug = Hs.225980 | | |
| | /len = 371 | | |
| 37215_at | Cluster Incl AF046798: untitled /cds = (113,2656) /gb = AF046798 | 0.240324439 | 0.000027 |
| | /gi = 3170406 /ug = Hs.771 /len = 2828 | | |
| 38339_at | Cluster Incl AF082868: Homo sapiens gamma butyrobetaine hydroxylase (BBH) mRNA, | 0.238959561 | 0.000097 |
| | complete cds /cds = (66,1229) /gb = AF082868 /gi = 3746804 | | |
| | /ug = Hs.9667 /len = 1584 | | |
| 35803_at | Cluster Incl S82240: RhoE = 26 kda GTPase homolog [human, HeLa cell | 0.238923582 | 0.005486 |
| | line, mRNA, 833 nt] /cds = (24,713) /gb = S82240 /gi = | | |
| | 1839516 /ug = Hs.6838 /len = 833 | | |
| 40096_at | Cluster Incl D14710: Human mRNA for ATP synthase alpha subunit, complete cds | 0.234166294 | 0.016171 |
| | /cds = (63,1724) /gb = D14710 /gi = 559324 /ug = Hs.155101 | | |
| | /len = 1857 | | |
| 36890_at | Cluster Incl AF001691: Homo sapiens 195 kDa cornified envelope precursor mRNA, | 0.233555948 | 0.020797 |
| | complete cds | | |
| | /cds = (90,5360) /gb = AF001691 /gi = 3168845 /ug = Hs.74304 | | |
| | /len = 6227 | | |
| 39052_at | Cluster Incl J00124: Homo sapiens 50 kDa type I epidermal keratin gene, complete | 0.231924773 | 0.03245 |
| | cds /cds = (61,1479) /gb = J00124 /gi = 186704 /ug = | | |
| | Hs.117729 /len = 1634 | | |
| 32010_at | Cluster Incl Z82180: Human DNA sequence from clone E81G9 on chromosome 22 Contains | 0.231601307 | 0.000002 |
| | novel gene EAN57, ESTs and GSS /cds = (0,181) /gb = Z82180 /gi = | | |
| | 5051358 /ug = Hs.225954 /len = 285 | | |
| 41469_at | Cluster Incl L10343: Huma elafin gene, complete cds /cds = (516,869) | 0.231452377 | 0.00149 |
| | /gb = L10343 /gi = 190337 /ug = Hs.112341 /len = 871 | | |
| 35909_at | Cluster Incl Z50194: H. sapiens mRNA for PQ-rich protein /cds = (159,1361) | 0.231034761 | 0.003707 |
| | /gb = Z50194 /gi = 929659 /ug = Hs.198179 /len = 1412 | | |
| 36555_at | Cluster Incl AF044311: Homo sapiens gamma-synuclein gene, complete cds | 0.230334156 | 0.013692 |
| | /cds = (52,435) /gb = AF044311 /gi = 3347841 /ug = Hs.63236 | | |
| | /len = 708 | | |
| 1582_at | M29540 /FEATURE = /DEFINITION = HUMCEAF Human carcinoembryonic antigen | 0.228698047 | 0.000018 |
| | mRNA (CEA), complete cds | | |
| 39248_at | Cluster Incl N74607: za55a01.s1 Homo sapiens cDNA, 3 end /clone = IMAGE-296424 | 0.227986593 | 0.00066 |
| | /clone_end = 3″ /gb = N74607 /gi = 1231892 /ug = | | |
| | Hs.234642 /len = 487″ | | |
| 33370_r_a | Cluster Incl U60205: Human methyl sterol oxidase (ERG25) mRNA, complete cds | 0.22574526 | 0.000114 |
| | /cds = (26,907) /gb = U60205 /gi = 1408205 /ug = Hs.223018 | | |
| | /len = 1751 | | |
| 32392_s_{—} | Cluster Incl M57951: Human bilirubin UDP-glucuronosyltransferase isozyme 2 mRNA, | 0.221926907 | 0.005613 |
| | complete cds /cds = (29,1633) /gb = M57951 /gi = 184474 | | |
| | /ug = Hs.233441 /len = 2368 | | |
| 40303_at | Cluster Incl U85658: Human transcription factor ERF-1 mRNA, complete cds | 0.220714707 | 0.000106 |
| | /cds = (166,1518) /gb = U85658 /gi = 2058552 /ug = Hs.61796 | | |
| | /len = 2785 | | |
| 37157_at | Cluster Incl X56667: Human mRNA for calretinin /cds = (43,858) /gb = | 0.219711115 | 0.000083 |
| | X56667 /gi = 29635 /ug = Hs.106857 /len = 1426 | | |
| 234_s_at | M57399 /FEATURE = /DEFINITION = HUMHBNF1 Human nerve growth factor | 0.213743207 | 0.002063 |
| | (HBNF-1) mRNA, complete cds | | |
| 33792_at | Cluster Incl AF043498: Homo sapiens prostate stem cell antigen (PSCA) mRNA, | 0.212093464 | 0 |
| | complete cds /cds = (17,388) /gb = AF043498 /gi = 2909843 | | |
| | /ug = Hs.20166 /len = 990 | | |
| 37765_at | Cluster Incl X54162: Human mRNA for a 64 Kd autoantigen expressed in thyroid | 0.21133549 | 0.027383 |
| | and extra-ocular muscle /cds = (212,1930) /gb = X54162 /gi = | | |
| | 28968 /ug = Hs.79386 /len = 3849 | | |
| 31542_at | Cluster Incl M60502: Human profilaggrin mRNA, 3 end /cds = (0,2393) | 0.209204984 | 0.000756 |
| | /gb = M60502 /gi = 190403 /ug = Hs.73995 /len = 2930″ | | |
| 33128_s_{—} | Cluster Incl W68521: zd36f07.r1 Homo sapiens cDNA, 5 end /clone = IMAGE-342757 | 0.205685908 | 0.000172 |
| | /clone_end = 5″ /gb = W68521 /gi = 1377410 /ug = | | |
| | Hs.83393 /len = 579″ | | |
| 36242_at | Cluster Incl M21539: Human small proline rich protein (sprll) mRNA, clone 1292 | 0.202617237 | 0.000204 |
| | /cds = (86,304) /gb = M21539 /gi = 338426 /ug = Hs.2421 | | |
| | /len = 678 | | |
| 33883_at | Cluster Incl AB001466: Homo sapiens mRNA for Efs1, complete cds /cds = | 0.201124632 | 0.001354 |
| | (608,2293) /gb = AB001466 /gi = 2829301 /ug = Hs.24587 | | |
| | /len = 3114 | | |
| 32582_at | Cluster Incl AF001548: Human Chromosome 16 BAC clone CIT987SK-A-815A9 /cds = | 0.198342888 | 0.001142 |
| | (0,5573) /gb = AF001548 /gi = 2104552 /ug = Hs.78344 | | |
| | /len = 6428 | | |
| 913_at | U47414 /FEATURE = /DEFINITION = HSU47414 Human cyclin G2 mRNA, | 0.197140492 | 0.000035 |
| | complete cds | | |
| 34203_at | Cluster Incl D17408: Homo sapiens mRNA for calponin, complete cds /cds = | 0.195771996 | 0.000225 |
| | (92,985) /gb = D17408 /gi = 1783204 /ug = Hs.21223 | | |
| | /len = 1517 | | |
| 32963_s_{—} | Cluster Incl W27549: 32d11 Homo sapiens cDNA /gb = W27549 /gi = | 0.193598948 | 0.000017 |
| | 1307353 /ug = Hs.235634 /len = 912 | | |
| 1165_at | D49950 /FEATURE = /DEFINITION = D49950 Homo sapiens mRNA for | 0.191184898 | 0.000062 |
| | interferon-gamma inducing factor(IGIF), complete cds | | |
| 1005_at | X68277 /FEATURE = cds /DEFINITION = HSCL100 H. sapiens CL 100 mRNA | 0.190308395 | 0.008438 |
| | for protein tyrosine phosphatase | | |
| 32523_at | Cluster Incl M20470: Human lymphocyte clathrin light-chain B mRNA, complete cds | 0.189040488 | 0.005713 |
| | /cds = (139,774) /gb = M20470 /gi = 187056 /ug = Hs.73919 | | |
| | /len = 1051 | | |
| 40016_g_{—} | Cluster Incl AB002301: Human mRNA for KIAA0303 gene, partial cds /cds = | 0.188340227 | 0.000827 |
| | (0,6415) /gb = AB002301 /gi = 2224546 /ug = Hs.54985 | | |
| | /len = 6629 | | |
| 35425_at | Cluster Incl AJ243512: Homo sapiens mRNA for Barx2 protein (Barx2 gene) | 0.187189147 | 0.000087 |
| | /cds = (16,855) /gb = AJ243512 /gi = 5459378 /ug = | | |
| | Hs.167218 /len = 1374 | | |
| 2027_at | M87068 /FEATURE = /DEFINITION = HUMCAN H. sapiens CaN19 mRNA sequence | 0.187103745 | 0.000726 |
| 36925_at | Cluster Incl L26336: Human heat shock protein HSPA2 gene, complete cds | 0.182654009 | 0.000097 |
| | /cds = (0,1919) /gb = L26336 /gi = 476704 /ug = Hs.75452 | | |
| | /len = 1920 | | |
| 39015_f_a | Cluster Incl L42611: Homo sapiens keratin 6 isoform K6e (KRT6E) mRNA, complete | 0.181632277 | 0.020188 |
| | cds /cds = (40,1734) /gb = L42611 /gi = 908802 /ug = | | |
| | Hs.111758 /len = 1986 | | |
| 613_at | M21389 /FEATURE = mRNA /DEFINITION = HUMKER2A Human keratin type II | 0.175195643 | 0.035399 |
| | (58 kD) mRNA, complete cds | | |
| 36378_at | Cluster Incl AF085807: Homo sapiens uroplakin la mRNA, partial cds /cds = | 0.174269851 | 0.000023 |
| | (0,771) /gb = AF085807 /gi = 3550409 /ug = Hs.159309 | | |
| | /len = 1218 | | |
| 31846_at | Cluster Incl AW003733: ws16b04.x1 Homo sapiens cDNA, 3 end /clone = | 0.167432167 | 0.010423 |
| | IMAGE-2497327 /clone_end = 3″ /gb = AW003733 /gi = 5850649 | | |
| | /ug = Hs.15114 /len = 839″ | | |
| 1197_at | D00654 /FEATURE = cds /DEFINITION = HUMACTSG7 Homo sapiens gene for | 0.163684848 | 0.009945 |
| | enteric smooth muscle gamma-actin, exon 9, complete cds | | |
| 31343_at | Cluster Incl AJ005835: Homo sapiens mRNA for interleukin 1 receptor antagonist, | 0.16202207 | 0.000012 |
| | type III /cds = (0,10) /gb = AJ005835 /gi = 3115205 /ug = | | |
| | Hs.131958 /len = 171 | | |
| 37576_at | Cluster Incl U52969: Human PEP19 (PCP4) mRNA, complete cds /cds = (81,269) | 0.160690395 | 0.000535 |
| | /gb = U52969 /gi = 1568614 /ug = Hs.80296 /len = 554 | | |
| 2090_i_at | H12458 /FEATURE = /DEFINITION = H12458 yj12d03.s1 Soares placenta | 0.159035469 | 0.01138 |
| | Nb2HP Homo sapiens cDNA clone IMAGE: 148517 3″ similar to SP: WNT6_MOUSE | | |
| | P22727 WNT-6 PROTEIN;, mRNA sequence | | |
| 33331_at | Cluster Incl U17077: Human BENE mRNA, partial cds /cds = (0,446) /gb = | 0.156306005 | 0.000286 |
| | U17077 /gi = 1000711 /ug = Hs.185055 /len = 2269 | | |
| 40035_at | Cluster Incl AB012917: Homo sapiens mRNA for serine protease (TLSP), complete cds | 0.15559402 | 0.002195 |
| | /cds = (25,873) /gb = AB012917 /gi = 3649790 /ug = Hs.57771 | | |
| | /len = 1186 | | |
| 39660_at | Cluster Incl AI309115: qo71a09.x1 Homo sapiens cDNA, 3 end /clone = | 0.155477892 | 0.000234 |
| | IMAGE-1913944 /clone_end = 3″ /gb = AI309115 /gi = 4003986 | | |
| | /ug = Hs.32949 /len = 450″ | | |
| 33546_at | Cluster Incl AI923984: wn49d12.x1 Homo sapiens cDNA, 3 end /clone = | 0.155471597 | 0.009457 |
| | IMAGE-2448791 /clone_end = 3″ /gb = AI923984 /gi = 5659948 | | |
| | /ug = Hs.46320 /len = 440″ | | |
| 41471_at | Cluster Incl W72424: zd66a09.s1 Homo sapiens cDNA, 3 end /clone = | 0.15508022 | 0.018334 |
| | IMAGE-345592 /clone_end = 3″ /gb = W72424 /gi = 1382379 | | |
| | /ug = Hs.112405 /len = 604″ | | |
| 33483_at | Cluster Incl X76029: H. sapiens mRNA for neuromedin U /cds = (105,629) | 0.154692443 | 0.022939 |
| | /gb = X76029 /gi = 609012 /ug = Hs.2841 /len = 817 | | |
| 39682_at | Cluster Incl X87159: H. sapiens mRNA for beta subunit of epithelial amiloride- | 0.154579413 | 0.000005 |
| | sensitive sodium channel cds = (127,2049) /gb = X87159 /gi = | | |
| | 1004270 /ug = Hs.37129 /len = 2545 | | |
| 617_at | M24902 /FEATURE = mRNA /DEFINITION = HUMPAPA Human prostatic acid | 0.153293459 | 0 |
| | phosphatase mRNA, complete cds | | |
| 34820_at | Cluster Incl M57399: Human nervegrowth factor (HBNF-1) mRNA, complete cds | 0.152145671 | 0.000666 |
| | /cds = (395,901) /gb = M57399 /gi = 292072 /ug = Hs.44 | | |
| | /len = 1029 | | |
| 36454_at | Cluster Incl AF037335: Homo sapiens carbonic anhydrase precursor (CA 12) mRNA, | 0.151522134 | 0.001281 |
| | complete cds /cds = (115,1179) /gb = AF037335 /gi = 2708638 | | |
| | /ug = Hs.5338 /len = 2755 | | |
| 39544_at | Cluster Incl AB002351: Human mRNA for KIAA0353 gene, partial cds /cds = | 0.148964837 | 0.01262 |
| | (0,4125) /gb = AB002351 /gi = 2224646 /ug = Hs.10587 | | |
| | /len = 6651 | | |
| 40365_at | Cluster Incl M63904: Human G-alpha 16 protein mRNA, complete cds /cds = | 0.148225853 | 0.000153 |
| | (219,1343) /gb = M63904 /gi = 182891 /ug = Hs.73797 | | |
| | /len = 2060 | | |
| 37160_at | Cluster Incl M19888: Human small proline rich protein (sprl) mRNA, clone 128 | 0.145719365 | 0.000021 |
| | /cds = (68,337) /gb = M 19888 /gi = 338416 /ug = Hs.1076 | | |
| | /len = 623 | | |
| 529_at | U15932 /FEATURE = /DEFINITION = HSU15932 Human dual-specificity | 0.144995121 | 0.000002 |
| | protein phosphatase mRNA, complete cds | | |
| 770_at | D00632 /FEATURE = /DEFINITION = HUMGSHPXA Homo sapiens mRNA for | 0.143850665 | 0.002402 |
| | glutathione peroxidase, complete cds | | |
| 31805_at | Cluster Incl M64347: Human novel growth factor receptor mRNA, 3 cds /cds = | 0.14334791 | 0.000421 |
| | (0,2195) /gb = M64347 /gi = 182564 /ug = Hs.1420 | | |
| | /len = 3799″ | | |
| 41034_s_{—} | Cluster Incl U92315: Homo sapiens hydroxysteroid sulfotransferase SULT2B1b | 0.143222232 | 0.000049 |
| | (HSST2) mRNA, complete cds /cds = (81,1178) /gb = U92315 /gi = | | |
| | 1923292 /ug = Hs.94581 /len = 1199 | | |
| 37600_at | Cluster Incl U68186: Human extracellular matrix protein 1 mRNA, complete cds | 0.141941707 | 0.000773 |
| | /cds = (103,1725) /gb = U68186 /gi = 2660683 /ug = Hs.81071 | | |
| | /len = 1819 | | |
| 37762_at | Cluster Incl Y07909: H. sapiens mRNA for Progression Associated Protein | 0.141800128 | 0.001618 |
| | /cds = (218,691) /gb = Y07909 /gi = 1542882 /ug = Hs.79368 | | |
| | /len = 2774 | | |
| 35726_at | Cluster Incl AI539439: te51e07.x1 Homo sapiens cDNA, 3 end /clone = | 0.141239149 | 0.000072 |
| | IMAGE-2090244 /clone_end = 3″ /gb = AI539439 /gi = 4453574 | | |
| | /ug = Hs.38991 /len = 455″ | | |
| 39302_at | Cluster Incl X56807: Human DSC2 mRNA for desmocollins type 2a and 2b | 0.14069071 | 0.000006 |
| | /cds = (0,2583) /gb = X56807 /gi = 30507 /ug = Hs.239727 | | |
| | /len = 3212 | | |
| 37920_at | Cluster Incl U70370: Human hindlimb expressed homeobox protein backfoot (Bft) | 0.139179451 | 0.000061 |
| | mRNA, complete cds /cds = (111,1055) /gb = U70370 /gi = 1870670 | | |
| | /ug = Hs.84136 /len = 2049 | | |
| 39698_at | Cluster Incl U51712: HSU51712 Homo sapiens cDNA /gb = U51712 /gi = | 0.13905098 | 0.000053 |
| | 1255282 /ug = Hs.13775 /len = 1110 | | |
| 36497_at | Cluster Incl W28438: 47g10 Homo sapiens cDNA /gb = W28438 /gi = | 0.136810256 | 0.005909 |
| | 1308449 /ug = Hs.57548 /len = 845 | | |
| 601_s_at | M28439 /FEATURE = cds /DEFINITION = HUMKER16A8 Human keratin type | 0.136363596 | 0.003168 |
| | 16 gene, exon 8 | | |
| 36658_at | Cluster Incl D13643: Human mRNA for KIAA0018 gene, complete cds /cds = | 0.135965128 | 0.008011 |
| | (38,1210) /gb = D13643 /gi = 285996 /ug = Hs.75616 | | |
| | /len = 4186 | | |
| 38202_at | Cluster Incl AB011535: Homo sapiens mRNA for MEGF1, partial cds /cds = | 0.129294854 | 0.000014 |
| | (0,1721) /gb = AB011535 /gi = 3449295 /ug = Hs.158159 | | |
| | /len = 3193 | | |
| 37603_at | Cluster Incl X52015: H. sapiens mRNA for interleukin-1 receptor antagonist | 0.128827966 | 0.000242 |
| | /cds = (23,556) /gb = X52015 /gi = 32576 /ug = Hs.81134 | | |
| | /len = 1740 | | |
| 32113_at | Cluster Incl U83115: Human non-lens beta gamma-crystallin like protein (AIM1) | 0.124007546 | 0.000013 |
| | mRNA, partial cds /cds = (0,4913) /gb = U83115 /gi = 2072424 | | |
| | /ug = Hs.161002 /len = 6796 | | |
| 39366_at | Cluster Incl N36638: yx88f05.r1 Homo sapiens cDNA, 5 end /clone = | 0.123584314 | 0.000028 |
| | IMAGE-268833 /clone_end = 5″ /gb = N36638 /gi = 1157780 | | |
| | /ug = Hs.12112 /len = 543″ | | |
| 40304_at | Cluster Incl M69225: Human bullous pemphigoid antigen (BPAG1) mRNA, complete cds | 0.121641611 | 0 |
| | /cds = UNKNOWN /gb = M69225 /gi = 179522 /ug = Hs.620 | | |
| | /len = 8930 | | |
| 37473_at | Cluster Incl AF061812: Homo sapiens keratin 16 (KRT16A) mRNA, complete cds | 0.120176887 | 0.002993 |
| | /cds = (14,1435) /gb = AF061812 /gi = 4091878 /ug = | | |
| | Hs.115947 /len = 1588 | | |
| 1776_at | L24564 /FEATURE = /DEFINITION = HUMRAD Human Rad mRNA, complete cds | 0.119942667 | 0.000005 |
| 38051_at | Cluster Incl X76220: H. sapiens MAL gene exon 1 (and joined CDS) /cds = | 0.118545163 | 0.015366 |
| | (59,520) /gb = X76220 /gi = 433225 /ug = Hs.80395 | | |
| | /len = 1056 | | |
| 37956_at | Cluster Incl U37519: Human aldehyde dehydrogenase (ALDH8) mRNA, complete cds | 0.114940468 | 0.000183 |
| | /cds = (616,1773) /gb = U37519 /gi = 1051280 /ug = Hs.87539 | | |
| | /len = 2827 | | |
| 39569_at | Cluster Incl U72849: untitled /cds = (98,6199) /gb = U72849 | 0.113225316 | 0.000035 |
| | /gi = 4097997 /ug = Hs.25482 /len = 6457 | | |
| 40356_at | Cluster Incl AB026833: Homo sapiens mRNA for chloride channel protein, | 0.109385318 | 0.000001 |
| | complete cds /cds = (41,2872) /gb = AB026833 /gi = 4887600 | | |
| | /ug = Hs.72365 /len = 3604 | | |
| 37093_at | Cluster Incl M32402: Human placental protein (PP11) mRNA, complete cds | 0.103523453 | 0.000448 |
| | /cds = UNKNOWN /gb = M32402 /gi = 190210 /ug = Hs.997 | | |
| | /len = 2320 | | |
| 1321_s_at | U43916 /FEATURE = /DEFINITION = HSU43916 Human tumor-associated | 0.102454011 | 0 |
| | membrane protein homolog (TMP) mRNA, complete cds | | |
| 36284_at | Cluster Incl Y12642: H. sapiens E48 gene /cds = (24,410) /gb = Y12642 | 0.101688161 | 0.000003 |
| | /gi = 2739293 /ug = Hs.3185 /len = 748 | | |
| 774_g_at | D10667 /FEATURE = /DEFINITION = HUMMHCAAA Homo sapiens mRNA for | 0.098993518 | 0.004537 |
| | smooth muscle myosin heavy chain, partial cds | | |
| 1898_at | L24203 /FEATURE = /DEFINITION = HUMDK Homo sapiens ataxia- | 0.097775137 | 0.000124 |
| | telangiectasia group D-associated protein mRNA, complete cds | | |
| 41783_at | Cluster Incl M97815: Human retinoic acid-binding protein II (CRABP-II) gene | 0.097133202 | 0.000064 |
| | /cds = (137,553) /gb = M97815 /gi = 181029 /ug = Hs.183650 | | |
| | /len = 969 | | |
| 773_at | D10667 /FEATURE = /DEFINITION = HUMMHCAAA Homo sapiens mRNA for | 0.095787941 | 0.005341 |
| | smooth muscle myosin heavy chain, partial cds | | |
| 41641_at | Cluster Incl AJ223603: Homo sapiens mRNA encoding rat C4.4-like protein | 0.095093025 | 0.000087 |
| | /cds = (86,1126) /gb = AJ223603 /gi = 3821054 /ug = Hs.11950 | | |
| | /len = 1684 | | |
| 40776_at | Cluster Incl M63391: Human desmin gene, complete cds /cds = (80,1489) | 0.094099776 | 0.000018 |
| | /gb = M63391 /gi = 181539 /ug = Hs.171185 /len = 2220 | | |
| 862_at | U04313 /FEATURE = /DEFINITION = HSU04313 Human maspin mRNA, | 0.091970059 | 0.000527 |
| | complete cds | | |
| 33693_at | Cluster Incl M76482: Human 130-kD pemphigus vulgaris antigen mRNA, complete cds | 0.091756719 | 0.000006 |
| | /cds = (83,3082) /gb = M76482 /gi = 190751 /ug = Hs.1925 | | |
| | /len = 3336 | | |
| 36464_at | Cluster Incl X94323: H. sapiens mRNA for SGP28 protein /cds = (40,777) | 0.088981309 | 0.000056 |
| | /gb = X94323 /gi = 1213612 /ug = Hs.54431 /len = 2124 | | |
| 35124_at | Cluster Incl M62982: Human arachidonate 12-lipoxygenase mRNA, complete cds | 0.087650494 | 0.004249 |
| | /cds = (53,2044) /gb = M62982 /gi = 177106 /ug = Hs.1200 | | |
| | /len = 2348 | | |
| 1057_at | M97815 /FEATURE = expanded_cds /DEFINITION = HUMCRABP02 Human | 0.084318624 | 0.000101 |
| | retinoic acid-binding protein II (CRABP-II) gene exons 2-4, complete cds | | |
| 31345_at | Cluster Incl AB002134: Homo sapiens mRNA for airway trypsin-like protease, | 0.082579556 | 0.013315 |
| | complete cds/cds = (61,1317) /gb = AB002134 /gi = 3184183 | | |
| | /ug = Hs.132195 /len = 1500 | | |
| 1549_s_at | U19557 /FEATURE = /DEFINITION = HSU19557 Human Squamous cell | 0.08107938 | 0.000031 |
| | carcinoma antigen 2 (SCCA2) mRNA, complete cds | | |
| 31791_at | Cluster Incl Y16961: Homo sapiens mRNA for KET protein /cds = (27,2069) | 0.079103695 | 0.009833 |
| | /gb = Y16961 /gi = 3970716 /ug = Hs.137569 /len = 4849 | | |
| 1343_s_at | S66896 /FEATURE = /DEFINITION = S66896 Squamous cell carcinoma | 0.07050762 | 0.000109 |
| | antigen = serine protease inhibitor [human, mRNA, 1711 nt] | | |
| 36355_at | Cluster Incl M13903: Human involucrin mRNA /cds = (0,1757) /gb = | 0.063600753 | 0.000334 |
| | M13903 /gi = 186520 /ug = Hs.157091 /len = 1758 | | |
| 40315_at | Cluster Incl AJ228139: Homo sapiens mRNA for LETKI precursor /cds = (43,3237) | 0.063426329 | 0.001565 |
| | /gb = AJ228139 /gi = 4585698 /ug = Hs.64867 /len = 3528 | | |
| 37582_at | Cluster Incl X07696: Human mRNA for cytokeratin 15 /cds = (61,1431) | 0.063223853 | 0.00109 |
| | /gb = X07696 /gi = 34070 /ug = Hs.80342 /len = 1709 | | |
| 36406_at | Cluster Incl AA401397: zu68b01.s1 Homo sapiens cDNA, 3 end /clone = | 0.06095209 | 0.000001 |
| | IMAGE-743113 /clone_end = 3″ /gb = AA401397 /gi = 2053605 | | |
| | /ug = Hs.165296 /len = 519″ | | |
| 40031_at | Cluster Incl M74542: Human aldehyde dehydrogenase type III (ALDHIII) mRNA, | 0.058614393 | 0.000689 |
| | complete cds /cds = (42,1403) /gb = M74542 /gi = 178401 | | |
| | /ug = Hs.575 /len = 1636 | | |
| 37954_at | Cluster Incl X16662: Human mRNA for vascular anticoagulant-beta (VAC-beta) | 0.058021351 | 0.000785 |
| | /cds = (106,1089) /gb = X16662 /gi = 37638 /ug = Hs.87268 | | |
| | /len = 1940 | | |
| 32139_at | Cluster Incl Y09538: H. sapiens mRNA for ZNF185 gene /cds = (40,1398) | 0.057956613 | 0.000018 |
| | /gb = Y09538 /gi = 2370125 /ug = Hs.16622 /len = 3604 | | |
| 37185_at | Cluster Incl Y00630: Human mRNA for Arg-Serpin (plasminogen activator-inhibitor 2, | 0.057481589 | 0.005043 |
| | PAI-2) /cds = (72,1319) /gb = Y00630 /gi = 35267 /ug = | | |
| | Hs.75716 /len = 1900 | | |
| 39581_at | Cluster Incl AA570193: nf38c11.s1 Homo sapiens cDNA /clone = IMAGE-916052 | 0.057372976 | 0.003457 |
| | /gb = AA570193 /gi = 2344173 /ug = Hs.2621 /len = 450 | | |
| 36407_at | Cluster Incl AL050220: Homo sapiens mRNA; cDNA DKFZp586J1923 (from clone | 0.056802495 | 0.000001 |
| | DKFZp586J1923) /cds = (0,590) /gb = AL050220 /gi = 4884461 | | |
| | /ug = Hs.165296 /len = 733 | | |
| 39249_at | Cluster Incl AB001325: Human AQP3 gene for aquaporine 3 (water channel), partail | 0.049433675 | 0.000144 |
| | cds /cds = (60,938) /gb = AB001325 /gi = 1854373 /ug = | | |
| | Hs.234642 /len = 1442 | | |
| 38489_at | Cluster Incl M60047: Human heparin binding protein (HBp17) mRNA, complete cds | 0.048264708 | 0.000019 |
| | /cds = (97,801) /gb = M60047 /gi = 183950 /ug = Hs.1690 | | |
| | /len = 1146 | | |
| 33529_at | Cluster Incl X76342: H. sapiens ADH7 mRNA /cds = UNKNOWN /gb = X76342 | 0.048228074 | 0 |
| | /gi = 541674 /ug = Hs.389 /len = 2055 | | |
| 35947_at | Cluster Incl M98447: H. sapiens keratinocyte transglutaminase gene, complete cds | 0.04499404 | 0.045596 |
| | /cds = (90,2543) /gb = M98447 /gi = 186734 /ug = Hs.22 | | |
| | /len = 2719 | | |
| 35105_at | Cluster Incl AF045941: Homo sapiens sciellin (SCEL) mRNA, complete cds /cds = | 0.040865578 | 0.022763 |
| | (86,2092) /gb = AF045941 /gi = 3893854 /ug = Hs.115166 | | |
| | /len = 2327 | | |
| 32868_at | Cluster Incl L10386: Homo sapiens transglutaminase E3 (TGASE3) mRNA, complete cds | 0.039911624 | 0.000146 |
| | /cds = (41,2122) /gb = L10386 /gi = 307503 /ug = Hs.2022 | | |
| | /len = 2619 | | |
| 31705_at | Cluster Incl X99977: H. sapiens ARS gene, component B /cds = (26,337) | 0.028363962 | 0.000051 |
| | /gb = X99977 /gi = 1536901 /ug = Hs.103505 /len = 528 | | |
| 38608_at | Cluster Incl AA010777: ze22f06.r1 Homo sapiens cDNA, 5 end /clone = | 0.028030428 | 0.000245 |
| | IMAGE-359747 /clone_end = 5″ /gb = AA010777 /gi = 1471804 | | |
| | /ug = Hs.99923 /len = 521″ | | |

[0138] TABLE 3
U95_B Fold Change Genes (>3 over-expressed in Barrett's associated
esophageal adenocarcinoma (BA), <0.33 under-expressed in BA)

| Affy ID | Gene Name | Fold Change | P-value |
|---|---|---|---|
| 55805_g_a | Cluster Incl. AW007803:wt03d03.x1 Homo sapiens cDNA, 3 end | 51.27773413 | 0.000037 |
| | /clone = IMAGE-2506373 /clone_end = 3′ | | |
| | /gb = AW007803 /gi = 5856581 /ug = Hs.61311 /len = 544′ | | |
| 47862_at | Cluster Incl. AA158234:zo76b01.s1 Homo sapiens cDNA, | 22.47041512 | 0.00011 |
| | 3 end /clone = IMAGE-592777 /clone_end = 3′ | | |
| | /gb = AA158234 /gi = 1733029 /ug = Hs.72222 /len = 614′ | | |
| 51811_at | Cluster Incl. AA535447:nf84h07.s1 Homo sapiens cDNA, | 18.5502306 | 0.000002 |
| | 3 end /clone = IMAGE-926653 /clone_end = 3′ | | |
| | /gb = AA535447 /gi = 2279700 /ug = Hs.5366 /len = 524′ | | |
| 49252_at | Cluster Incl. R40393:yf71c01.s1 Homo sapiens cDNA, | 15.5072013 | 0.000108 |
| | 3 end /clone = IMAGE-27679 /clone_end = 3′ | | |
| | /gb = R40393 /gi = 822823 /ug = Hs.239147 /len = 485′ | | |
| 55610_at | Cluster Incl. AI742239:wg39e09.x1 Homo sapiens cDNA, | 14.88983284 | 0.000003 |
| | 3 end /clone = IMAGE-2367496 /clone_end = 3′ | | |
| | /gb = AI742239 /gi = 5110527 /ug = Hs.91109 /len = 493′ | | |
| 46682_at | Cluster Incl. AI985652:wt19b08.x1 Homo sapiens cDNA, | 14.5125698 | 0.000036 |
| | 3 end /clone = IMAGE-2507895 /clone_end = 3′ | | |
| | /gb = AI985652 /gi = 5812929 /ug = Hs.7362 /len = 539′ | | |
| 45204_s_at | Cluster Incl. AI378647:tc57a04.x1 Homo sapiens cDNA, | 12.18224933 | 0.000011 |
| | 3 end /clone = IMAGE-2068686 /clone_end = 3′ | | |
| | /gb = AI378647 /gi = 4188500 /ug = Hs.42502 /len = 481′ | | |
| 54001_at | Cluster Incl. AI092936:qa81b05.x1 Homo sapiens cDNA, | 11.81231717 | 0.000235 |
| | 3 end /clone = IMAGE-1693137 /clone_end = 3′ | | |
| | /gb = AI092936 /gi = 3431912 /ug = Hs.6459 /len = 516′ | | |
| 45294_at | Cluster Incl. AI697470:tq08h01.x1 Homo sapiens cDNA, | 10.79542287 | 0.002361 |
| | 3 end /clone = IMAGE-2208241 /clone_end = 3′ | | |
| | /gb = AI697470 /gi = 4985370 /ug = Hs.205126 /len = 494′ | | |
| 46165_at | Cluster Incl. AA001552:ze46c08.s1 Homo sapiens cDNA, | 9.689374943 | 0.000026 |
| | 3 end /clone = IMAGE-362030 /clone_end = 3′ | | |
| | /gb = AA001552 /gl = 1437017 /ug = Hs.59839 /len = 566′ | | |
| 44558_at | Cluster Incl. AI148745:qc69e03.x1 Homo sapiens cDNA, | 9.603193191 | 0.000001 |
| | 3 end /clone = IMAGE-1714876 /clone_end = 3′ | | |
| | /gb = AI148745 /gi = 3677214 /ug = Hs.30715 /len = 733′ | | |
| 56495_at | Cluster Incl. AI301060:qo16c05.x1 Homo sapiens cDNA, | 8.981853987 | 0.000031 |
| | 3 end /clone = IMAGE-1908680 /clone_end = 3′ | | |
| | /gb = AI301060 /gi = 3960406 /ug = Hs.11365 /len = 618′ | | |
| 47475_at | Cluster Incl. AI057608:oy31e08.x1 Homo sapiens cDNA, | 7.95757126 | 0.001394 |
| | 3 end /clone = IMAGE-1667462 /clone_end = 3′ | | |
| | /gb = AI057608 /gi = 3331474 /ug = Hs.127826 /len = 657′ | | |
| 53718_at | Cluster Incl. AI684645:wa84h12.x1 Homo sapiens cDNA, | 7.724496401 | 0.00059 |
| | 3 end /clone = IMAGE-2302919 /clone_end = 3′ | | |
| | /gb = AI684645 /gi = 4895939 /ug = Hs.12126 /len = 585′ | | |
| 42973_at | Cluster Incl. AA458524:zx96b11.r1 Homo sapiens cDNA, | 7.478781625 | 0.000217 |
| | 5 end /clone = IMAGE-811581 /clone_end = 5′ | | |
| | /gb = AA458524 /gi = 2183431 /ug = Hs.21835 /len = 470′ | | |
| 55802_at | Cluster Incl. AW007803:wt03d03.x1 Homo sapiens cDNA, | 7.379846073 | 0.016111 |
| | 3 end /clone = IMAGE-2506373 /clone_end = 3′ | | |
| | /gb = AW007803 /gi = 5856581 /ug = Hs.61311 /len = 544′ | | |
| 46652_at | Cluster Incl. AA524036:ng32f10.s1 Homo sapiens cDNA, | 7.07207438 | 0.001998 |
| | 3 end /clone = IMAGE-936523 /clone_end = 3′ | | |
| | /gb = AA524036 /gi = 2264964 /ug = Hs.71190 /len = 608′ | | |
| 52119_at | Cluster Incl. AA418063:zv97b02.r1 Homo sapiens cDNA, | 6.967128041 | 0.000278 |
| | 5 end /clone = IMAGE-767691 /clone_end = 5′ | | |
| | /gb = AA418063 /gi = 2079937 /ug = Hs.44278 /len = 585′ | | |
| 54150_at | Cluster Incl. AI669065:we70d12.x1 Homo sapiens cDNA, | 6.834403508 | 0.000058 |
| | 3 end /clone = IMAGE-2346455 /clone_end = 3′ | | |
| | /gb = AI669065 /gi = 4833839 /ug = Hs.71779 /len = 518′ | | |
| 50849_at | Cluster Incl. AI922323:wn90h03.x1 Homo sapiens cDNA, | 6.666123575 | 0.000285 |
| | 3 end /clone = IMAGE-2453141 /clone_end = 3′ | | |
| | /gb = AI922323 /gi = 5658287 /ug = Hs.122576 /len = 483′ | | |
| 56122_at | Cluster Incl. AI223817:qi33d01.x1 Homo sapiens cDNA, | 6.326746141 | 0.002608 |
| | 3 end /clone = IMAGE-1858273 /clone_end = 3′ | | |
| | /gb = AI223817 /gi = 3806530 /ug = Hs.100686 /len = 620′ | | |
| 46659_at | Cluster Incl. AI742057:wg38d12.x1 Homo sapiens cDNA, | 6.316573114 | 0.000494 |
| | 3 end /clone = IMAGE-2367383 /clone_end = 3′ | | |
| | /gb = AI742057 /gi = 5110345 /ug = Hs.7155 /len = 603′ | | |
| 56806_at | Cluster Incl. AI809891:wf59e01.x1 Homo sapiens cDNA, | 6.165253015 | 0.001843 |
| | 3 end /clone = IMAGE-2359896 /clone_end = 3′ | | |
| | /gb = AI809891 /gi = 5396457 /ug = Hs.104573 /len = 481′ | | |
| 57094_at | Cluster Incl. AI189381:qd05h06.x1 Homo sapiens cDNA, | 6.135568271 | 0.000033 |
| | 3 end /clone = IMAGE-1722875 /clone_end = 3′ | | |
| | /gb = AI189381 /gi = 3740590 /ug = Hs.203125 /len = 807′ | | |
| 47060_at | Cluster Incl. AI422335:tf65f01.x1 Homo sapiens cDNA, | 6.055112775 | 0.000721 |
| | 3 end /clone = IMAGE-2104153 /clone_end = 3′ | | |
| | /gb = AI422335 /gi = 4268266 /ug = Hs.78358 /len = 540′ | | |
| 46644_at | Cluster Incl. AA523925:ng24g06.s1 Homo sapiens cDNA, | 6.039307564 | 0.000053 |
| | 3 end /clone = IMAGE-935770 /clone_end = 3′ | | |
| | /gb = AA523925 /gi = 2264853 /ug = Hs.70732 /len = 662′ | | |
| 56904_g_a | Cluster Incl. AW004007:wq94g10.x1 Homo sapiens cDNA, | 6.027803262 | 0.000267 |
| | 3 end /clone = IMAGE-2479746 /clone end = 3′ | | |
| | /gb = AW004007 /gi = 5850923 /ug = Hs.109257 /len = 262′ | | |
| 47890_at | Cluster Incl. AI921465:wo25d05.x1 Homo sapiens cDNA, | 5.778899418 | 0.000053 |
| | 3 end /clone = IMAGE-2456361 /clone_end = 3′ | | |
| | /gb = AI921465 /gi = 5657429 /ug = Hs.146314 /len = 504′ | | |
| 57861_at | Cluster Incl. AI096493:qa03d12.x1 Homo sapiens cDNA, | 5.69536482 | 0.000123 |
| | 3 end /clone = IMAGE-1685687 /clone_end = 3′ | | |
| | /gb = AI096493 /gi = 3445987 /ug = Hs.172572 /len = 586′ | | |
| 45382_g_a | Cluster Incl. AI392817:tg10a06.x1 Homo sapiens cDNA, | 5.623492806 | 0.000069 |
| | 3 end /clone = IMAGE-2108338 /clone_end = 3′ | | |
| | /gb = AI392817 /gi = 4222364 /ug = Hs.239331 /len = 543′ | | |
| 59661_at | Cluster Incl. W81116:zh49d10.s1 Homo sapiens cDNA, | 5.495775955 | 0.000252 |
| | 3 end /clone = IMAGE-415411 /clone_end = 3′ | | |
| | /gb = W81116 /gi = 1391615 /ug = Hs.20524 /len = 622′ | | |
| 44140_at | Cluster Incl. AA056278:zf53h03.s1 Homo sapiens cDNA, | 5.287393752 | 0.000019 |
| | 3 end /clone = IMAGE-380693 /clone_end = 3′ | | |
| | /gb = AA056278 /gi = 1548682 /ug = Hs.28669 /len = 632′ | | |
| 48745_s_at | Cluster Incl. AI979240:wu03g12.x1 Homo sapiens cDNA, | 5.222721476 | 0.003423 |
| | 3 end /clone = IMAGE-2515942 /clone_end = 3′ | | |
| | /gb = AI979240 /gi = 5804361 /ug = Hs.233729 /len = 226′ | | |
| 45183_at | Cluster Incl. AL118812:DKFZp761G1111_r1 Homo sapiens cDNA, | 5.057329191 | 0.000756 |
| | 5 end /clone = DKFZp761G1111 /clone_end = 5′ | | |
| | /gb = AL118812 /gi = 5924711 /ug = Hs.41139 /len = 1642′ | | |
| 49052_at | Cluster Incl. AA147884:zl50b04.s1 Homo sapiens cDNA, | 4.985943579 | 0.001171 |
| | 3 end /clone = IMAGE-505327 /clone_end = 3′ | | |
| | /gb = AA147884 /gi = 1717300 /ug = Hs.9812 /len = 652′ | | |
| 47522_at | Cluster Incl. AW007479:ws52c07.x1 Homo sapiens cDNA, | 4.974197171 | 0.000006 |
| | 3 end /clone = IMAGE-2500812 /clone_end = 3′ | | |
| | /gb = AW007479 /gi = 5856257 /ug = Hs.143974 /len = 497′ | | |
| 48120_at | Cluster Incl. H30385:ym58d12.s1 Homo sapiens cDNA, | 4.798932814 | 0.000126 |
| | 3 end /clone = IMAGE-52891 /clone_end = 3′ | | |
| | /gb = H30385 /gi = 901295 /ug = Hs.11067 /len = 519′ | | |
| 46675_at | Cluster Incl. AA625199:af70e02.r1 Homo sapiens cDNA, | 4.790908464 | 0.004853 |
| | 5 end /clone = IMAGE-1047386 /clone_end = 5′ | | |
| | /gb = AA625199 /gi = 2537584 /ug = Hs.72289 /len = 566′ | | |
| 52054_at | Cluster Incl. AI434780:ti20c05.x1 Homo sapiens cDNA, | 4.774162147 | 0.000001 |
| | 3 end /clone = IMAGE-2131016 /clone_end = 3′ | | |
| | /gb = AI434780 /gi = 4298572 /ug = Hs.4248 /len = 933′ | | |
| 46219_at | Cluster Incl. Z99410:HSZ99410 Homo sapiens cDNA | 4.7581476 | 0.000006 |
| | /clone = DKFZphamy1_1c7 /gb = Z99410 /gi = 2415650 | | |
| | /ug = Hs.6314 /len = 669 | | |
| 47627_at | Cluster.Incl. AI445492:tj24c09.x1 Homo sapiens cDNA, | 4.705362783 | 0.006739 |
| | 3 end /clone = IMAGE-2142448 /clone_end = 3′ | | |
| | /gb = AI445492 /gi = 4288591 /ug = Hs.98370 /len = 545′ | | |
| 44770_s_at | Cluster Incl. AI341166:qx89h02.x1 Homo sapiens cDNA, | 4.699694547 | 0.000442 |
| | 3 end /clone = IMAGE-2009715 /clone_end = 3′ | | |
| | /gb = AI341166 /gi = 4078093 /ug = Hs.233977 /len = 257′ | | |
| 52019_at | Cluster Incl. AI557210:PT2.1_14_H10.r Homo sapiens cDNA, | 4.685097403 | 0.00302 |
| | 3 end /clone_end = 3′ /gb = AI557210 | | |
| | /gi = 4489573 /ug = Hs.41271 /len = 867′ | | |
| 53781_at | Cluster Incl. W74476:zd75a11.s1 Homo sapiens cDNA, | 4.663360742 | 0.003285 |
| | 3 end /clone = IMAGE-346460 /clone_end = 3′ | | |
| | /gb = W74476 /gi = 1384763 /ug = Hs.12680 /len = 675′ | | |
| 56172_at | Cluster Incl. AI979261:wr72g05.x1 Homo sapiens cDNA, | 4.605593005 | 0.001197 |
| | 3 end /clone = IMAGE-2493272 /clone_end = 3′ | | |
| | /gb = AI979261 /gi = 5804280 /ug = Hs.102720 /len = 809′ | | |
| 52117_at | Cluster Incl. AI670876:wa06c12.x1 Homo sapiens cDNA, | 4.577288892 | 0.013189 |
| | 3 end /clone = IMAGE-2297302 /clone_end = 3′ | | |
| | /gb = AI670876 /gi = 4850607 /ug = Hs.44276 /len = 798′ | | |
| 59614_g_a | Cluster Incl. AI669308:wb85b10.x1 Homo sapiens cDNA, | 4.508059219 | 0.001927 |
| | 3 end /clone = IMAGE-2312443 /clone_end = 3′ | | |
| | /gb = AI669308 /gi = 4834082 /ug = Hs.196337 /len = 632′ | | |
| 56688_at | Cluster Incl. AI631355:tz83d05.x1 Homo sapiens cDNA, | 4.461870453 | 0.001025 |
| | 3 end /clone = IMAGE-2295177 /clone_end = 3′ | | |
| | /gb = AI631355 /gi = 4682685 /ug = Hs.92096 /len = 390′ | | |
| 59709_at | Cluster Incl. AI675453:wb99f04.x1 Homo sapiens cDNA, | 4.443984215 | 0.004424 |
| | 3 end /clone = IMAGE-2313823 /clone_end = 3′ | | |
| | /gb = AI675453 /gi = 4875933 /ug = Hs.21432 /len = 562′ | | |
| 43963_at | Cluster Incl. AI703454:we24d09.x1 Homo sapiens cDNA, | 4.381967582 | 0.004589 |
| | 3 end /clone = IMAGE-2342033 /clone_end = 3′ | | |
| | /gb = AI703454 /gi = 4991354 /ug = Hs.26176 /len = 567′ | | |
| 56534_at | Cluster Incl. N20945:yx54f12.s1 Homo sapiens cDNA, | 4.354613332 | 0.000004 |
| | 3 end /clone = IMAGE-265583 /clone_end = 3′ | | |
| | /gb = N20945 /gi = 1126115 /ug = Hs.12210 /len = 621′ | | |
| 49162_f_at | Cluster Incl. AI610692:tp40f03.x1 Homo sapiens cDNA, | 4.340360862 | 0.00009 |
| | 3 end /clone = IMAGE-2190269 /clone_end = 3′ | | |
| | /gb = AI610692 /gi = 4619859 /ug = Hs.234412 /len = 474′ | | |
| 54850_at | Cluster Incl. AI860751:wl05b07.x1 Homo sapiens cDNA, | 4.319799905 | 0.004106 |
| | 3 end /clone = IMAGE-2423989 /clone_end = 3′ | | |
| | /gb = AI860751 /gi = 5514367 /ug = Hs.182476 /len = 637′ | | |
| 51244_at | Cluster Incl. AA447232:zw93a05.r1 Homo sapiens cDNA, | 4.254851949 | 0.008281 |
| | 5 end /clone = IMAGE-784496 /clone_end = 5′ | | |
| | /gb = AA447232 /gi = 2159897 /ug = Hs.34806 /len = 580′ | | |
| 47548_f_at | Cluster Incl. AA621124:af34f07.s1 Homo sapiens cDNA, | 4.238866373 | 0.00289 |
| | 3 end /clone = IMAGE-1033573 /clone_end = 3′ | | |
| | /gb = AA621124 /gi = 2525063 /ug = Hs.93135 /len = 639′ | | |
| 42988_at | Cluster Incl. AI344312:tc03e01.x1 Homo sapiens cDNA, | 4.225234676 | 0.001321 |
| | 3 end /clone = IMAGE-2062776 /clone_end = 3′ | | |
| | /gb = AI344312 /gi = 4081518 /ug = Hs.22011 /len = 578′ | | |
| 48431_at | Cluster Incl. AI970292:wr09b06.x1 Homo sapiens cDNA, | 4.223781701 | 0.000002 |
| | 3 end /clone = IMAGE-2481011 /clone_end = 3′ | | |
| | /gb = AI970292 /gi = 5767118 /ug = Hs.20279 /len = 605′ | | |
| 48077_at | Cluster Incl. AI741321:wg20c02.x1 Homo sapiens cDNA, | 4.208264213 | 0.000188 |
| | 3 end /clone = IMAGE-2365634 /clone_end = 3′ | | |
| | /gb = AI741321 /gi = 5109609 /ug = Hs.10760 /len = 525′ | | |
| 44112_at | Cluster Incl. AA224245:zr14h04.s1 Homo sapiens cDNA, | 4.200119211 | 0.000005 |
| | 3 end /clone = IMAGE-648823 /clone_end = 3′ | | |
| | /gb = AA224245 /gi = 1844770 /ug = Hs.26612 /len = 455′ | | |
| 45874_at | Cluster Incl. AI961994:wt41c03.x1 Homo sapiens cDNA, | 4.191359471 | 0.011876 |
| | 3 end /clone = IMAGE-2510020 /clone_end = 3′ | | |
| | /gb = AI961994 /gi = 5754696 /ug = Hs.30899 /len = 433′ | | |
| 52275_s_at | Cluster Incl. H11652:ym17g07.s1 Homo sapiens cDNA, | 4.123364243 | 0.000508 |
| | 3 end /clone = IMAGE-48178 /clone_end = 3′ | | |
| | /gb = H11652 /gi = 876472 /ug = Hs.236698 /len = 481′ | | |
| 55755_at | Cluster Incl. AI345945:qp47e12.x1 Homo sapiens cDNA, | 4.108035965 | 0.000005 |
| | 3 end /clone = IMAGE-1926190 /clone_end = 3′ | | |
| | /gb = AI345945 /gi = 4083151 /ug = Hs.10114 /len = 796′ | | |
| 48854_i_at | Cluster Incl. AW025683:wu07a09.x1 Homo sapiens cDNA, | 4.071776301 | 0.000025 |
| | 3 end /clone = IMAGE-2516248 /clone_end = 3′ | | |
| | /gb = AW025683 /gi = 5879213 /ug = Hs.237383 /len = 319′ | | |
| 53484_at | Cluster Incl. AI631585:wa99g06.x1 Homo sapiens cDNA, | 3.999414942 | 0.004362 |
| | 3 end /clone = IMAGE-2304346 /clone_end = 3′ | | |
| | /gb = AI631585 /gi = 4682915 /ug = Hs.33977 /len = 503′ | | |
| 57597_at | Cluster Incl. AW025904:wv71e11.x1 Homo sapiens cDNA, | 3.946689721 | 0.000247 |
| | 3 end /clone = IMAGE-991071 /clone_end = 3′ | | |
| | /gb = AW025904 /gi = 5879434 /ug = Hs.123661 /len = 674′ | | |
| 56940_g_a | Cluster Incl. AI963304:wt61d01.x1 Homo sapiens cDNA, | 3.934211473 | 0.037291 |
| | 3 end /clone = IMAGE-2511937 /clone_end = 3′ | | |
| | /gb = AI963304 /gi = 5756017 /ug = Hs.110373 /len = 660′ | | |
| 45144_at | Cluster Incl. AA641636:nr80c04.s1 Homo sapiens cDNA, | 3.920750642 | 0.008126 |
| | 3 end /clone = IMAGE-1174278 /clone_end = 3′ | | |
| | /gb = AA641636 /gi = 2566854 /ug = Hs.37477 /len = 569′ | | |
| 55636_at | Cluster Incl. W84893:zd88d09.s1 Homo sapiens cDNA, | 3.91767742 | 0.001305 |
| | 3 end /clone = IMAGE-347729 /clone_end = 3′ | | |
| | /gb = W84893 /gi = 1395457 /ug = Hs.9305 /len = 619′ | | |
| 52349_s_at | Cluster Incl. AA765843:oa25e09.s1 Homo sapiens cDNA | 3.908250964 | 0.000084 |
| | /clone = IMAGE-1306024 /gb = AA765843 /gi = 2817081 | | |
| | /ug = Hs.238961 /len = 496 | | |
| 44744_at | Cluster Incl. AI816843:wj34g08.x1 Homo sapiens cDNA, | 3.885817076 | 0.00012 |
| | 3 end /clone = IMAGE-2404766 /clone_end = 3′ | | |
| | /gb = AI816843 /gi = 5435922 /ug = Hs.172613 /len = 822′ | | |
| 45718_at | Cluster Incl. AA426499:zw02b06.r1 Homo sapiens cDNA, | 3.844537888 | 0.001962 |
| | 5 end /clone = IMAGE-768083 /clone_end = 5′ | | |
| | /gb = AA426499 /gi = 2106744 /ug = Hs.239900 /len = 553′ | | |
| 47598_at | Cluster Incl. AI767291:wh25h08.x1 Homo sapiens cDNA, | 3.797287151 | 0.004107 |
| | 3 end /clone = IMAGE-2381823 /clone_end = 3′ | | |
| | /gb = AI767291 /gi = 5233888 /ug = Hs.97101 /len = 601′ | | |
| 48546_s_at | Cluster Incl. N30008:yx82e08.s1 Homo sapiens cDNA, | 3.759130275 | 0.000038 |
| | 3 end /clone = IMAGE-268262 /clone_end = 3′ | | |
| | /gb = N30008 /gi = 1148528 /ug = Hs.17756 /len = 592′ | | |
| 51222_at | Cluster Incl. AW007811:wt03d11.x1 Homo sapiens cDNA, | 3.758109572 | 0.004507 |
| | 3 end /clone = IMAGE-2506389 /clone_end = 3′ | | |
| | /gb = AW007811 /gi = 5856589 /ug = Hs.32793 /len = 550′ | | |
| 52641_at | Cluster Incl. AI828579:wl42e03.x1 Homo sapiens cDNA, | 3.75632061 | 0.001209 |
| | 3 end /clone = IMAGE-2427580 /clone_end = 3′ | | |
| | /gb = AI828579 /gi = 5449250 /ug = Hs.239275 /len = 384′ | | |
| 52337_g_a | Cluster Incl. AI762208:wi54c10.x1 Homo sapiens cDNA, | 3.709836573 | 0.000216 |
| | 3 end /clone = IMAGE-2394066 /clone_end = 3′ | | |
| | /gb = AI762208 /gi = 5177875 /ug = Hs.238411 /len = 553′ | | |
| 52290_g_a | Cluster Incl. AA514342:nf56d01.s1 Homo sapiens cDNA, | 3.658373973 | 0.001941 |
| | 3 end /clone = IMAGE-923905 /clone_end = 3′ | | |
| | /gb = AA514342 /gi = 2253850 /ug = Hs.236950 /len = 606′ | | |
| 45331_at | Cluster Incl. AA102468:zm26a12.s1 Homo sapiens cDNA, | 3.627638605 | 0.00039 |
| | 3 end /clone = IMAGE-526750 /clone_end = 3′ | | |
| | /gb = AA102468 /gi = 1647486 /ug = Hs.234977 /len = 573′ | | |
| 52823_at | Cluster Incl. AI620209:tu54d10.x1 Homo sapiens cDNA, | 3.626992495 | 0.001038 |
| | 3 end /clone = IMAGE-2254867 /clone_end = 3′ | | |
| | /gb = AI620209 /gi = 4629335 /ug = Hs.37916 /len = 576′ | | |
| 47534_at | Cluster Incl. AI569980:tr90f02.x1 Homo sapiens cDNA, | 3.623794274 | 0.001497 |
| | 3 end /clone = IMAGE-2226363 /clone_end = 3′ | | |
| | /gb = AI569980 /gi = 4533354 /ug = Hs.9238 /len = 495′ | | |
| 56223_at | Cluster Incl. AI769689:wj25f12.x1 Homo sapiens cDNA, | 3.617285719 | 0.00013 |
| | 3 end /clone = IMAGE-2403887 /clone_end = 3′ | | |
| | /gb = AI769689 /gi = 5236198 /ug = Hs.192878 /len = 552′ | | |
| 56673_at | Cluster Incl. AA769578:nz42a04.s1 Homo sapiens cDNA | 3.598876589 | 0.001823 |
| | /clone = IMAGE-1290414 /gb = AA769578 /gi = 2820816 | | |
| | /ug = Hs.90488 /len = 575 | | |
| 48054_at | Cluster Incl. AA024984:ze80c07.s1 Homo sapiens cDNA, | 3.583829556 | 0.004289 |
| | 3 end /clone = IMAGE-365292 /clone_end = 3′ | | |
| | /gb = AA024984 /gi = 1489889 /ug = Hs.10574 /len = 474′ | | |
| 58322_at | Cluster Incl. AI765890:wh66g10.x1 Homo sapiens cDNA, | 3.5683257 | 0.000325 |
| | 3 end /clone = IMAGE-2385762 /clone_end = 3′ | | |
| | /gb = AI765890 /gi = 5232399 /ug = Hs.16341 /len = 511′ | | |
| 52826_at | Cluster Incl. AL037412:DKFZp564L0571_s1 Homo sapiens cDNA, | 3.568196085 | 0.000189 |
| | 3 end /clone = DKFZp564L0571 /clone_end = 3′ | | |
| | /gb = AL037412 /gi = 5406808 /ug = Hs.38039 /len = 804′ | | |
| 57195_at | Cluster Incl. AI935271:wp16c05.x1 Homo sapiens cDNA, | 3.544558558 | 0.000007 |
| | 3 end /clone = IMAGE-2465000 /clone_end = 3′ | | |
| | /gb = AI935271 /gi = 5674141 /ug = Hs.5663 /len = 562′ | | |
| 44040_at | Cluster Incl. AA524093:ng33f04.s1 Homo sapiens cDNA, | 3.544444641 | 0.002777 |
| | 3 end /clone = IMAGE-936607 /clone_end = 3′ | | |
| | /gb = AA524093 /gi = 2265021 /ug = Hs.23158 /len = 718′ | | |
| 48099_at | Cluster Incl. AA005023:zh96a11.s1 Homo sapiens cDNA, | 3.528226654 | 0.012069 |
| | 3 end /clone = IMAGE-429116 /clone_end = 3′ | | |
| | /gb = AA005023 /gi = 1448864 /ug = Hs.10888 /len = 593′ | | |
| 51270_at | Cluster Incl. AA005361:zh97b01.s1 Homo sapiens cDNA, | 3.504429429 | 0.00292 |
| | 3 end /clone = IMAGE-429193 /clone_end = 3′ | | |
| | /gb = AA005361 /gi = 1448394 /ug = Hs.36723 /len = 690′ | | |
| 49888_f_at | Cluster Incl. AI357616:qu20g08.x1 Homo sapiens cDNA, | 3.47870117 | 0.000114 |
| | 3 end /clone = IMAGE-1965374 /clone_end = 3′ | | |
| | /gb = AI357616 /gi = 4109237 /ug = Hs.101651 /len = 405′ | | |
| 51160_at | Cluster Incl. AA004208:zh97c02.s1 Homo sapiens cDNA, | 3.477061385 | 0.000445 |
| | 3 end /clone = IMAGE-429218 /clone_end = 3′ | | |
| | /gb = AA004208 /gi = 1448403 /ug = Hs.27437 /len = 665′ | | |
| 45826_at | Cluster Incl. AA044844:zk74f11.r1 Homo sapiens cDNA, | 3.434292964 | 0.000168 |
| | 5 end /clone = IMAGE-488589 /clone_end = 5′ | | |
| | /gb = AA044844 /gi = 1523066 /ug = Hs.5944 /len = 645′ | | |
| 52016_at | Cluster Incl. AI672414:ty64h06.x1 Homo sapiens cDNA, | 3.423366376 | 0.001144 |
| | 3 end /clone = IMAGE-2283899 /clone_end = 3′ | | |
| | /gb = AI672414 /gi = 4852145 /ug = Hs.41241 /len = 536′ | | |
| 46720_at | Cluster Incl. AI066598:ov47g09.x1 Homo sapiens cDNA, | 3.418349709 | 0.000205 |
| | 3 end /clone = IMAGE-1640512 /clone_end = 3′ | | |
| | /gb = AI066598 /gi = 3367300 /ug = Hs.9853 /len = 760′ | | |
| 48545_at | Cluster Incl. W87383:zh66f09.r1 Homo sapiens cDNA, | 3.403794238 | 0.000121 |
| | 5 end /clone = IMAGE-417065 /clone_end = 5′ | | |
| | /gb = W87383 /gi = 1401438 /ug = Hs.17731 /len = 625′ | | |
| 44630_at | Cluster Incl. AA521049:aa71c10.s1 Homo sapiens cDNA, | 3.356102325 | 0.003255 |
| | 3 end /clone = IMAGE-826386 /clone_end = 3′ | | |
| | /gb = AA521049 /gi = 2261592 /ug = Hs.34487 /len = 593′ | | |
| 54625_at | Cluster Incl. AA057543:zl93d01.s1 Homo sapiens cDNA, | 3.35563894 | 0.003164 |
| | 3 end /clone = IMAGE-512161 /clone_end = 3′ | | |
| | /gb = AA057543 /gi = 1550248 /ug = Hs.15911 /len = 655′ | | |
| 42831_at | Cluster Incl. AI201843:qs76f10.x1 Homo sapiens cDNA, | 3.352230883 | 0.000686 |
| | 3 end /clone = IMAGE-1944043 /clone_end = 3′ | | |
| | /gb = AI201843 /gi = 3754449 /ug = Hs.169133 /len = 358′ | | |
| 44778_g_a | Cluster Incl. AA553396:nk80b05.s1 Homo sapiens cDNA, | 3.349340084 | 0.001436 |
| | 3 end /clone = IMAGE-1019793 /clone_end = 3′ | | |
| | /gb = AA553396 /gi = 2323935 /ug = Hs.234190 /len = 454′ | | |
| 48540_at | Cluster Incl. R26843:yh52a03.s1 Homo sapiens cDNA, | 3.348102248 | 0.006734 |
| | 3 end /clone = IMAGE-133324 /clone_end = 3′ | | |
| | /gb = R26843 /gi = 782978 /ug = Hs.17558 /len = 490′ | | |
| 55752_at | Cluster Incl. AI198880:qf66c09.x1 Homo sapiens cDNA, | 3.344024791 | 0.004837 |
| | 3 end /clone = IMAGE-1754992 /clone_end = 3′ | | |
| | /gb = AI198880 /gi = 3751486 /ug = Hs.10098 /len = 786′ | | |
| 57171_at | Cluster Incl. X84716:HSEST92 Homo sapiens cDNA | 3.338417032 | 0.000053 |
| | /clone = MEC-92 /gb = X84716 /gi = 673403 | | |
| | /ug = Hs.29748 /len = 1214 | | |
| 48013_at | Cluster Incl. AI768116:wg81c10.x1 Homo sapiens cDNA, | 3.322252213 | 0.015046 |
| | 3 end /clone = IMAGE-2371506 /clone_end = 3′ | | |
| | /gb = AI768116 /gi = 5234625 /ug = Hs.10086 /len = 557′ | | |
| 51840_at | Cluster Incl. AI765436:wi80a08.x1 Homo sapiens cDNA, | 3.318140109 | 0.020706 |
| | 3 end /clone = IMAGE-2399606 /clone_end = 3′ | | |
| | /gb = AI765436 /gi = 5231945 /ug = Hs.5605 /len = 498′ | | |
| 45228_at | Cluster Incl. AI271425:qi19b04.x1 Homo sapiens cDNA, | 3.317124397 | 0.007521 |
| | 3 end /clone = IMAGE-1856911 /clone_end = 3′ | | |
| | /gb = AI271425 /gi = 3890592 /ug = Hs.43749 /len = 551′ | | |
| 52062_f_at | Cluster Incl. H98105:yx09b10.s1 Homo sapiens cDNA, | 3.313066937 | 0.002819 |
| | 3 end /clone = IMAGE-261211 /clone_end = 3′ | | |
| | /gb = H98105 /gi = 1118990 /ug = Hs.42491 /len = 584′ | | |
| 50795_at | Cluster Incl. AI693592:wd79a05.x1 Homo sapiens cDNA, | 3.31259622 | 0.000537 |
| | 3 end /clone = IMAGE-2337776 /clone_end = 3′ | | |
| | /gb = AI693592 /gi = 4970932 /ug = Hs.112712 /len = 508′ | | |
| 57022_at | Cluster Incl. AI742490:wg43e10.x1 Homo sapiens cDNA, | 3.310509474 | 0.000572 |
| | 3 end /clone = IMAGE-2367882 /clone_end = 3′ | | |
| | /gb = AI742490 /gi = 5110778 /ug = Hs.112885 /len = 550′ | | |
| 42999_at | Cluster Incl. AI758408:ty68f09.x1 Homo sapiens cDNA, | 3.305590563 | 0.007574 |
| | 3 end /clone = IMAGE-2284265 /clone_end = 3′ | | |
| | /gb = AI758408 /gi = 5152131 /ug = Hs.22247 /len = 633′ | | |
| 58695_at | Cluster Incl. AA461376:zx70g03.r1 Homo sapiens cDNA, | 3.290571553 | 0.000149 |
| | 5 end /clone = IMAGE-796852 /clone_end = 5′ | | |
| | /gb = AA461376 /gi = 2186496 /ug = Hs.9625 /len = 588′ | | |
| 47110_at | Cluster Incl. AA205598:zq68d01.s1 Homo sapiens cDNA, | 3.286952373 | 0.011612 |
| | 3 end /clone = IMAGE-646753 /clone_end = 3′ | | |
| | /gb = AA205598 /gi = 1803606 /ug = Hs.86366 /len = 618′ | | |
| 53922_at | Cluster Incl. AA195789:zp95b07.r1 Homo sapiens cDNA, | 3.282601218 | 0.015234 |
| | 5 end /clone = IMAGE-627925 /clone_end = 5′ | | |
| | /gb = AA195789 /gi = 1791380 /ug = Hs.60440 /len = 619′ | | |
| 47899_at | Cluster Incl. AA056755:zk81g02.s1 Homo sapiens cDNA, | 3.276090147 | 0.007052 |
| | 3 end /clone = IMAGE-489266 /clone_end = 3′ | | |
| | /gb = AA056755 /gi = 1549130 /ug = Hs.151714 /len = 496′ | | |
| 43053_g_a | Cluster Incl. AW025012:wu93a04.x1 Homo sapiens cDNA, | 3.25557678 | 0.00068 |
| | 3 end /clone = IMAGE-990913 /clone_end = 3′ | | |
| | /gb = AW025012 /gi = 5878542 /ug = Hs.23295 /len = 520′ | | |
| 48080_at | Cluster Incl. A1566481:tr60d03.x2 Homo sapiens cDNA, | 3.224686597 | 0.000089 |
| | 3 end /clone = IMAGE-2222693 /clone_end = 3′ | | |
| | /gb = AI566481 /gi = 4524933 /ug = Hs.10784 /len = 551′ | | |
| 50417_at | Cluster Incl. AA641023:nr72c02.s1 Homo sapiens cDNA, | 3.222451104 | 0.000231 |
| | 3 end /clone = IMAGE-1173506 /clone_end = 3′ | | |
| | /gb = AA641023 /gi = 2566273 /ug = Hs.25303 /len = 571′ | | |
| 55749_at | Cluster Incl. AA135720:zl11b08.s1 Homo sapiens cDNA, | 3.211891299 | 0.002311 |
| | 3 end /clone = IMAGE-501591 /clone_end = 3′ | | |
| | /gb = AA135720 /gi = 1696732 /ug = Hs.10083 /len = 563′ | | |
| 45390_at | Cluster Incl. AI769269:wg35h12.x1 Homo sapiens cDNA, | 3.203408013 | 0.001334 |
| | 3 end /clone = IMAGE-2367143 /clone_end = 3′ | | |
| | /gb = AI769269 /gi = 5235778 /ug = Hs.239541 /len = 443′ | | |
| 56035_at | Cluster Incl. AL041162:DKFZp434G1516_s1 Homo sapiens cDNA, | 3.199890488 | 0.000887 |
| | 3 end /clone = DKFZp434G1516 /clone_end = 3′ | | |
| | /gb = AL041162 /gi = 5410098 /ug = Hs.98587 /len = 775′ | | |
| 54594_at | Cluster Incl. AA009571:zi04h05.r1 Homo sapiens cDNA, | 3.199200539 | 0.042469 |
| | 5 end /clone = IMAGE-429849 /clone_end = 5′ | | |
| | /gb = AA009571 /gi = 1470709 /ug = Hs.82290 /len = 467′ | | |
| 56827_at | Cluster Incl. AI932306:wd26g11.x1 Homo sapiens cDNA, | 3.177892231 | 0.000647 |
| | 3 end /clone = IMAGE-2329316 /clone_end = 3′ | | |
| | /gb = A1932306 /gi = 5671043 /ug = Hs.105463 /len = 528′ | | |
| 45143_at | Cluster Incl. AA160973:zq40h10.s1 Homo sapiens cDNA, | 3.169675904 | 0.000021 |
| | 3 end /clone = IMAGE-632227 /clone_end = 3′ | | |
| | /gb = AA160973 /gi = 1735680 /ug = Hs.37443 /len = 544′ | | |
| 44974_at | Cluster Incl. AI970896:wr21b11.x1 Homo sapiens cDNA, | 3.140815237 | 0.001848 |
| | 3 end /clone = IMAGE-2488317 /clone_end = 3′ | | |
| | /gb = AI970896 /gi = 5767722 /ug = Hs.233634 /len = 514′ | | |
| 54049_at | Cluster Incl. AI652991:wb42b11.x1 Homo sapiens cDNA, | 3.138854596 | 0.014071 |
| | 3 end /clone = IMAGE-2308317 /clone_end = 3′ | | |
| | /gb = AI652991 /gi = 4736970 /ug = Hs.6682 /len = 528′ | | |
| 59346_at | Cluster Incl. W96205:ze10d04.s1 Homo sapiens cDNA, | 3.133106727 | 0.018285 |
| | 3 end /clone = IMAGE-358567 /clone_end = 3′ | | |
| | /gb = W96205 /gi = 1426131 /ug = Hs.163703 /len = 408′ | | |
| 45280_at | Cluster Incl. AA703316:zj11b07.s1 Homo sapiens cDNA, | 3.093960419 | 0.000016 |
| | 3 end /clone = 449941 /clone_end = 3′ | | |
| | /gb = AA703316 /gi = 2713234 /ug = Hs.19221 /len = 499′ | | |
| 50287_at | Cluster Incl. R61210:yh06e09.r1 Homo sapiens cDNA, | 3.083985493 | 0.023892 |
| | 5 end /clone = IMAGE-42341 /clone_end = 5′ | | |
| | /gb = R61210 /gi = 831905 /ug = Hs.239431 /len = 551′ | | |
| 58317_at | Cluster Incl. AI638611:tt31b11.x1 Homo sapiens cDNA, | 3.068722453 | 0.000172 |
| | 3 end /clone = IMAGE-2242365 /clone_end = 3′ | | |
| | /gb = AI638611 /gi = 4690845 /ug = Hs.16229 /len = 639′ | | |
| 51155_at | Cluster Incl. AL043669:DKFZp434J2027_s1 Homo sapiens cDNA, | 3.056662545 | 0.002265 |
| | 3 end /clone = DKFZp434J2027 /clone_end = 3′ | | |
| | /gb = AL043669 /gi = 5423056 /ug = Hs.27268 /len = 540′ | | |
| 43366_at | Cluster Incl. AI979079:wr70b09.x1 Homo sapiens cDNA, | 3.055354669 | 0.007779 |
| | 3 end /clone = IMAGE-2493017 /clone_end = 3′ | | |
| | /gb = AI979079 /gi = 5804109 /ug = Hs.233723 /len = 490′ | | |
| 52848_at | Cluster Incl. AI491983:to07e03.x1 Homo sapiens cDNA, | 3.008324353 | 0.003676 |
| | 3 end /clone = IMAGE-2178364 /clone_end = 3′ | | |
| | /gb = AI491983 /gi = 4392986 /ug = Hs.74911 /len = 655′ | | |
| 57596_at | Cluster Incl. T75313:yc89d05.r1 Homo sapiens cDNA, | 3.001649666 | 0.020524 |
| | 5 end /clone = IMAGE-23443 /clone_end = 5′ | | |
| | /gb = T75313 /gi = 692075 /ug = Hs.12365 /len = 530′ | | |
| 43994_at | Cluster Incl. AI333224:qq05h01.x1 Homo sapiens cDNA, | 3.000320561 | 0.004173 |
| | 3 end /clone = IMAGE-1931665 /clone_end = 3′ | | |
| | /gb = AI333224 /gi = 4069783 /ug = Hs.26955 /len = 504′ | | |
| 43993_at | Cluster Incl. AA223148:zr07g09.s1 Homo sapiens cDNA, | 0.328758769 | 0.000839 |
| | 3 end /clone = IMAGE-650848 /clone_end = 3′ | | |
| | /gb = AA223148 /gi = 1843707 /ug = Hs.26942 /len = 492′ | | |
| 42833_g_a | Cluster Incl. W61185:zd31c11.s1 Homo sapiens cDNA, | 0.328541123 | 0.000416 |
| | 3 end /clone = IMAGE-342260 /clone_end = 3′ | | |
| | /gb = W61185 /gi = 1368020 /ug = Hs.169345 /len = 400′ | | |
| 45878_at | Cluster Incl. W21966:59c7 Homo sapiens cDNA | 0.328253841 | 0.000258 |
| | /clone = (not-directional) /gb = W21966 /gi = 1298799 | | |
| | /ug = Hs.31097 /len = 767 | | |
| 44711_at | Cluster Incl. AI928869:au64d01.x1 Homo sapiens cDNA | 0.327580662 | 0.023675 |
| | /clone = IMAGE /gb = AI928869 /gi = 5664768 | | |
| | /ug = Hs.15977 /len = 630 | | |
| 50314_i_at | Cluster Incl. AI761506:wi61b11.x1 Homo sapiens cDNA, | 0.326479347 | 0.018768 |
| | 3 end /clone = IMAGE-2394717 /clone_end = 3′ | | |
| | /gb = AI761506 /gi = 5177173 /ug = Hs.239692 /len = 544′ | | |
| 42065_at | Cluster Incl. H28581:yl63e11.s1 Homo sapiens cDNA, | 0.324964383 | 0.000041 |
| | 3 end /clone = IMAGE-162956 /clone_end = 3′ | | |
| | /gb = H28581 /gi = 898934 /ug = Hs.92711 /len = 416′ | | |
| 46079_at | Cluster Incl. W63785:zd30g09.s1 Homo sapiens cDNA, | 0.319996048 | 0.000015 |
| | 3 end /clone = IMAGE-342208 /clone_end = 3′ | | |
| | /gb = W63785 /gi = 1371386 /ug = Hs.57843 /len = 495′ | | |
| 42987_at | Cluster Incl. AI003579:ai88d07.s1 Homo sapiens cDNA, | 0.318539582 | 0.000912 |
| | 3 end /clone = IMAGE-1387885 /clone_end = 3′ | | |
| | /gb = AI003579 /gi = 3203913 /ug = Hs.22003 /len = 600′ | | |
| 57915_at | Cluster Incl. AA613523:nq22d01.s1 Homo sapiens cDNA, | 0.315418617 | 0.001639 |
| | 3 end /clone = IMAGE-1144609 /clone_end = 3′ | | |
| | /gb = AA613523 /gi = 2464561 /ug = Hs.22824 /len = 507′ | | |
| 56272_at | Cluster Incl. AI827230:wl09e02.x1 Homo sapiens cDNA, | 0.311014472 | 0.001289 |
| | 3 end /clone = IMAGE-2424410 /clone_end = 3′ | | |
| | /gb = AI827230 /gi = 5447901 /ug = Hs.20665 /len = 748′ | | |
| 59466_at | Cluster Incl. AA447295:AC.F02R Homo sapiens cDNA, | 0.310739955 | 0.002774 |
| | 5 end /clone = AC.F02 /clone_end = 5′ /gb = AA447295 | | |
| | /gi = 3025381 /ug = Hs.168953 /len = 589′ | | |
| 42803_at | Cluster Incl. AI377305:te60a03.x1 Homo sapiens cDNA, | 0.307373662 | 0.00498 |
| | 3 end /clone = IMAGE-2091052 /clone_end = 3′ | | |
| | /gb = AI377305 /gi = 4187158 /ug = Hs.165694 /len = 474′ | | |
| 46200_at | Cluster Incl. AA742697:nx30g04.s1 Homo sapiens cDNA | 0.307203732 | 0.04226 |
| | /clone = IMAGE-1257654 /gb = AA742697 /gi = 2782203 | | |
| | /ug = Hs.62492 /len = 526 | | |
| 45635_at | Cluster Incl. AI801898:tx28h03.x1 Homo sapiens cDNA, | 0.306826026 | 0.001547 |
| | 3 end /clone = IMAGE-2270933 /clone_end = 3′ | | |
| | /gb = AI801898 /gi = 5367370 /ug = Hs.47166 /len = 604′ | | |
| 46095_at | Cluster Incl. AL044632:DKFZp434O082_r1 Homo sapiens cDNA, | 0.306352205 | 0.003349 |
| | 5 end /clone = DKFZp434O082 /clone_end = 5′ | | |
| | /gb = AL044632 /gi = 5432847 /ug = Hs.55016 /len = 554′ | | |
| 47653_r_at | Cluster Incl. AW023468:df55c11.y1 Homo sapiens cDNA, | 0.306297842 | 0.003547 |
| | 5 end /clone = IMAGE-2487188 /clone_end = 5′ | | |
| | /gb = AW023468 /gi = 5876998 /ug = Hs.165320 /len = 473′ | | |
| 43046_at | Cluster Incl. AI419030:tf53b01.x1 Homo sapiens cDNA, | 0.306182917 | 0.034114 |
| | 3 end /clone = IMAGE-2102953 /clone_end = 3′ | | |
| | /gb = AI419030 /gi = 4264961 /ug = Hs.23202 /len = 473′ | | |
| 49227_at | Cluster Incl. H09620:yl97f09.s1 Homo sapiens cDNA, | 0.303321471 | 0.001357 |
| | 3 end /clone = IMAGE-46287 /clone_end = 3′ | | |
| | /gb = H09620 /gi = 874442 /ug = Hs.23783 /len = 531′ | | |
| 52988_at | Cluster Incl. AI765981:wj23a06.x1 Homo sapiens cDNA, | 0.303206128 | 0.000057 |
| | 3 end /clone = IMAGE-2403634 /clone_end = 3′ | | |
| | /gb = AI765981 /gi = 5232490 /ug = Hs.49657 /len = 580′ | | |
| 58356_at | Cluster Incl. AA142978:zl49d03.s1 Homo sapiens cDNA, | 0.301800249 | 0.000424 |
| | 3 end /clone = IMAGE-505253 /clone_end = 3′ | | |
| | /gb = AA142978 /gi = 1712437 /ug = Hs.167951 /len = 654′ | | |
| 53275_at | Cluster Incl. AA829709:oe50e07.s1 Homo sapiens cDNA | 0.301386846 | 0.00009 |
| | /clone = IMAGE-1415076 /gb = AA829709 /gi = 2902808 | | |
| | /ug = Hs.28733 /len = 438 | | |
| 55107_at | Cluster Incl. AI916306:we29c09.x1 Homo sapiens cDNA, | 0.300526553 | 0.000003 |
| | 3 end /clone = IMAGE-2342512 /clone_end = 3′ | | |
| | /gb = AI916306 /gi = 5636251 /ug = Hs.87125 /len = 532′ | | |
| 42909_at | Cluster Incl. AA281967:zt11g07.s1 Homo sapiens cDNA, | 0.299343167 | 0.000852 |
| | 3 end /clone = IMAGE-712860 /clone_end = 3′ | | |
| | /gb = AA281967 /gi = 1924791 /ug = Hs.221168 /len = 454′ | | |
| 42832_at | Cluster Incl. W61185:zd31c11.s1 Homo sapiens cDNA, | 0.298246963 | 0.000023 |
| | 3 end /clone = IMAGE-342260 /clone_end = 3′ | | |
| | /gb = W61185 /gi = 1368020 /ug = Hs.169345 /len = 400′ | | |
| 44599_at | Cluster Incl. AA631908:np78a09.s1 Homo sapiens cDNA | 0.2973351 | 0.000806 |
| | /clone = IMAGE-1132408 /gb = AA631908 /gi = 2554519 | | |
| | /ug = Hs.32417 /len = 569 | | |
| 46169_at | Cluster Incl. AI745624:wc33h03.x1 Homo sapiens cDNA, | 0.297165449 | 0.00003 |
| | 3 end /clone = IMAGE-2317013 /clone_end = 3′ | | |
| | /gb = AI745624 /gi = 5113912 /ug = Hs.6065 /len = 574′ | | |
| 43063_at | Cluster Incl. AA584408:nn81b03.s1 Homo sapiens cDNA, | 0.296993211 | 0.009651 |
| | 3 end /clone = IMAGE-1090253 /clone_end = 3′ | | |
| | /gb = AA584408 /gi = 2369017 /ug = Hs.233852 /len = 620′ | | |
| 54831_r_at | Cluster Incl. AA147881:zl50a04.s1 Homo sapiens cDNA, | 0.295444255 | 0.000453 |
| | 3 end /clone = IMAGE-505326 /clone_end = 3′ | | |
| | /gb = AA147881 /gi = 1717297 /ug = Hs.180777 /len = 620′ | | |
| 50411_at | Cluster Incl. AI659533:tu12a12.x1 Homo sapiens cDNA, | 0.294474802 | 0.008774 |
| | 3 end /clone = IMAGE-2250814 /clone_end = 3′ | | |
| | /gb = AI659533 /gi = 4763103 /ug = Hs.25248 /len = 654′ | | |
| 46628_at | Cluster Incl. AI636631:ts92a04.x1 Homo sapiens cDNA, | 0.293823752 | 0.003684 |
| | 3 end /clone = IMAGE-2238702 /clone_end = 3′ | | |
| | /gb = AI636631 /gi = 4687961 /ug = Hs.6828 /len = 495′ | | |
| 56238_at | Cluster Incl. AI589776:tm74c04.x1 Homo sapiens cDNA, | 0.293416233 | 0.004513 |
| | 3 end /clone = IMAGE-2163846 /clone_end = 3′ | | |
| | /gb = AI589776 /gi = 4598824 /ug = Hs.19447 /len = 760′ | | |
| 47283_at | Cluster Incl. AA398628:zt74e03.s1 Homo sapiens cDNA, | 0.293232708 | 0.00032 |
| | 3 end /clone = IMAGE-728092 /clone_end = 3′ | | |
| | /gb = AA398628 /gi = 2051737 /ug = Hs.163845 /len = 467′ | | |
| 57143_r_at | Cluster Incl. AI740811:wg24e02.x1 Homo sapiens cDNA, | 0.292284773 | 0.002541 |
| | 3 end /clone = IMAGE-2366042 /clone_end = 3′ | | |
| | /gb = AI740811 /gi = 5109099 /ug = Hs.23579 /len = 572′ | | |
| 58104_at | Cluster Incl. AI161427:qc78f03.x1 Homo sapiens cDNA, | 0.291974611 | 0.000569 |
| | 3 end /clone = IMAGE-1715741 /clone_end = 3′ | | |
| | /gb = AI161427 /gi = 3693188 /ug = Hs.104871 /len = 436′ | | |
| 44680_at | Cluster Incl. AA464020:zx86a03.r1 Homo sapiens cDNA, | 0.291478075 | 0.000129 |
| | 5 end /clone = IMAGE-810604 /clone_end = 5′ | | |
| | /gb = AA464020 /gi = 2188904 /ug = Hs.32246 /len = 534′ | | |
| 58015_at | Cluster Incl. AA993222:ou02c09.s1 Homo sapiens cDNA, | 0.290171632 | 0.000436 |
| | 3 end /clone = IMAGE-1625104 /clone_end = 3′ | | |
| | /gb = AA993222 /gi = 3179767 /ug = Hs.101915 /len = 471′ | | |
| 47918_at | Cluster Incl. H17938:ym37a06.s1 Homo sapiens cDNA, | 0.289844258 | 0.000045 |
| | 3 end /clone = IMAGE-50084 /clone_end = 3′ | | |
| | /gb = H17938 /gi = 884178 /ug = Hs.16365 /len = 473′ | | |
| 44031_at | Cluster Incl. AI478812:tm52f03.x1 Homo sapiens cDNA, | 0.289231972 | 0.000021 |
| | 3 end /clone = IMAGE-2161757 /clone_end = 3′ | | |
| | /gb = AI478812 /gi = 4373625 /ug = Hs.28917 /len = 511′ | | |
| 45260_at | Cluster Incl. W22565:70E5 Homo sapiens cDNA | 0.288048543 | 0.010503 |
| | /clone = (not-directional) /gb = W22565 /gi = 1299447 | | |
| | /ug = Hs.182344 /len = 805 | | |
| 50190_at | Cluster Incl. AI697875:we18c06.x1 Homo sapiens cDNA, | 0.28704917 | 0.00027 |
| | 3 end /clone = IMAGE-2341450 /clone_end = 3′ | | |
| | /gb = AI697875 /gi = 4985775 /ug = Hs.31664 /len = 551′ | | |
| 52125_at | Cluster Incl. AI991041:wu36b09.x1 Homo sapiens cDNA, | 0.28697383 | 0.001537 |
| | 3 end /clone = IMAGE-990828 /clone_end = 3′ | | |
| | /gb = AI991041 /gi = 5837938 /ug = Hs.44579 /len = 534′ | | |
| 52480_at | Cluster Incl. AI334409:qq26b07.x1 Homo sapiens cDNA, | 0.286020382 | 0.002088 |
| | 3 end /clone = IMAGE-1933621 /clone_end = 3′ | | |
| | /gb = AI334409 /gi = 4070968 /ug = Hs.26192 /len = 439′ | | |
| 43601_g_a | Cluster Incl. AA100793:zm26c02.s1 Homo sapiens cDNA, | 0.285572376 | 0.017485 |
| | 3 end /clone = IMAGE-526754 /clone_end = 3′ | | |
| | /gb = AA100793 /gi = 1647210 /ug = Hs.193380 /len = 500′ | | |
| 42242_at | Cluster Incl. AA978128:op32e03.s1 Homo sapiens cDNA, | 0.284819299 | 0.000022 |
| | 3 end /clone = IMAGE-1578556 /clone_end = 3′ | | |
| | /gb = AA978128 /gi = 3155574 /ug = Hs.99513 /len = 382′ | | |
| 44256_g_a | Cluster Incl. AA480017:zv18e06.r1 Homo sapiens cDNA, | 0.284758761 | 0.037516 |
| | 5 end /clone = IMAGE-754018 /clone_end = 5′ | | |
| | /gb = AA480017 /gi = 2208168 /ug = Hs.226513 /len = 499′ | | |
| 49125_at | Cluster Incl. AI609604:tw91e09.x1 Homo sapiens cDNA, | 0.284325628 | 0.015787 |
| | 3 end /clone = IMAGE-2267080 /clone_end = 3′ | | |
| | /gb = AI609604 /gi = 4618771 /ug = Hs.227806 /len = 460′ | | |
| 49819_at | Cluster Incl. AI432375:tg54h06.x1 Homo sapiens cDNA, | 0.283787158 | 0.000007 |
| | 3 end /clone = IMAGE-2112635 /clone_end = 3′ | | |
| | /gb = AI432375 /gi = 4281193 /ug = Hs.99083 /len = 470′ | | |
| 53914_at | Cluster Incl. AI767222:wi94e09.x1 Homo sapiens cDNA, | 0.283775141 | 0.000275 |
| | 3 end /clone = IMAGE-2401000 /clone_end = 3′ | | |
| | /gb = AI767222 /gi = 5233731 /ug = Hs.15830 /len = 651′ | | |
| 47324_at | Cluster Incl. AA199881:zq52f10.s1 Homo sapiens cDNA, | 0.283572718 | 0 |
| | 3 end /clone = IMAGE-645259 /clone_end = 3′ | | |
| | /gb = AA199881 /gi = 1795588 /ug = Hs.58350 /len = 511′ | | |
| 53796_at | Cluster Incl. AI819282:wj05f11.x1 Homo sapiens cDNA, | 0.283060388 | 0.04394 |
| | 3 end /clone = IMAGE-2401965 /clone_end = 3′ | | |
| | /gb = AI819282 /gi = 5438361 /ug = Hs.12936 /len = 593′ | | |
| 47481_at | Cluster Incl. AA621478:af92e12.s1 Homo sapiens cDNA, | 0.282636217 | 0.016871 |
| | 3 end /clone = IMAGE-1055278 /clone_end = 3′ | | |
| | /gb = AA621478 /gi = 2525417 /ug = Hs.130699 /len = 398′ | | |
| 45333_at | Cluster Incl. AI525592:PT1.3_03_F03.r Homo sapiens cDNA, | 0.279658196 | 0.000052 |
| | 5 end /clone_end = 5′ /gb = AI525592 | | |
| | /gi = 4439727 /ug = Hs.23579 /len = 887′ | | |
| 59126_at | Cluster Incl. AI660548:we68a05.x1 Homo sapiens cDNA, | 0.278719933 | 0.0035 |
| | 3 end /clone = IMAGE-2346224 /clone_end = 3′ | | |
| | /gb = AI660548 /gi = 4764118 /ug = Hs.19165 /len = 501′ | | |
| 48822_s_at | Cluster Incl. AW015546:UI-H-BI0p-aau-d-11-0-UI.s1 | 0.27784195 | 0.004766 |
| | Homo sapiens cDNA, | | |
| | 3 end /clone = IMAGE-2710700 /clone_end = 3′ | | |
| | /gb = AW015546 /gi = 5864303 /ug = Hs.234250 /len = 629′ | | |
| 43395_s_at | Cluster Incl. AW006148:wz92h09.x1 Homo sapiens cDNA, | 0.277596215 | 0.030595 |
| | 3 end /clone = IMAGE-2566337 /clone_end = 3′ | | |
| | /gb = AW006148 /gi = 5854926 /ug = Hs.234072 /len = 502′ | | |
| 47071_at | Cluster Incl. AI279709:ql53e09.x1 Homo sapiens cDNA, | 0.276885721 | . 0 |
| | 3 end /clone = IMAGE-1876072 /clone_end = 3′ | | |
| | /gb = AI279709 /gi = 3917943 /ug = Hs.79741 /len = 601′ | | |
| 58454_at | Cluster Incl. AI738919:wi12a04.x1 Homo sapiens cDNA, | 0.274374246 | 0.000036 |
| | 3 end /clone = IMAGE-2389998 /clone_end = 3′ | | |
| | /gb = AI738919 /gi = 5100900 /ug = Hs.239355 /len = 648′ | | |
| 54369_at | Cluster Incl. AI242381:qi15f07.x1 Homo sapiens cDNA, | 0.274129957 | 0.000022 |
| | 3 end /clone = IMAGE-1856581 /clone_end = 3′ | | |
| | /gb = AI242381 /gi = 3837778 /ug = Hs.47282 /len = 263′ | | |
| 54310_at | Cluster Incl. AA975511:on30e03.s1 Homo sapiens cDNA, | 0.272632887 | 0.003 |
| | 3 end /clone = IMAGE-1558204 /clone_end = 3′ | | |
| | /gb = AA975511 /gi = 3151303 /ug = Hs.44565 /len = 497′ | | |
| 50151_at | Cluster Incl. AA403227:zv66h05.r1 Homo sapiens cDNA, | 0.271893984 | 0.000269 |
| | 5 end /clone = IMAGE-758649 /clone_end = 5′ | | |
| | /gb = AA403227 /gi = 2055725 /ug = Hs.29604 /len = 557′ | | |
| 46011_at | Cluster Incl. AI916225:wi49f07.x1 Homo sapiens cDNA, | 0.269822445 | 0.000412 |
| | 3 end /clone = IMAGE-2393605 /clone_end = 3′ | | |
| | /gb = AI916225 /gi = 5636080 /ug = Hs.58559 /len = 507′ | | |
| 56216_at | Cluster Incl. AA740543:ob28g10.s1 Homo sapiens cDNA | 0.269334271 | 0.001353 |
| | /clone = IMAGE-1325058 /gb = AA740543 /gi = 2779135 | | |
| | /ug = Hs.103913 /len = 486 | | |
| 57452_at | Cluster Incl. AA451798:zx46b07.r1 Homo sapiens cDNA, | 0.268116773 | 0.000009 |
| | 5 end /clone = IMAGE-795253 /clone_end = 5′ | | |
| | /gb = AA451798 /gi = 2165467 /ug = Hs.99249 /len = 407′ | | |
| 45456_at | Cluster Incl. R60584:yh14g05.s1 Homo sapiens cDNA, | 0.26781965 | 0.007247 |
| | 3 end /clone = IMAGE-37856 /clone_end = 3′ | | |
| | /gb = R60584 /gi = 831279 /ug = Hs.26789 /len = 492′ | | |
| 46105_at | Cluster Incl. AA149641:zl39c08.s1 Homo sapiens cDNA, | 0.267205089 | 0.000264 |
| | 3 end /clone = IMAGE-504302 /clone_end = 3′ | | |
| | /gb = AA149641 /gi = 1720442 /ug = Hs.55405 /len = 570′ | | |
| 58567_s_at | Cluster Incl. AI308197:tb25g11.x1 Homo sapiens cDNA, | 0.265573576 | 0.034363 |
| | 3 end /clone = IMAGE-2055428 /clone_end = 3′ | | |
| | /gb = AI308197 /gi = 4002832 /ug = Hs.40496 /len = 462′ | | |
| 58359_g_a | Cluster Incl. AA142978:zl49d03.s1 Homo sapiens cDNA, | 0.264528974 | 0.000057 |
| | 3 end /clone = IMAGE-505253 /clone_end = 3′ | | |
| | /gb = AA142978 /gi = 1712437 /ug = Hs.167951 /len = 654′ | | |
| 53166_at | Cluster Incl. W74591:zd77g09.s1 Homo sapiens cDNA, | 0.263493949 | 0.002128 |
| | 3 end /clone = IMAGE-346720 /clone end = 3′ | | |
| | /gb = W74591 /gi = 1384892 /ug = Hs.5771 /len = 663′ | | |
| 45256_at | Cluster Incl. AI271460:qi19e06.x1 Homo sapiens cDNA, | 0.259328936 | 0.001801 |
| | 3 end /clone = IMAGE-1856962 /clone_end = 3′ | | |
| | /gb = AI271460 /gi = 3890627 /ug = Hs.181368 /len = 559′ | | |
| 47771_at | Cluster Incl. AA234670:zs37f06.r1 Homo sapiens cDNA, | 0.257739498 | 0.000014 |
| | 5 end /clone = IMAGE-687395 /clone_end = 5′ | | |
| | /gb = AA234670 /gi = 1859377 /ug = Hs.62654 /len = 316′ | | |
| 59704_at | Cluster Incl. H15288:ym30g12.s1 Homo sapiens cDNA, | 0.256002125 | 0.000103 |
| | 3 end /clone = IMAGE-49810 /clone_end = 3′ | | |
| | /gb = H15288 /gi = 880108 /ug = Hs.21420 /len = 562′ | | |
| 48896_at | Cluster Incl. AI082244:ox79g07.x1 Homo sapiens cDNA, | 0.255967313 | 0.000028 |
| | 3 end /clone = IMAGE-1662588 /clone_end = 3′ | | |
| | /gb = AI082244 /gi = 3419036 /ug = Hs.93764 /len = 552′ | | |
| 45210_at | Cluster Incl. AA035736:ze25b11.r1 Homo sapiens cDNA, | 0.255599052 | 0.000002 |
| | 5 end /clone = IMAGE-359997 /clone_end = 5′ | | |
| | /gb = AA035736 /gi = 1507626 /ug = Hs.4285 /len = 470′ | | |
| AFFX-HUM | M33197 Human glyceraldehyde-3-phosphate dehydrogenase | 0.253971231 | 0.02209 |
| | (GAPDH) mRNA, complete cds (_5, _M, _3 represent transcript | | |
| | regions 5 prime, Middle, and 3 prime respectively) | | |
| 50223_at | Cluster Incl. AA020743:ze63c11.s1 Homo sapiens cDNA, | 0.253657497 | 0.048419 |
| | 3 end /clone = IMAGE-363668 /clone_end = 3′ | | |
| | /gb = AA020743 /gi = 1484525 /ug = Hs.234026 /len = 626′ | | |
| 47097_at | Cluster Incl. AI674565:wc03c02.x1 Homo sapiens cDNA, | 0.252742984 | 0.000395 |
| | 3 end /clone = IMAGE-2314082 /clone_end = 3′ | | |
| | /gb = AI674565 /gi = 4875045 /ug = Hs.8379 /len = 563′ | | |
| 50361_at | Cluster Incl. AI658662:tu22a11.x1 Homo sapiens cDNA, | 0.247649714 | 0.007879 |
| | 3 end /clone = IMAGE-2251772 /clone_end = 3′ | | |
| | /gb = AI658662 /gi = 4762232 /ug = Hs.24192 /len = 503′ | | |
| 58288_at | Cluster Incl. W63676:zd30b03.s1 Homo sapiens cDNA, | 0.246615101 | 0.000134 |
| | 3 end /clone = IMAGE-342125 /clone_end = 3′ | | |
| | /gb = W63676 /gi = 1371257 /ug = Hs.15641 /len = 627′ | | |
| 57772_g_a | Cluster Incl. AA886870:oj25g11.s1 Homo sapiens cDNA, | 0.246598396 | 0.00327 |
| | 3 end /clone = IMAGE-1493252 /clone_end = 3′ | | |
| | /gb = AA886870 /gi = 3001978 /ug = Hs.107381 /len = 572′ | | |
| 41955_r_at | Cluster Incl. Z41561:HSCZYA022 Homo sapiens cDNA, | 0.244644274 | 0.000008 |
| | 3 end /clone = c-zya02 /clone_end = 3′ /gb = Z41561 | | |
| | /gi = 567709 /ug = Hs.65739 /len = 251′ | | |
| 57141_f_at | Cluster Incl. AI740811:wg24e02.x1 Homo sapiens cDNA, | 0.244451584 | 0.000034 |
| | 3 end /clone = IMAGE-2366042 /clone_end = 3′ | | |
| | /gb = AI740811 /gi = 5109099 /ug = Hs.23579 /len = 572′ | | |
| 55525_at | Cluster Incl. AI972498:wr38c04.x1 Homo sapiens cDNA, | 0.240971633 | 0.00039 |
| | 3 end /clone = IMAGE-2489958 /clone_end = 3′ | | |
| | /gb = AI972498 /gi = 5769244 /ug = Hs.97469 /len = 546′ | | |
| 47124_at | Cluster Incl. AI672049:ty63b04.x1 Homo sapiens cDNA, | 0.239306276 | 0.022482 |
| | 3 end /clone = IMAGE-2283727 /clone_end = 3′ | | |
| | /gb = AI672049 /gi = 4851780 /ug = Hs.8734 /len = 574′ | | |
| 44606_at | Cluster Incl. AA205873:zq54c06.s1 Homo sapiens cDNA, | 0.238440601 | 0.000031 |
| | 3 end /clone = IMAGE-645418 /clone_end = 3′ | | |
| | /gb = AA205873 /gi = 1801444 /ug = Hs.32807 /len = 528′ | | |
| 51909_at | Cluster Incl. AI130027:qc36c08.x1 Homo sapiens cDNA, | 0.236891013 | 0.007448 |
| | 3 end /clone = IMAGE-1711694 /clone_end = 3′ | | |
| | /gb = AI130027 /gi = 3598541 /ug = Hs.65748 /len = 461′ | | |
| 46691_at | Cluster Incl. AI472143:tj86b02.x1 Homo sapiens cDNA, | 0.236351122 | 0.00165 |
| | 3 end /clone = IMAGE-2148363 /clone_end = 3′ | | |
| | /gb = AI472143 /gi = 4334233 /ug = Hs.92198 /len = 613′ | | |
| 47578_at | Cluster Incl. AA160156:zo81c09.s1 Homo sapiens cDNA, | 0.235200728 | 0.000029 |
| | 3 end /clone = IMAGE-593296 /clone_end = 3′ | | |
| | /gb = AA160156 /gi = 1734749 /ug = Hs.95612 /len = 528′ | | |
| 48476_at | Cluster Incl. AI768887:wh71f02.x1 Homo sapiens cDNA, | 0.23307379 | 0.000002 |
| | 3 end /clone = IMAGE-2386203 /clone_end = 3′ | | |
| | /gb = AI768887 /gi = 5235396 /ug = Hs.21958 /len = 539′ | | |
| 49709_at | Cluster Incl. AA127924:zl13h06.s1 Homo sapiens cDNA, | 0.231365733 | 0.000001 |
| | 3 end /clone = IMAGE-501851 /clone_end = 3′ | | |
| | /gb = AA127924 /gi = 1687231 /ug = Hs.71034 /len = 578′ | | |
| 43412 s_at | Cluster Incl. AA622152:nq56e11.s1 Homo sapiens cDNA, | 0.230949759 | 0.000001 |
| | 3 end /clone = IMAGE-1147916 /clone_end = 3′ | | |
| | /gb = AA622152 /gi = 2526028 /ug = Hs.234262 /len = 414′ | | |
| 56894_at | Cluster Incl. N29070:yx41d02.r1 Homo sapiens cDNA, | 0.229718565 | 0 |
| | 5 end /clone = IMAGE-264291 /clone_end = 5′ | | |
| | /gb = N29070 /gi = 1147306 /ug = Hs.108923 /len = 489′ | | |
| 46927_at | Cluster Incl. AA086045:zl84e03.s1 Homo sapiens cDNA, | 0.229016351 | 0.000019 |
| | 3 end /clone = IMAGE-511324 /clone_end = 3′ | | |
| | /gb = AA086045 /gi = 1629586 /ug = Hs.137313 /len = 518′ | | |
| 47474_at | Cluster Incl. H40296:yn86d03.s1 Homo sapiens cDNA, | 0.228996683 | 0.005309 |
| | 3 end /clone = IMAGE-175301 /clone_end = 3′ | | |
| | /gb = H40296 /gi = 916348 /ug = Hs.127588 /len = 398′ | | |
| 45386_at | Cluster Incl. AI924317:wn55c12.x1 Homo sapiens cDNA, | 0.228351474 | 0.000023 |
| | 3 end /clone = IMAGE-2449366 /clone_end = 3′ | | |
| | /gb = AI924317 /gi = 5660281 /ug = Hs.239375 /len = 490′ | | |
| 47650_at | Cluster Incl. AA397625:zt79d07.r1 Homo sapiens cDNA, | 0.228224396 | 0.001661 |
| | 5 end /clone = IMAGE-728557 /clone_end = 5′ | | |
| | /gb = AA397625 /gi = 2050727 /ug = Hs.163913 /len = 429′ | | |
| 46476_at | Cluster Incl. AA531287:nj09e04.s1 Homo sapiens cDNA, | 0.226386204 | 0.004254 |
| | 3 end /clone = IMAGE-985854 /clone_end = 3′ | | |
| | /gb = AA531287 /gi = 2273993 /ug = Hs.105805 /len = 507′ | | |
| 48050_at | Cluster Incl. AI817448:wk38e01.x1 Homo sapiens cDNA, | 0.225524389 | 0.000145 |
| | 3 end /clone = IMAGE-2417688 /clone end = 3′ | | |
| | /gb = AI817448 /gi = 5436527 /ug = Hs.105421 /len = 572′ | | |
| 49985_at | Cluster Incl. AI917602:wi35g02.x1 Homo sapiens cDNA, | 0.224810828 | 0.00025 |
| | 3 end /clone = IMAGE-2392274 /clone_end = 3′ | | |
| | /gb = AI917602 /gi = 5637457 /ug = Hs.106440 /len = 530′ | | |
| 45747_at | Cluster Incl. AA127810:zk88a10.r1 Homo sapiens cDNA, | 0.218922022 | 0.001011 |
| | 5 end /clone = IMAGE-489882 /clone_end = 5′ | | |
| | /gb = AA127810 /gi = 1687089 /ug = Hs.30376 /len = 619′ | | |
| 52999_at | Cluster Incl. AA126704:zl29b10.s1 Homo sapiens cDNA, | 0.215581442 | 0.007024 |
| | 3 end /clone = IMAGE-503323 /clone_end = 3′ | | |
| | /gb = AA126704 /gi = 1688008 /ug = Hs.50107 /len = 588′ | | |
| 46120_at | Cluster Incl. AA149250:zl26d06.s1 Homo sapiens cDNA, | 0.215193255 | 0.03997 |
| | 3 end /clone = IMAGE-503051 /clone_end = 3′ | | |
| | /gb = AA149250 /gi = 1719966 /ug = Hs.56105 /len = 575′ | | |
| 47928_at | Cluster Incl. AI858054:wj69g04.x1 Homo sapiens cDNA, | 0.215190727 | 0.002954 |
| | 3 end /clone = IMAGE-2408118 /clone_end = 3′ | | |
| | /gb = AI858054 /gi = 5511670 /ug = Hs.165169 /len = 746′ | | |
| 48039_at | Cluster Incl. AI634580:tz30b04.x1 Homo sapiens cDNA, | 0.21474006 | 0.017632 |
| | 3 end /clone = IMAGE-2290063 /clone_end = 3′ | | |
| | /gb = AI634580 /gi = 4685910 /ug = Hs.10339 /len = 686′ | | |
| 43600_at | Cluster Incl. AA100793:zm26c02.s1 Homo sapiens cDNA, | 0.211158214 | 0.001494 |
| | 3 end /clone = IMAGE-526754 /clone_end = 3′ | | |
| | /gb = AA100793 /gi = 1647210 /ug = Hs.193380 /len = 500′ | | |
| 46699_at | Cluster Incl. AI052110:oy30a11.x1 Homo sapiens cDNA, | 0.210882988 | 0.004296 |
| | 3 end /clone = IMAGE-1667324 /clone_end = 3′ | | |
| | /gb = AI052110 /gi = 3308101 /ug = Hs.93961 /len = 567′ | | |
| 46700_at | Cluster Incl. W55956:zc58g06.r1 Homo sapiens cDNA, | 0.210863305 | 0.004741 |
| | 5 end /clone = IMAGE-326554 /clone_end = 5′ | | |
| | /gb = W55956 /gi = 1358060 /ug = Hs.94030 /len = 622′ | | |
| 53011_at | Cluster Incl. AA036952:zk30h01.s1 Homo sapiens cDNA, | 0.210525571 | 0.003777 |
| | 3 end /clone = IMAGE-472081 /clone_end = 3′ | | |
| | /gb = AA036952 /gi = 1510009 /ug = Hs.50841 /len = 571′ | | |
| 45394_s_at | Cluster Incl. AA563933:nk23b02.s1 Homo sapiens cDNA, | 0.209901504 | 0.003068 |
| | 3 end /clone = IMAGE-1014315 /clone_end = 3′ | | |
| | /gb = AA563933 /gi = 2335572 /ug = Hs.239604 /len = 518′ | | |
| 46199_at | Cluster Incl. AI076809:oz01a06.x1 Homo sapiens cDNA, | 0.208199399 | 0.000172 |
| | 3 end /clone = IMAGE-1674034 /clone_end = 3′ | | |
| | /gb = AI076809 /gi = 3404638 /ug = Hs.62472 /len = 516′ | | |
| 59560_at | Cluster Incl. AI669751:tu12g01.x1 Homo sapiens cDNA, | 0.206207696 | 0.000002 |
| | 3 end /clone = IMAGE-2250864 /clone_end = 3′ | | |
| | /gb = AI669751 /gi = 4834525 /ug = Hs.175783 /len = 692′ | | |
| 45207_at | Cluster Incl. N42752:yy11g08.r1 Homo sapiens cDNA, | 0.205356842 | 0.000126 |
| | 5 end /clone = IMAGE-270974 /clone_end = 5′ | | |
| | /gb = N42752 /gi = 1167182 /ug = Hs.42645 /len = 535′ | | |
| 48436_at | Cluster Incl. AI922968:wn66h03.x1 Homo sapiens cDNA, | 0.203844179 | 0.000015 |
| | 3 end /clone = IMAGE-2450453 /clone_end = 3′ | | |
| | /gb = AI922968 /gi = 5659018 /ug = Hs.203485 /len = 498′ | | |
| 48421_at | Cluster Incl. AI990027:ws37c08.x1 Homo sapiens cDNA, | 0.201114358 | 0.000466 |
| | 3 end /clone = IMAGE-2499374 /clone_end = 3′ | | |
| | /gb = AI990027 /gi = 5836908 /ug = Hs.19813 /len = 554′ | | |
| 47982_at | Cluster Incl. AA630981:nq76c07.s1 Homo sapiens cDNA, | 0.1965858 | 0.001398 |
| | 3 end /clone = IMAGE-1158252 /clone_end = 3′ | | |
| | /gb = AA630981 /gi = 2553592 /ug = Hs.174024 /len = 475′ | | |
| 46188_at | Cluster Incl. AI422243:tf58h09.x1 Homo sapiens cDNA, | 0.196273084 | 0.001778 |
| | 3 end /clone = IMAGE-2103521 /clone_end = 3′ | | |
| | /gb = AI422243 /gi = 4268174. /ug = Hs.61762 /len = 593′ | | |
| 52080_at | Cluster Incl. AI864898:wj66d08.x1 Homo sapiens cDNA, | 0.194711313 | 0.003268 |
| | 3 end /clone = IMAGE-2407791 /clone_end = 3′ | | |
| | /gb = AI864898 /gi = 5529005 /ug = Hs.43125 /len = 523′ | | |
| 47123_at | Cluster Incl. AI247543:qh60c07.x1 Homo sapiens cDNA, | 0.194396588 | 0.000008 |
| | 3 end /clone = IMAGE-1849068 /clone_end = 3′ | | |
| | /gb = AI247543 /gi = 3842940 /ug = Hs.87310 /len = 699′ | | |
| 48367_at | Cluster Incl. H62656:yr45a06.r1 Homo sapiens cDNA, | 0.193760977 | 0.000029 |
| | 5 end /clone = IMAGE-208210 /clone_end = 5′ | | |
| | /gb = H62656 /gi = 1017002 /ug = Hs.182670 /len = 504′ | | |
| 43849_s_at | Cluster Incl. AA622570:np21f04.s1 Homo sapiens cDNA, | 0.190479348 | 0.00232 |
| | 3 end /clone = IMAGE-1116991 /clone_end = 3′ | | |
| | /gb = AA622570 /gi = 2526446 /ug = Hs.238528 /len = 461′ | | |
| 58902_r_at | Cluster Incl. R44987:yg33g06.s1 Homo sapiens cDNA, | 0.188238717 | 0.000376 |
| | 3 end /clone = IMAGE-34444 /clone_end = 3′ | | |
| | /gb = R44987 /gi = 824341 /ug = Hs.124207 /len = 481′ | | |
| 48981_at | Cluster Incl. AI954620:wq34c02.x1 Homo sapiens cDNA, | 0.188158824 | 0.000359 |
| | 3 end /clone = IMAGE-2473154 /clone_end = 3′ | | |
| | /gb = AI954620 /gi = 5746930 /ug = Hs.97499 /len = 545′ | | |
| 47605_at | Cluster Incl. AI022657:ox05h04.x1 Homo sapiens cDNA, | 0.187925204 | 0.000006 |
| | 3 end /clone = IMAGE-1655479 /clone_end = 3′ | | |
| | /gb = AI022657 /gi = 3237898 /ug = Hs.97345 /len = 710′ | | |
| 51610_at | Cluster Incl. AI808807:wf97e02.x1 Homo sapiens cDNA, | 0.187409743 | 0.000242 |
| | 3 end /clone = IMAGE-2363546 /clone_end = 3′ | | |
| | /gb = AI808807 /gi = 5395373 /ug = Hs.17404 /len = 538′ | | |
| 47329_at | Cluster Incl. AI092869:qa77c01.x1 Homo sapiens cDNA, | 0.186424395 | 0.000245 |
| | 3 end /clone = IMAGE-1692768 /clone_end = 3′ | | |
| | /gb = AI092869 /gi = 3431845 /ug = Hs.58611 /len = 430′ | | |
| 50648_at | Cluster Incl. AI763136:wi65a06.x1 Homo sapiens cDNA, | 0.184618742 | 0 |
| | 3 end /clone = IMAGE-2398162 /clone_end = 3′ | | |
| | /gb = AI763136 /gi = 5178803 /ug = Hs.165215 /len = 558′ | | |
| 58057_r_at | Cluster Incl. AA009593:ze82f11.s1 Homo sapiens cDNA, | 0.181735047 | 0.000014 |
| | 3 end /clone = IMAGE-365517 /clone_end = 3′ | | |
| | /gb = AA009593 /gi = 1470752 /ug = Hs.103296 /len = 511′ | | |
| 52140_at | Cluster Incl. AL046941:DKFZp586l0717_r1 Homo sapiens cDNA, | 0.181720222 | 0.01492 |
| | 5 end /clone = DKFZp586I0717 /clone_end = 5′ | | |
| | /gb = AL046941 /gi = 5435000 /ug = Hs.46531 /len = 704′ | | |
| 52634_at | Cluster Incl. AW025596:wu75d09.x1 Homo sapiens cDNA, | 0.180172622 | 0.000001 |
| | 3 end /clone = IMAGE-990756 /clone_end = 3′ | | |
| | /gb = AW025596 /gi = 5879126 /ug = Hs.238927 /len = 488′ | | |
| 52742_at | Cluster Incl. AI767756:wh39d09.x1 Homo sapiens cDNA, | 0.179940127 | 0.000009 |
| | 3 end /clone = IMAGE-2383121 /clone_end = 3′ | | |
| | /gb = AI767756 /gi = 5234265 /ug = Hs.82302 /len = 501′ | | |
| 51291_at | Cluster Incl. W91952:zh47f03.r1 Homo sapiens cDNA, | 0.179194305 | 0.001469 |
| | 5 end /clone = IMAGE-415229 /clone_end = 5′ | | |
| | /gb = W91952 /gi = 1424313 /ug = Hs.37331 /len = 594′ | | |
| 48116_at | Cluster Incl. AI096389:qb91f12.x1 Homo sapiens cDNA, | 0.17789649 | 0.000023 |
| | 3 end /clone = IMAGE-1707503 /clone_end = 3′ | | |
| | /gb = AI096389 /gi = 3446300 /ug = Hs.110341 /len = 566′ | | |
| 51122_at | Cluster Incl. AI689756:tx30h05.x1 Homo sapiens cDNA, | 0.177272252 | 0.000009 |
| | 3 end /clone = IMAGE-2271129 /clone_end = 3′ | | |
| | /gb = AI689756 /gi = 4901050 /ug = Hs.26244 /len = 542′ | | |
| 50729_at | Cluster Incl. N39954:yw69f12.r1 Homo sapiens cDNA, | 0.174253817 | 0.000343 |
| | 5 end /clone = IMAGE-257519 /clone_end = 5′ | | |
| | /gb = N39954 /gi = 1163499 /ug = Hs.109012 /len = 531′ | | |
| 53970_at | Cluster Incl. AF150266:AF150266 Homo sapiens cDNA | 0.17406147 | 0.000039 |
| | /clone = CBFBIG05 /gb = AF150266 /gi = 5133702 | | |
| | /ug = Hs.62643 /len = 1425 | | |
| 55697_at | Cluster Incl. AI653211:wb23h04.x1 Homo sapiens cDNA, | 0.173630297 | 0.009509 |
| | 3 end /clone = IMAGE-2306551 /clone_end = 3′ | | |
| | /gb = AI653211 /gi = 4737190 /ug = Hs.96657 /len = 620′ | | |
| 47597_at | Cluster Incl. AL040944:DKFZp434K2415_s1 Homo sapiens cDNA, | 0.173346375 | 0.01163 |
| | 3 end /clone = DKFZp434K2415 /clone_end = 3′ | | |
| | /gb = AL040944 /gi = 5409888 /ug = Hs.96937 /len = 768′ | | |
| 55772_at | Cluster Incl. AI765963:wh69g08.x1 Homo sapiens cDNA, | 0.171422781 | 0.000022 |
| | 3 end /clone = IMAGE-2386046 /clone_end = 3′ | | |
| | /gb = AI765963 /gi = 5232472 /ug = Hs.10299 /len = 518′ | | |
| 43961_s_at | Cluster Incl. AI627648:ty81b09.x1 Homo sapiens cDNA, | 0.171272429 | 0.000004 |
| | 3 end /clone = IMAGE-2285465 /clone_end = 3′ | | |
| | /gb = AI627648 /gi = 4664448 /ug = Hs.26168 /len = 754′ | | |
| 45757_at | Cluster Incl. W73855:zd52f10.r1 Homo sapiens cDNA, | 0.16034244 | 0.000246 |
| | 5 end /clone = IMAGE-344299 /clone_end = 5′ | | |
| | /gb = W73855 /gi = 1384028 /ug = Hs.32343 /len = 677′ | | |
| 48070_at | Cluster Incl. AI743780:wg53g09.x1 Homo sapiens cDNA, | 0.155837517 | 0.000073 |
| | 3 end /clone = IMAGE-2368864 /clone_end = 3′ | | |
| | /gb = AI743780 /gi = 5112068 /ug = Hs.107203 /len = 529′ | | |
| 44392_at | Cluster Incl. H07855:yl86a02.s1 Homo sapiens cDNA, | 0.150341872 | 0.000005 |
| | 3 end /clone = IMAGE-44907 /clone_end = 3′ | | |
| | /gb = H07855 /gi = 872677 /ug = Hs.30604 /len = 430′ | | |
| 50891_at | Cluster Incl. AI768853:wj12f11.x1 Homo sapiens cDNA, | 0.149604741 | 0.00915 |
| | 3 end /clone = IMAGE-2402637 /clone_end = 3′ | | |
| | /gb = AI768853 /gi = 5235362 /ug = Hs.134478 /len = 451′ | | |
| 48486_at | Cluster Incl. AW024960:wu70c08.x1 Homo sapiens cDNA, | 0.149120971 | 0.00082 |
| | 3 end /clone = IMAGE-991041 /clone_end = 3′ | | |
| | /gb = AW024960 /gi = 5878490 /ug = Hs.110945 /len = 806′ | | |
| 52955_at | Cluster Incl. T68813:yc29f09.r1 Homo sapiens cDNA, | 0.148934239 | 0.000064 |
| | 5 end /clone = IMAGE-82121 /clone_end = 5′ | | |
| | /gb = T68813 /gi = 679961 /ug = Hs.11896 /len = 583′ | | |
| 52637_g_a | Cluster Incl. AW025596:wu75d09.x1 Homo sapiens cDNA, | 0.14616299 | 0.00001 |
| | 3 end /clone = IMAGE-990756 /clone_end = 3′ | | |
| | /gb = AW025596 /gi = 5879126 /ug = Hs.238927 /len = 488′ | | |
| 46108_at | Cluster Incl. AI804914:tu43d04.x1 Homo sapiens cDNA, | 0.145421966 | 0.000387 |
| | 3 end /clone = IMAGE-2253799 /clone_end = 3′ | | |
| | /gb = AI804914 /gi = 5391504 /ug = Hs.55565 /len = 535′ | | |
| 54066_at | Cluster Incl. AI356291:qz25h11.x1 Homo sapiens cDNA, | 0.143940201 | 0.000279 |
| | 3 end /clone = IMAGE-2027973 /clone_end = 3′ | | |
| | /gb = AI356291 /gi = 4107912 /ug = Hs.6775 /len = 753′ | | |
| 44113_at | Cluster Incl. U55984:HSU55984 Homo sapiens cDNA | 0.143500649 | 0 |
| | /clone = 37941 /gb = U55984 /gi = 1354540 | | |
| | /ug = Hs.26662 /len = 1147 | | |
| 52049_at | Cluster Incl. AI742029:wg38b07.x1 Homo sapiens cDNA, | 0.141341539 | 0.000017 |
| | 3 end /clone = IMAGE-2367349 /clone_end = 3′ | | |
| | /gb = AI742029 /gi = 5110317 /ug = Hs.4232 /len = 769′ | | |
| 48293_at | Cluster Incl. AI128031:qc42h07.x1 Homo sapiens cDNA, | 0.140884301 | 0.010169 |
| | 3 end /clone = IMAGE-1712317 /clone_end = 3′ | | |
| | /gb = AI128031 /gi = 3596545 /ug = Hs.87383 /len = 503′ | | |
| 45220_at | Cluster Incl. AA150501:zl08g02.s1 Homo sapiens cDNA, | 0.136941145 | 0.000008 |
| | 3 end /clone = IMAGE-491762 /clone_end = 3′ | | |
| | /gb = AA150501 /gi = 1722015 /ug = Hs.43148 /len = 645′ | | |
| 44104_at | Cluster Incl. AL036582:DKFZp564L0462_s1 Homo sapiens cDNA, | 0.135894846 | 0.000009 |
| | 3 end /clone = DKFZp564L0462 /clone_end = 3′ | | |
| | /gb = AL036582 /gi = 5927810 /ug = Hs.25740 /len = 582′ | | |
| 51261_at | Cluster Incl. AI052020:oy29e06.x1 Homo sapiens cDNA, | 0.135142446 | 0.000016 |
| | 3 end /clone = IMAGE-1667266 /clone_end = 3′ | | |
| | /gb = AI052020 /gi = 3308011 /ug = Hs.3593 /len = 757′ | | |
| 52986_at | Cluster Incl. AI743925:wg54f04.x1 Homo sapiens cDNA, | 0.134644236 | 0.000003 |
| | 3 end /clone = IMAGE-2368927 /clone_end = 3′ | | |
| | /gb = AI743925 /gi = 5112213 /ug = Hs.4944 /len = 505′ | | |
| 47328_at | Cluster Incl. AA483389:ne74d10.s1 Homo sapiens cDNA | 0.134567862 | 0.000026 |
| | /clone = IMAGE-910003 /gb = AA483389 /gi = 2212202 | | |
| | /ug = Hs.58566 /len = 486 | | |
| 55924_at | Cluster Incl. AA085776:zk71h10.s1 Homo sapiens cDNA, | 0.130253189 | 0.000015 |
| | 3 end /clone = IMAGE-488323 /clone_end = 3′ | | |
| | /gb = AA085776 /gi = 1629238 /ug = Hs.68784 /len = 633′ | | |
| 56474_at | Cluster Incl. W23068:78H5 Homo sapiens cDNA | 0.128217729 | 0.002301 |
| | /clone = (not-directional) /gb = W23068 /gi = 1299950 | | |
| | /ug = Hs.111676 /len = 627 | | |
| 50607_at | Cluster Incl. R41725:yg11b02.s1 Homo sapiens cDNA, | 0.123861065 | 0.000016 |
| | 3 end /clone = IMAGE-31813 /clone_end = 3′ | | |
| | /gb = R41725 /gi = 817432 /ug = Hs.140852 /len = 437′ | | |
| 55249_at | Cluster Incl. W69365:zd46f09.s1 Homo sapiens cDNA, | 0.122494713 | 0 |
| | 3 end /clone = IMAGE-343721 /clone_end = 3′ | | |
| | /gb = W69365 /gi = 1378676 /ug = Hs.58006 /len = 446′ | | |
| 45684_at | Cluster Incl. AL040936:DKFZp434K1715_s1 Homo sapiens cDNA, | 0.122114371 | 0.000002 |
| | 3 end /clone = DKFZp434K1715 /clone_end = 3′ | | |
| | /gb = AL040936 /gi = 5409880 /ug = Hs.5027 /len = 742′ | | |
| 47385_at | Cluster Incl. AI147256:qb36h11.x1 Homo sapiens cDNA, | 0.121799678 | 0.000003 |
| | 3 end /clone = IMAGE-1698405 /clone_end = 3′ | | |
| | /gb = AI147256 /gi = 3674938 /ug = Hs.61460 /len = 436′ | | |
| 51096_at | Cluster Incl. AL048651:DKFZp564O2171_s1 Homo sapiens cDNA | 0.118284422 | 0.000009 |
| | /clone = DKFZp564O2171 /gb = AL048651 | | |
| | /gi = 4727712 /ug = Hs.25740 /len = 840 | | |
| 47032_at | Cluster Incl. AI885390:wl93c03.x1 Homo sapiens cDNA, | 0.11658742 | 0.000001 |
| | 3 end /clone = IMAGE-2432452 /clone_end = 3′ | | |
| | /gb = AI885390 /gi = 5590554 /ug = Hs.49031 /len = 575′ | | |
| 57685_at | Cluster Incl. Al669815:tu31f07.x1 Homo sapiens cDNA, | 0.114663319 | 0.002628 |
| | 3 end /clone = IMAGE-2252677 /clone_end = 3′ | | |
| | /gb = AI669815 /gi = 4834589 /ug = Hs.129911 /len = 646′ | | |
| 51289_at | Cluster Incl. C00414:HUMGS0005283 Homo sapiens cDNA | 0.114661173 | 0.001594 |
| | /gb = C00414 /gi = 1432644 /ug = Hs.37331 | | |
| | /len = 546 | | |
| 53593_at | Cluster Incl. AI494498:qz01a06.x1 Homo sapiens cDNA, | 0.112799017 | 0 |
| | 3 end /clone = IMAGE-2020210 /clone_end = 3′ | | |
| | /gb = AI494498 /gi = 4395501 /ug = Hs.44685 /len = 450′ | | |
| 55491_at | Cluster Incl. AI081571:ox59h10.s1 Homo sapiens cDNA, | 0.111799777 | 0.000002 |
| | 3 end /clone = IMAGE-1660675 /clone_end = 3′ | | |
| | /gb = AI081571 /gi = 3418363 /ug = Hs.96457 /len = 468′ | | |
| 51939_at | Cluster Incl. AA142913:zl40e07.s1 Homo sapiens cDNA, | 0.111488827 | 0.000898 |
| | 3 end /clone = IMAGE-504420 /clone_end = 3′ | | |
| | /gb = AA142913 /gi = 1712300 /ug = Hs.71721 /len = 572′ | | |
| 51837_at | Cluster Incl. AI916261:wg99d02.x1 Homo sapiens cDNA, | 0.109272217 | 0 |
| | 3 end /clone = IMAGE-2379363 /clone_end = 3′ | | |
| | /gb = AI916261 /gi = 5636116 /ug = Hs.55409 /len = 842′ | | |
| 55278_at | Cluster Incl. AI659657:tu25b10.x1 Homo sapiens cDNA, | 0.103460982 | 0.000001 |
| | 3 end /clone = IMAGE-2252059 /clone_end = 3′ | | |
| | /gb = AI659657 /gi = 4763227 /ug = Hs.58561 /len = 678′ | | |
| 43431_at | Cluster Incl. AW006202:wz93e02.x1 Homo sapiens cDNA, | 0.10274855 | 0.004097 |
| | 3 end /clone = IMAGE-2566394 /clone_end = 3′ | | |
| | /gb = AW006202 /gi = 5854980 /ug = Hs.235162 /len = 539′ | | |
| 46104_at | Cluster Incl. AA772055:ai41e03.s1 Homo sapiens cDNA, | 0.098385581 | 0.000009 |
| | 3 end /clone = 1359580 /clone_end = 3′ | | |
| | /gb = AA772055 /gi = 2823838 /ug = Hs.55314 /len = 504′ | | |
| 51071_at | Cluster Incl. N49836:yz08a11.s1 Homo sapiens cDNA, | 0.096194999 | 0 |
| | 3 end /clone = IMAGE-282428 /clone_end = 3′ | | |
| | /gb = N49836 /gi = 1191002 /ug = Hs.46969 /len = 638′ | | |
| 47929_at | Cluster Incl. AI097310:qb35a09.x1 Homo sapiens cDNA, | 0.083211562 | 0.000054 |
| | 3 end /clone = IMAGE-1698232 /clone_end = 3′ | | |
| | /gb = AI097310 /gi = 3446892 /ug = Hs.165240 /len = 476′ | | |
| 44613_at | Cluster Incl. AI681917:tx50f03.x1 Homo sapiens cDNA, | 0.082599471 | 0.000147 |
| | 3 end /clone = IMAGE-2273021 /clone_end = 3′ | | |
| | /gb = AI681917 /gi = 4892099 /ug = Hs.3321 /len = 711′ | | |
| 46924_at | Cluster Incl. AI824107:wj46c09.x1 Homo sapiens cDNA, | 0.081634712 | 0.000003 |
| | 3 end /clone = IMAGE-2405872 /clone_end = 3′ | | |
| | /gb = AI824107 /gi = 5444778 /ug = Hs.55408 /len = 589′ | | |
| 55436_at | Cluster Incl. AI669212:wc13c10.x1 Homo sapiens cDNA, | 0.069851384 | 0.000001 |
| | 3 end /clone = IMAGE-2315058 /clone_end = 3′ | | |
| | /gb = AI669212 /gi = 4833986 /ug = Hs.92127 /len = 596′ | | |
| 49925_at | Cluster Incl. AI971227:wr26g05.x1 Homo sapiens cDNA, | 0.066652473 | 0.000018 |
| | 3 end /clone = IMAGE-2488856 /clone_end = 3′ | | |
| | /gb = AI971227 /gi = 5768053 /ug = Hs.104266 /len = 545′ | | |
| 54445_at | Cluster Incl. AA531023:nj07e04.s1 Homo sapiens cDNA, | 0.065598325 | 0.000095 |
| | 3 end /clone = IMAGE-985662 /clone_end = 3′ | | |
| | /gb = AA531023 /gi = 2273729 /ug = Hs.59771 /len = 611′ | | |
| 46172_at | Cluster Incl. AI142832:qa26f12.s1 Homo sapiens cDNA, | 0.064763267 | 0 |
| | 3 end /clone = IMAGE-1687919 /clone_end = 3′ | | |
| | /gb = AI142832 /gi = 3659191 /ug = Hs.61232 /len = 571′ | | |
| 54005_at | Cluster Incl. AI082067:oz52f09.x1 Homo sapiens cDNA, | 0.064237546 | 0.000001 |
| | 3 end /clone = IMAGE-1678985 /clone_end = 3′ | | |
| | /gb = AI082067 /gi = 3418859 /ug = Hs.64746 /len = 629′ | | |
| 50877_at | Cluster Incl. AA351682:EST59783 Homo sapiens cDNA, | 0.059597786 | 0.000008 |
| | 3 end /clone = ATCC-152104 /clone_end = 3′ | | |
| | /gb = AA351682 /gi = 2004217 /ug = Hs.12714 /len = 415′ | | |
| 56607_at | Cluster Incl. AA195677:zr32h04.s1 Homo sapiens cDNA, | 0.058208329 | 0.000001 |
| | 3 end /clone = IMAGE-665143 /clone_end = 3′ | | |
| | /gb = AA195677 /gi = 1785355 /ug = Hs.86023 /len = 475′ | | |
| 47119_at | Cluster Incl. AA130221:zl37h09.r1 Homo sapiens cDNA, | 0.044591279 | 0.000022 |
| | 5 end /clone = IMAGE-504161 /clone_end = 5′ | | |
| | /gb = AA130221 /gi = 1691225 /ug = Hs.87013 /len = 595′ | | |
| 47941_at | Cluster Incl. AI540870:PEC1.2_07_G11.r Homo sapiens cDNA, | 0.036240181 | 0.00003 |
| | 5 end /clone_end = 5′ /gb = AI540870 | | |
| | /gi = 4458243 /ug = Hs.16740 /len = 862′ | | |
| 51669_r_at | Cluster Incl, AA583578:nn61c02.s1 Homo sapiens cDNA, | 0.035202429 | 0.000027 |
| | 3 end /clone = IMAGE-1088354 /clone_end = 3′ | | |
| | /gb = AA583578 /gi = 2368187 /ug = Hs.185158 /len = 306′ | | |
| 53747_at | Cluster Incl. AA422178:zv31g07.r1 Homo sapiens cDNA, | 0.034458051 | 0.000093 |
| | 5 end /clone = IMAGE-755292 /clone_end = 5′ | | |
| | /gb = AA422178 /gi = 2101029 /ug = Hs.124660 /len = 503′ | | |
| 51214_at | Cluster Incl. AI378979:tc40d07.x1 Homo sapiens cDNA, | 0.02696214 | 0.0002 |
| | 3 end /clone = IMAGE-2067085 /clone_end = 3′ | | |
| | /gb = AI378979 /gi = 4188832 /ug = Hs.32426 /len = 527′ | | |
| 47448_at | Cluster Incl. R37637:yf61b01.s1 Homo sapiens cDNA, | 0.022494655 | 0.00001 |
| | 3 end /clone = IMAGE-26665 /clone_end = 3′ | | |
| | /gb = R37637. /gi = 795093 /ug = Hs.12286 /len = 460′ | | |
| 46163_at | Cluster Incl. AI692575:wd73h12.x1 Homo sapiens cDNA, | 0.021738726 | 0.000026 |
| | 3 end /clone = IMAGE-2337287 /clone_end = 3′ | | |
| | /gb = AI692575 /gi = 4969915 /ug = Hs.59761 /len = 493′ | | |

[0139] TABLE 4
U95_C Fold Change Genes (>3 over-expressed in Barrett's associated
esophageal adenocarcinoma (BA), <0.33 under-expressed in BA)

| Affy ID | Gene Name | Fold Change | P-value |
|---|---|---|---|
| 64472_at | Cluster Incl. AA877900:nr12g08.s1 Homo sapiens cDNA, | 20.2668142 | 0.000019 |
| | 3 end /clone = IMAGE-1161662 /clone_end = 3′ | | |
| | /gb = AA877900 /gi = 2986865 /ug = Hs.5940 /len = 580′ | | |
| 60504_at | Cluster Incl. AI859849:wm21c04.x1 Homo sapiens cDNA, | 16.18781039 | 0.000015 |
| | 3 end /clone = IMAGE-2436582 /clone_end = 3′ | | |
| | /gb = AI859849 /gi = 5513454 /ug = Hs.184598 /len = 507′ | | |
| 48774_at | Cluster Incl. AA584310:nn79g01.s1 Homo sapiens cDNA, | 13.20890926 | 0.000632 |
| | 3 end /clone = IMAGE-1090128 /clone_end = 3′ | | |
| | /gb = AA584310 /gi = 2368919 /ug = Hs.99769 /len = 582′ | | |
| 65626_at | Cluster Incl. AA059458:zl96g05.r1 Homo sapiens cDNA, | 9.104795333 | 0.000345 |
| | 5 end /clone = IMAGE-512504 /clone_end = 5′ | | |
| | /gb = AA059458 /gi = 1553317 /ug = Hs.28792 /len = 572′ | | |
| 48797_at | Cluster Incl. AI346914:qp59c05.x1 Homo sapiens cDNA, | 8.180270082 | 0.001096 |
| | 3 end /clone = IMAGE-1927304 /clone_end = 3′ | | |
| | /gb = AI346914 /gi = 4084120 /ug = Hs.105484 /len = 725′ | | |
| 61671_at | Cluster Incl. AA194980:zr35f09.r1 Homo sapiens cDNA, | 7.888195657 | 0.000433 |
| | 5 end /clone = IMAGE-665417 /clone_end = 5′ | | |
| | /gb = AA194980 /gi = 1784901 /ug = Hs.30818 /len = 585′ | | |
| 61429_at | Cluster Incl. AI948490:wq06e01.x1 Homo sapiens cDNA, | 7.811425507 | 0.000148 |
| | 3 end /clone = IMAGE-2470488 /clone_end = 3′ | | |
| | /gb = AI948490 /gi = 5740800 /ug = Hs.98765 /len = 617′ | | |
| 57224_s_{—} | Cluster Incl. AI983033:wz30a12.x1 Homo sapiens cDNA, | 7.602018897 | 0.002796 |
| | 3 end /clone = IMAGE-2559550 /clone_end = 3′ | | |
| | /gb = AI983033 /gi = 5810252 /ug = Hs.233739 /len = 456′ | | |
| 61110_at | Cluster Incl. AA679297:zi28c04.s1 Homo sapiens cDNA, | 7.48284531 | 0.000022 |
| | 3 end /clone = IMAGE-432102 /clone_end = 3′ | | |
| | /gb = AA679297 /gi = 2659819 /ug = Hs.234505 /len = 564′ | | |
| 63382_at | Cluster Incl. AI073984:oy66c05.x1 Homo sapiens cDNA, | 7.482353067 | 0.000367 |
| | 3 end /clone = IMAGE-1670792 /clone_end = 3′ | | |
| | /gb = AI073984 /gi = 3400628 /ug = Hs.14453 /len = 585′ | | |
| 65744_at | Cluster Incl. W58252:zd25d01.r1 Homo sapiens cDNA, | 7.461285225 | 0.000186 |
| | 5 end /clone = IMAGE-341665 /clone_end = 5′ | | |
| | /gb = W58252 /gi = 1365194 /ug = Hs.182793 /len = 614′ | | |
| 60585_at | Cluster Incl. N63181:yz85d07.s1 Homo sapiens cDNA, | 7.363840433 | 0.000614 |
| | 3 end /clone = IMAGE-289837 /clone_end = 3′ | | |
| | /gb = N63181 /gi = 1211010 /ug = Hs.48729 /len = 479′ | | |
| 51129_s_{—} | Cluster Incl. AI436136:ti15h07.y1 Homo sapiens cDNA, | 7.144984025 | 0.001259 |
| | 5 end /clone = IMAGE-2130589 /clone_end = 5′ | | |
| | /gb = AI436136 /gi = 4308073 /ug = Hs.237278 /len = 525′ | | |
| 48777_at | Cluster Incl. N23796:yx36a10.r1 Homo sapiens cDNA, | 7.055961732 | 0.001113 |
| | 5 end /clone = IMAGE-263802 /clone_end = 5′ | | |
| | /gb = N23796 /gi = 1137946 /ug = Hs.100132 /len = 573′ | | |
| 52429_at | Cluster Incl. AA583350:nn45h04.s1 Homo sapiens cDNA, | 7.004425205 | 0.001398 |
| | 3 end /clone = IMAGE-1086871 /clone_end = 3′ | | |
| | /gb = AA583350 /gi = 2367959 /ug = Hs.30701 /len = 494′ | | |
| 65264_at | Cluster Incl. AI306471:qn13b01.x1 Homo sapiens cDNA, | 6.697303594 | 0.000258 |
| | 3 end /clone = IMAGE-1898089 /clone_end = 3′ | | |
| | /gb = AI306471 /gi = 3989542 /ug = Hs.151334 /len = 397′ | | |
| 64408_s_{—} | Cluster Incl. AW025529:wu97d12.x1 Homo sapiens cDNA, | 6.635144195 | 0.000009 |
| | 3 end /clone = IMAGE-990954 /clone_end = 3′ | | |
| | /gb = AW025529 /gi = 5879059 /ug = Hs.47536 /len = 661′ | | |
| 63335_at | Cluster Incl. AI285531:qu49b04.x1 Homo sapiens cDNA, | 6.550211507 | 0.000055 |
| | 3 end /clone = IMAGE-1968079 /clone_end = 3′ | | |
| | /gb = AI285531 /gi = 3923764 /ug = Hs.106260 /len = 598′ | | |
| 65963_at | Cluster Incl. W72043:zd66d01.s1 Homo sapiens cDNA, | 6.462494702 | 0.000108 |
| | 3 end /clone = IMAGE-345601 /clone_end = 3′ | | |
| | /gb = W72043 /gi = 1382313 /ug = Hs.84628 /len = 604′ | | |
| 50926_s_{—} | Cluster Incl. R54585:yg81f12.s1 Homo sapiens cDNA, | 6.26291301 | 0.001886 |
| | 3 end /clone = IMAGE-39892 /clone_end = 3′ | | |
| | /gb = R54585 /gi = 816487 /ug = Hs.233799 /len = 493′ | | |
| 49102_at | Cluster Incl. AA670193:af51d07.s1 Homo sapiens cDNA, | 6.242787256 | 0.002755 |
| | 3 end /clone = 1035181 /clone_end = 3′ | | |
| | /gb = AA670193 /gi = 2631692 /ug = Hs.8687 /len = 599′ | | |
| 57830_s_{—} | Cluster Incl. AW024474:wu76h03.x1 Homo sapiens cDNA, | 6.116453605 | 0.009079 |
| | 3 end /clone = IMAGE-990888 /clone_end = 3′ | | |
| | /gb = AW024474 /gi = 5878004 /ug = Hs.236884 /len = 229′ | | |
| 62959_at | Cluster Incl. AA204719:zq84c03.s1 Homo sapiens cDNA, | 5.981172544 | 0.000101 |
| | 3 end /clone = IMAGE-648292 /clone_end = 3′ | | |
| | /gb = AA204719 /gi = 1802700 /ug = Hs.86327 /len = 576′ | | |
| 62952_at | Cluster Incl. AA480075:zv42b06.r1 Homo sapiens cDNA, | 5.866713492 | 0.000011 |
| | 5 end /clone = IMAGE-756275 /clone_end = 5′ | | |
| | /gb = AA480075 /gi = 2208226 /ug = Hs.85015 /len = 588′ | | |
| 65792_at | Cluster Incl. AA526079:ni94d02.s1 Homo sapiens cDNA, | 5.682858552 | 0.002038 |
| | 3 end /clone = IMAGE-984483 /clone_end = 3′ | | |
| | /gb = AA526079 /gi = 2268148 /ug = Hs.234180 /len = 551′ | | |
| 65128_at | Cluster Incl. AI915649:wg74a06.x1 Homo sapiens cDNA, | 5.678364543 | 0.000005 |
| | 3 end /clone = IMAGE-2370802 /clone_end = 3′ | | |
| | /gb = AI915649 /gi = 5635558 /ug = Hs.11638 /len = 716′ | | |
| 57223_at | Cluster Incl. AI982768:wu16a03.x1 Homo sapiens cDNA, | 5.672386526 | 0.000027 |
| | 3 end /clone = IMAGE-2517100 /clone_end = 3′ | | |
| | /gb = AI982768 /gi = 5809987 /ug = Hs.233732 /len = 292′ | | |
| 55210_at | Cluster Incl. AI394117:tg21g11.x1 Homo sapiens cDNA, | 5.644425711 | 0.001741 |
| | 3 end /clone = IMAGE-2109476 /clone_end = 3′ | | |
| | /gb = AI394117 /gi = 4223664 /ug = Hs.156339 /len = 251′ | | |
| 56599_i_a | Cluster Incl. AI005676:ov59f10.s1 Homo sapiens cDNA, | 5.45726309 | 0.010029 |
| | 3 end /clone = IMAGE-1641643 /clone_end = 3′ | | |
| | /gb = AI005676 /gi = 3215186 /ug = Hs.237762 /len = 491′ | | |
| 57084_s_{—} | Cluster Incl. AW009817:ws87h04.x1 Homo sapiens cDNA, | 5.442500182 | 0.03874 |
| | 3 end /clone = IMAGE-2504983 /clone_end = 3′ | | |
| | /gb = AW009817 /gi = 5858595 /ug = Hs.236097 /len = 440′ | | |
| 65339_r_a | Cluster Incl:AA004528:zh91a09.s1 Homo sapiens cDNA, | 5.431448971 | 0.000043 |
| | 3 end /clone = IMAGE-428632 /clone_end = 3′ | | |
| | /gb = AA004528 /gi = 1448105 /ug = Hs.169444 /len = 415′ | | |
| 64246_at | Cluster Incl. AI660247:we68h08.x1 Homo sapiens cDNA, | 5.427125242 | 0.000386 |
| | 3 end /clone = IMAGE-2346303 /clone_end = 3′ | | |
| | /gb = AI660247 /gi = 4763817 /ug = Hs.32699 /len = 601′ | | |
| 65155_at | Cluster Incl. AA707308:zj27a11.s1 Homo sapiens cDNA, | 5.423294999 | 0.000008 |
| | 3 end /clone = 451484 /clone_end = 3′ | | |
| | /gb = AA707308 /gi = 2717226 /ug = Hs.12369 /len = 566′ | | |
| 63307_at | Cluster Incl. AL041566:DKFZp434l0217_s1 Homo sapiens cDNA, | 5.414527108 | 0.000272 |
| | 3 end /clone = DKFZp434I0217 /clone_end = 3′ | | |
| | /gb = AL041566 /gi = 5420916 /ug = Hs.100747 /len = 715′ | | |
| 51758_s_{—} | Cluster Incl. N21439:yx58f02.s1 Homo sapiens cDNA, | 5.412633228 | 0.000095 |
| | 3 end /clone = IMAGE-265947 /clone_end = 3′ | | |
| | /gb = N21439 /gi = 1126609 /ug = Hs.238941 /len = 510′ | | |
| 48744_g_{—} | Cluster Incl. AA612678:nq25e10.s1 Homo sapiens cDNA, | 5.282186627 | 0.000486 |
| | 3 end /clone = IMAGE-1144938 /clone_end = 3′ | | |
| | /gb = AA612678 /gi = 2463716 /ug = Hs.95583 /len = 565′ | | |
| 64740_at | Cluster Incl. AA470369:ne10a12.s1 Homo sapiens cDNA, | 5.272312377 | 0.00136 |
| | 3 end /clone = IMAGE-880798 /clone_end = 3′ | | |
| | /gb = AA470369 /gi = 2197678 /ug = Hs.72115 /len = 708′ | | |
| 65516_at | Cluster Incl. AA883422:am25a05.s1 Homo sapiens cDNA, | 5.212802857 | 0.005655 |
| | 3 end /clone = IMAGE-1467824 /clone_end = 3′ | | |
| | /gb = AA883422 /gi = 2992952 /ug = Hs.18791 /len = 714′ | | |
| 60071_s_{—} | Cluster Incl. AI961907:wt40f10.x1 Homo sapiens cDNA, | 5.197556431 | 0.000125 |
| | 3 end /clone = IMAGE-2509963 /clone_end = 3′ | | |
| | /gb = AI961907 /gi = 5754620 /ug = Hs.239230 /len = 448′ | | |
| 65883_at | Cluster Incl. AI954159:wx80e01.x1 Homo sapiens cDNA, | 5.022448143 | 0.003175 |
| | 3 end /clone = IMAGE-2549976 /clone_end = 3′ | | |
| | /gb = AI954159 /gi = 5746469 /ug = Hs.47622 /len = 534′ | | |
| 63927_f_a | Cluster Incl. AI963642:wr64b03.x1 Homo sapiens cDNA, | 4.776630548 | 0.000532 |
| | 3 end /clone = IMAGE-2492429 /clone_end = 3′ | | |
| | /gb = AI963642 /gi = 5756281 /ug = Hs.231969 /len = 577′ | | |
| 63673_at | Cluster Incl. AI635057:tz03g09.x1 Homo sapiens cDNA, | 4.699661783 | 0.016394 |
| | 3 end /clone = IMAGE-2287552 /clone_end = 3′ | | |
| | /gb = AI635057 /gi = 4686387 /ug = Hs.200030 /len = 703′ | | |
| 62565_at | Cluster Incl. W21872:57h7 Homo sapiens cDNA | 4.639766922 | 0.001581 |
| | /clone = (not-directional) /gb = W21872 /gi = 1298705 | | |
| | /ug = Hs.7907 /len = 773 | | |
| 65015_at | Cluster Incl. AI092131:qa59g12.s1 Homo sapiens cDNA, | 4.631614099 | 0.00018 |
| | 3 end /clone = IMAGE-1691110 /clone_end = 3′ | | |
| | /gb = AI092131 /gi = 3431125 /ug = Hs.11210 /len = 529′ | | |
| 61881_at | Cluster Incl. AA675917:e03503f Homo sapiens cDNA, | 4.514486314 | 0.000292 |
| | 3 end /clone = e03503 /clone_end = 3′ | | |
| | /gb = AA675917 /gi = 2775264 /ug = Hs.120912 /len = 787′ | | |
| 65645_at | Cluster Incl. AI675886:wc06f12.x1 Homo sapiens cDNA, | 4.50874656 | 0.000061 |
| | 3 end /clone = IMAGE-2314415 /clone_end = 3′ | | |
| | /gb = AI675886 /gi = 4876366 /ug = Hs.30299 /len = 590′ | | |
| 65578_at | Cluster Incl. AI817147:wg62c06.x1 Homo sapiens cDNA, | 4.446160162 | 0.000109 |
| | 3 end /clone = IMAGE-2369674 /clone_end = 3′ | | |
| | /gb = AI817147 /gi = 5436226 /ug = Hs.238105 /len = 763′ | | |
| 59510_at | Cluster Incl. AI832076:td12b02.x1 Homo sapiens cDNA, | 4.330867004 | 0.001152 |
| | 3 end /clone = IMAGE-2075403 /clone_end = 3′ | | |
| | /gb = AI832076 /gi = 5452747 /ug = Hs.127305 /len = 734′ | | |
| 54839_at | Cluster Incl. N51702:yy72d03.s1 Homo sapiens cDNA, | 4.278675286 | 0.040746 |
| | 3 end /clone = IMAGE-279077 /clone_end = 3′ | | |
| | /gb = N51702 /gi = 1192868 /ug = Hs.101392 /len = 514′ | | |
| 63596_f_a | Cluster Incl. AI983633:wt50b06.x1 Homo sapiens cDNA, | 4.226128442 | 0.000841 |
| | 3 end /clone = IMAGE-2510867 /clone_end = 3′ | | |
| | /gb = AI983633 /gi = 5810852 /ug = Hs.233757 /len = 610′ | | |
| 64504_r_a | Cluster Incl. AA868136:ak45g12.s1 Homo sapiens cDNA, | 4.175057561 | 0.001777 |
| | 3 end /clone = IMAGE-1408966 /clone_end = 3′ | | |
| | /gb = AA868136 /gi = 2963581 /ug = Hs.238884 /len = 306′ | | |
| 62240_at | Cluster Incl. AI096692:qb91b06.x1 Homo sapiens cDNA, | 4.173231366 | 0.000007 |
| | 3 end /clone = IMAGE-1707443 /clone_end = 3′ | | |
| | /gb = AI096692 /gi = 3446186 /ug = Hs.157461 /len = 447′ | | |
| 62467_at | Cluster Incl. W63576:zc55h09.r1 Homo sapiens cDNA, | 4.112846813 | 0.000093 |
| | 5 end /clone = IMAGE-326273 /clone_end = 5′ | | |
| | /gb = W63576 /gi = 1371149 /ug = Hs.58093 /len = 604′ | | |
| 54444_at | Cluster Incl. AA862350:og94c06.s1 Homo sapiens cDNA, | 4.090071897 | 0.004216 |
| | 3 end /clone = IMAGE-1455946 /clone_end = 3′ | | |
| | /gb = AA862350 /gi = 2954829 /ug = Hs.96151 /len = 590′ | | |
| 64454_at | Cluster Incl. AI805943:te52h02.x1 Homo sapiens cDNA, | 4.013492489 | |
| | 3 end /clone = IMAGE-2090355 /clone_end = 3′ | | |
| | /gb = AI805943 /gi = 5392509 /ug = Hs.5723 /len = 772′ | | |
| 64702_at | Cluster Incl. AI809005:wf67f06.x1 Homo sapiens cDNA, | 4.009878713 | 0.000142 |
| | 3 end /clone = IMAGE-2360675 /clone_end = 3′ | | |
| | /gb = AI809005 /gi = 5395571 /ug = Hs.50883 /len = 596′ | | |
| 61943_at | Cluster Incl. AI262104:qz28d10.y1 Homo sapiens cDNA, | 3.992422378 | 0.000194 |
| | 5 end /clone = IMAGE-2028211 /clone_end = 5′ | | |
| | /gb = AI262104 /gi = 3870307 /ug = Hs.140932 /len = 523′ | | |
| 62695_at | Cluster Incl. AA502331:ne26h06.s1 Homo sapiens cDNA, | 3.975578279 | 0.009789 |
| | 3 end /clone = IMAGE-898523 /clone_end = 3′ | | |
| | /gb = AA502331 /gi = 2237298 /ug = Hs.15951 /len = 534′ | | |
| 64514_at | Cluster Incl. AI811865:tw45f01.x1 Homo sapiens cDNA, | 3.900924095 | 0.003286 |
| | 3 end /clone = IMAGE-2262649 /clone_end = 3′ | | |
| | /gb = AI811865 /gi = 5398431 /ug = Hs.239080 /len = 401′ | | |
| 60860_f_a | Cluster Incl. AI086805:oz57e06.x1 Homo sapiens cDNA, | 3.889966281 | 0.003683 |
| | 3 end /clone = IMAGE-1679458 /clone_end = 3′ | | |
| | /gb = AI086805 /gi = 3425228 /ug = Hs.233789 /len = 420′ | | |
| 65690_at | Cluster Incl. AI091277:ow62b07.x1 Homo sapiens cDNA, | 3.881822704 | 0.002192 |
| | 3 end /clone = IMAGE-1651381 /clone_end = 3′ | | |
| | /gb = AI091277 /gi = 3430336 /ug = Hs.32659 /len = 692′ | | |
| 60082_s_{—} | Cluster Incl. AI991395:ws09f02.x1 Homo sapiens cDNA, | 3.80225973 | 0.008484 |
| | 3 end /clone = IMAGE-2496699 /clone_end = 3′ | | |
| | /gb = AI991395 /gi = 5838300 /ug = Hs.239944 /len = 300′ | | |
| 64735_at | Cluster Incl. AI684745:wa85f09.x1 Homo sapiens cDNA, | 3.799796162 | 0.031697 |
| | 3 end /clone = IMAGE-2302985 /clone_end = 3′ | | |
| | /gb = AI684745 /gi = 4896039 /ug = Hs.6952 /len = 652′ | | |
| 65139_at | Cluster Incl. AI925240:wn52d12.x1 Homo sapiens cDNA, | 3.79978649 | 0.00067 |
| | 3 end /clone = IMAGE-2449079 /clone_end = 3′ | | |
| | /gb = AI925240 /gi = 5661204 /ug = Hs.118983 /len = 494′ | | |
| 64742_at | Cluster Incl. AI638445:tt07a10.x1 Homo sapiens cDNA, | 3.799745386 | 0.038879 |
| | 3 end /clone = IMAGE-2240058 /clone_end = 3′ | | |
| | /gb = AI638445 /gi = 4690679 /ug = Hs.72484 /len = 718′ | | |
| 60797_at | Cluster Incl:AI076180:oz01f06.x1 Homo sapiens cDNA, | 3.77504304 | 0.005248 |
| | 3 end /clone = IMAGE-1674083 /clone_end = 3′ | | |
| | /gb = AI076180 /gi = 3405358 /ug = Hs.214410 /len = 603′ | | |
| 64258_f_a | Cluster Incl. AW016235:UI-H-BI0p-abl-a-06-0-UI.s1 Homo sapiens cDNA, | 3.774669144 | 0.002065 |
| | 3 end /clone = IMAGE-2712083 /clone_end = 3′ | | |
| | /gb = AW016235 /gi = 5864992 /ug = Hs.234283 /len = 438′ | | |
| 65572_at | Cluster Incl. AI635827:tz81d05.x1 Homo sapiens cDNA, | 3.740835788 | 0.016428 |
| | 3 end /clone = IMAGE-2294985 /clone_end = 3′ | | |
| | /gb = AI635827 /gi = 4687157 /ug = Hs.23723 /len = 709′ | | |
| 48664_at | Cluster Incl. AI762879:wi63d05.x1 Homo sapiens cDNA, | 3.728590312 | 0.00008 |
| | 3 end /clone = IMAGE-2397993 /clone_end = 3′ | | |
| | /gb = AI762879 /gi = 5178546 /ug = Hs.86437 /len = 604′ | | |
| 61126_at | Cluster Incl. N22262:yw36c04.s1 Homo sapiens cDNA, | 3.726525355 | 0.000113 |
| | 3 end /clone = IMAGE-254310 /clone_end = 3′ | | |
| | /gb = N22262 /gi = 1128396 /ug = Hs.30779 /len = 447′ | | |
| 63994_i_a | Cluster Incl. AW006898:ws15g04.x1 Homo sapiens cDNA, | 3.685571992 | 0.020562 |
| | 3 end /clone = IMAGE-2497302 /clone_end = 3′ | | |
| | /gb = AW006898 /gi = 5855676 /ug = Hs.234094 /len = 228′ | | |
| 62997_at | Cluster Incl. AI972895:wr44h09.x1 Homo sapiens cDNA, | 3.675466573 | 0.006908 |
| | 3 end /clone = IMAGE-2490593 /clone_end = 3′ | | |
| | /gb = AI972895 /gi = 5769721 /ug = Hs.91226 /len = 594′ | | |
| 51097_at | Cluster Incl. AW003232:wq64c12.x1 Homo sapiens cDNA, | 3.647036307 | 0.003288 |
| | 3 end /clone = IMAGE-2476054 /clone_end = 3′ | | |
| | /gb = AW003232 /gi = 5850148 /ug = Hs.236518 /len = 683′ | | |
| 58825_at | Cluster Incl. AI701911:tq19f05.x1 Homo sapiens cDNA, | 3.636855749 | 0.009978 |
| | 3 end /clone = IMAGE-2209281 /clone_end = 3′ | | |
| | /gb = AI701911 /gi = 4989811 /ug = Hs.236455 /len = 431′ | | |
| 50183_at | Cluster Incl. AI347165:tc04d10.x1 Homo sapiens cDNA, | 3.626154256 | 0.005991 |
| | 3 end /clone = IMAGE-2062867 /clone_end = 3′ | | |
| | /gb = AI347165 /gi = 4084371 /ug = Hs.71561 /len = 535′ | | |
| 65797_at | Cluster Incl. AA127736:zk88c12.r1 Homo sapiens cDNA, | 3.610269552 | 0.001966 |
| | 5 end /clone = IMAGE-489910 /clone_end = 5′ | | |
| | /gb = AA127736 /gi = 1687099 /ug = Hs.237523 /len = 616′ | | |
| 53261_at | Cluster Incl. AI337231:qx83h10.x1 Homo sapiens cDNA, | 3.583182611 | 0.000578 |
| | 3 end /clone = IMAGE-2009155 /clone_end = 3′ | | |
| | /gb = AI337231 /gi = 4074158 /ug = Hs.50115 /len = 484′ | | |
| 62536_at | Cluster Incl. AA527180:ni20b09.s1 Homo sapiens cDNA, | 3.56570974 | 0.001133 |
| | 3 end /clone = IMAGE-968537 /clone_end = 3′ | | |
| | /gb = AA527180 /gi = 2269249 /ug = Hs.67928 /len = 577′ | | |
| 56784_at | Cluster Incl. AI016894:ou31c06.x1 Homo sapiens cDNA, | 3.557237251 | 0.001861 |
| | 3 end /clone = IMAGE-1627882 /clone_end = 3′ | | |
| | /gb = AI016894 /gi = 3231230 /ug = Hs.45204 /len = 431′ | | |
| 57027_at | Cluster Incl. AI990405:ws20h10.x1 Homo sapiens cDNA, | 3.547382938 | 0.00167 |
| | 3 end /clone = IMAGE-2497795 /clone_end = 3′ | | |
| | /gb = AI990405 /gi = 5837286 /ug = Hs.233881 /len = 481′ | | |
| 61638_at | Cluster Incl. AA700160:zj36h03.s1 Homo sapiens cDNA, | 3.543445756 | 0.000324 |
| | 3 end /clone = 452405 /clone_end = 3′ | | |
| | /gb = AA700160 /gi = 2703123 /ug = Hs.28564 /len = 502′ | | |
| 60950_f_a | Cluster Incl. AA741117:nz04f09.s1 Homo sapiens cDNA | 3.543004523 | 0.000039 |
| | /clone = IMAGE-1286825 /gb = AA741117 /gi = 2779709 | | |
| | /ug = Hs.78684 /len = 466 | | |
| 62950_at | Cluster Incl. W84421:zd89g04.s1 Homo sapiens cDNA, | 3.487421091 | 0.000644 |
| | 3 end /clone = IMAGE-356694 /clone_end = 3′ | | |
| | /gb = W84421 /gi = 1395562 /ug = Hs.83992 /len = 648′ | | |
| 58848_at | Cluster Incl. AI809489:wf30b04.x1 Homo sapiens cDNA, | 3.471887883 | 0.007471 |
| | 3 end /clone = IMAGE-2357071 /clone_end = 3′ | | |
| | /gb = AI809489 /gi = 5396055 /ug = Hs.236580 /len = 787′ | | |
| 64274_at | Cluster Incl. AI766469:wi41a06.x1 Homo sapiens cDNA, | 3.471012959 | 0.020051 |
| | 3 end /clone = IMAGE-2392786 /clone_end = 3′ | | |
| | /gb = AI766469 /gi = 5232978 /ug = Hs.234483 /len = 337′ | | |
| 55678_at | Cluster Incl. W72885:zd59d05.s1 Homo sapiens cDNA, | 3.422525993 | 0.00455 |
| | 3 end /clone = IMAGE-344937 /clone_end = 3′ | | |
| | /gb = W72885 /gi = 1383020 /ug = Hs.237652 /len = 424′ | | |
| 62743_at | Cluster Incl. AA811088:oa85c12.s1 Homo sapiens cDNA | 3.399387119 | 0.011542 |
| | /clone = IMAGE-1319062 /gb = AA811088 /gi = 2880699 | | |
| | /ug = Hs.172581 /len = 571 | | |
| 65492_at | Cluster Incl. N56950:yy82g06.s1 Homo sapiens cDNA, | 3.365968673 | 0.00226 |
| | 3 end /clone = IMAGE-280090 /clone_end = 3′ | | |
| | /gb = N56950 /gi = 1200840 /ug = Hs.172241 /len = 602′ | | |
| 64144_at | Cluster Incl. AW026010:wv05e09.x1 Homo sapiens cDNA, | 3.358826512 | 0.000172 |
| | 3 end /clone = IMAGE-990875 /clone_end = 3′ | | |
| | /gb = AW026010 /gi = 5879540 /ug = Hs.239812 /len = 580′ | | |
| 58636_f_a | Cluster Incl. R33841:yh82a10.s1 Homo sapiens cDNA, | 3.356616113 | 0.00199 |
| | 3 end /clone = IMAGE-136218 /clone_end = 3′ | | |
| | /gb = R33841 /gi = 789699 /ug = Hs.175011 /len = 400′ | | |
| 49146_at | Cluster Incl. AA305101:EST176103 Homo sapiens cDNA, | 3.33565472 | 0.020805 |
| | 5 end /clone = ATCC-128591 /clone_end = 5′ | | |
| | /gb = AA305101 /gi = 1957429 /ug = Hs.107614 /len = 547′ | | |
| 60006_at | Cluster Incl. AI816780:wj34a09.x1 Homo sapiens cDNA, | 3.315740997 | 0.019201 |
| | 3 end /clone = IMAGE-2404696 /clone_end = 3′ | | |
| | /gb = AI816780 /gi = 5435859 /ug = Hs.15088 /len = 499′ | | |
| 48773_at | Cluster Incl. AA642981:nr60h11.s1 Homo sapiens cDNA, | 3.313599312 | 0.004231 |
| | 3 end /clone = IMAGE-1172421 /clone_end = 3′ | | |
| | /gb = AA642981 /gi = 2568199 /ug = Hs.9960 /len = 563′ | | |
| 53789_at | Cluster Incl. AI866583:tz51d04.x1 Homo sapiens cDNA, | 3.313016769 | 0.001358 |
| | 3 end /clone = IMAGE-2292103 /clone_end = 3′ | | |
| | /gb = AI866583 /gi = 5530690 /ug = Hs.74921 /len = 479′ | | |
| 66186_at | Cluster Incl. Z41019:HSC2MC092 Homo sapiens cDNA, | 3.303305427 | 0.000884 |
| | 3 end /clone = c-2mc09 /clone_end = 3′ | | |
| | /gb = Z41019 /gi = 566764 /ug = Hs.113530 /len = 317′ | | |
| 63800_at | Cluster Incl. AA195158:zr35f06.r1 Homo sapiens cDNA, | 3.293703299 | 0.000004 |
| | 5 end /clone = IMAGE-665411 /clone_end = 5′ | | |
| | /gb = AA1951587gi = 1784847 /ug = Hs.204154 /len = 723′ | | |
| 50202_s_{—} | Cluster Incl. AA917667:on46d02.s1 Homo sapiens cDNA, | 3.28918373 | 0.001767 |
| | 3 end /clone = IMAGE-1559715 /clone_end = 3′ | | |
| | /gb = AA917667 /gi = 3057557 /ug = Hs.77365 /len = 562′ | | |
| 66585_at | Cluster Incl. AA879466:oj91h03.s1 Homo sapiens cDNA, | 3.285845033 | 0.019475 |
| | 3 end /clone = IMAGE-1505717 /clone_end = 3′ | | |
| | /gb = AA879466 /gi = 2988577 /ug = Hs.125427 /len = 416′ | | |
| 61448_at | Cluster Incl. AA766126:oa27f10.s1 Homo sapiens cDNA | 3.275425186 | 0.000966 |
| | /clone = IMAGE-1306219 /gb = AA766126 /gi = 2817364 | | |
| | /ug = Hs.99338 /len = 398 | | |
| 63124_at | Cluster Incl. AA631399:np86e09.s1 Homo sapiens cDNA | 3.274156292 | 0.001603 |
| | /clone = IMAGE-1133224 /gb = AA631399 /gi = 2554010 | | |
| | /ug = Hs.191512 /len = 457 | | |
| 57034_at | Cluster Incl. AW003626:wx34e02.x1 Homo sapiens cDNA, | 3.255247904 | 0.020433 |
| | 3 end /clone = IMAGE-2545562 /clone end = 3′ | | |
| | /gb = AW003626 /gi = 5850542 /ug = Hs.234018 /len = 707′ | | |
| 49633_at | Cluster Incl. N21131:yx52g04.s1 Homo sapiens cDNA, | 3.253214384 | 0.014949 |
| | 3 end /clone = IMAGE-265398 /clone_end = 3′ | | |
| | /gb = N21131 /gi = 1126301 /ug = Hs.233612 /len = 571′ | | |
| 60314_at | Cluster Incl. AI014820:ot87f01.s1 Homo sapiens cDNA, | 3.249891116 | 0.001175 |
| | 3 end /clone = IMAGE-1623769 /clone_end = 3′ | | |
| | /gb = AI014820 /gi = 3229156 /ug = Hs.131756 /len = 311′ | | |
| 48746_at | Cluster Incl. AA527237:ng35e09.s1 Homo sapiens cDNA, | 3.24979003 | 0.016432 |
| | 3 end /clone = IMAGE-936808 /clone_end = 3′ | | |
| | /gb = AA527237 /gi = 2269306 /ug = Hs.95583 /len = 496′ | | |
| 61941_at | Cluster Incl. AI701037:we09h11.x1 Homo sapiens cDNA, | 3.247978145 | 0.004021 |
| | 3 end /clone = IMAGE-2340645 /clone_end = 3′ | | |
| | /gb = AI701037 /gi = 4988937 /ug = Hs.139784 /len = 586′ | | |
| 61664_r_a | Cluster Incl. AI859398:wm11a08.x1 Homo sapiens cDNA, | 3.236515692 | 0.008108 |
| | 3 end /clone = IMAGE-2435606 /clone_end = 3′ | | |
| | /gb = AI859398 /gi = 5513014 /ug = Hs.3046 /len = 518′ | | |
| 65443_at | Cluster Incl. AA085711:zl83c09.s1 Homo sapiens cDNA, | 3.236087458 | 0.018668 |
| | 3 end /clone = IMAGE-511216 /clone_end = 3′ | | |
| | /gb = AA085711 /gi = 1629467 /ug = Hs.15125 /len = 630′ | | |
| 59134_at | Cluster Incl. AA947258:od86c08.s1 Homo sapiens cDNA | 3.223980919 | 0.002204 |
| | /clone = IMAGE-1374830 /gb = AA947258 /gi = 3108511 | | |
| | /ug = Hs.127703 /len = 277 | | |
| 62214_at | Cluster Incl. AI583960:ts08g12.x1 Homo sapiens cDNA, | 3.15598437 | 0.021671 |
| | 3 end /clone = IMAGE-2228038 /clone_end = 3′ | | |
| | /gb = AI583960 /gi = 4569857 /ug = Hs.55918 /len = 1056′ | | |
| 48666_at | Cluster Incl. AA902949:ok43h08.s1 Homo sapiens cDNA, | 3.152741137 | 0.002793 |
| | 3 end /clone = IMAGE-1516767 /clone_end = 3′ | | |
| | /gb = AA902949 /gi = 3038072 /ug = Hs.86489 /len = 546′ | | |
| 64388_at | Cluster Incl. AI685200:wc70b09.x1 Homo sapiens cDNA, | 3.120427707 | 0.001253 |
| | 3 end /clone = IMAGE-2323961 /clone_end = 3′ | | |
| | /gb = AI685200 /gi = 4896494 /ug = Hs.44155 /len = 652′ | | |
| 62602_at | Cluster Incl. AA418402:zv92f02.s1 Homo sapiens cDNA, | 3.097490531 | 0.007758 |
| | 3 end /clone = IMAGE-767259 /clone_end = 3′ | | |
| | /gb = AA418402 /gi = 2080211 /ug = Hs.175034 /len = 543′ | | |
| 64668_at | Cluster Incl. AI983929:wz55g05.x1 Homo sapiens cDNA, | 3.095095738 | 0.001828 |
| | 3 end /clone = IMAGE-2562008 /clone end = 3′ | | |
| | /gb = AI983929 /gi = 5811148 /ug = Hs.44087 /len = 498′ | | |
| 60521_at | Cluster Incl. AL043931:DKFZp434F1328_s1 Homo sapiens cDNA, | 3.089245265 | 0.005927 |
| | 3 end /clone = DKFZp434F1328 /clone_end = 3′ | | |
| | /gb = AL043931 /gi = 5432159 /ug = Hs.194208 /len = 656′ | | |
| 64078_at | Cluster Incl. AA156269:zo50c04.s1 Homo sapiens cDNA, | 3.083000622 | 0.001219 |
| | 3 end /clone = IMAGE-590310 /clone_end = 3′ | | |
| | /gb = AA156269 /gi = 1727904 /ug = Hs.29383 /len = 640′ | | |
| 54843_at | Cluster Incl. AI807036:wf37d02.x1 Homo sapiens cDNA, | 3.064820883 | 0.000199 |
| | 3 end /clone = IMAGE-2357763 /clone_end = 3′ | | |
| | /gb = AI807036 /gi = 5393602 /ug = Hs.101619 /len = 593′ | | |
| 57704_at | Cluster Incl. H04885:yl74a03.r1 Homo sapiens cDNA, | 3.049533011 | 0.020401 |
| | 5 end /clone = IMAGE-43628 /clone_end = 5′ | | |
| | /gb = H04885 /gi = 868437 /ug = Hs.72363 /len = 517′ | | |
| 48799_at | Cluster Incl. AI569988:tr90f10.x1 Homo sapiens cDNA, | 3.034133542 | 0.004434 |
| | 3 end /clone = IMAGE-2226379 /clone_end = 3′ | | |
| | /gb = AI569988 /gi = 4533362 /ug = Hs.105547 /len = 744′ | | |
| 57697_at | Cluster Incl. AI445628:tj08c06.x1 Homo sapiens cDNA, | 3.03160246 | 0.005747 |
| | 3 end /clone = IMAGE-2140906 /clone_end = 3′ | | |
| | /gb = AI445628 /gi = 4289541 /ug = Hs.70980 /len = 486′ | | |
| 49728_s_{—} | Cluster Incl. AI056993:oz06b07.x1 Homo sapiens cDNA, | 3.030939775 | 0.038552 |
| | 3 end /clone = IMAGE-1674517 /clone_end = 3′ | | |
| | /gb = AI056993 /gi = 3330782 /ug = Hs.239310 /len = 536′ | | |
| 64103_at | Cluster Incl. N22751:yx65d07.s1 Homo sapiens cDNA, | 3.029370854 | 0.000031 |
| | 3 end /clone = IMAGE-266605 /clone_end = 3′ | | |
| | /gb = N22751 /gi = 1136901 /ug = Hs.34665 /len = 632′ | | |
| 64347_s_{—} | Cluster Incl. AW007256:wt54b12.x1 Homo sapiens cDNA, | 3.014120526 | 0.014055 |
| | 3 end /clone = IMAGE-2511263 /clone_end = 3′ | | |
| | /gb = AW007256 /gi = 5856034 /ug = Hs.237397 /len = 631′ | | |
| 54364_at | Cluster Incl. AI472136:tj86a07.x1 Homo sapiens cDNA, | 3.013549569 | 0.010051 |
| | 3 end /clone = IMAGE-2148372 /clone_end = 3′ | | |
| | /gb = AI472136 /gi = 4334226 /ug = Hs.88801 /len = 549′ | | |
| 61626_at | Cluster Incl. AA534969:nf72h05.s1 Homo sapiens cDNA, | 0.329753477 | 0.005999 |
| | 3 end /clone = IMAGE-925497 /clone_end = 3′ | | |
| | /gb = AA534969 /gi = 2279222 /ug = Hs.27536 /len = 552′ | | |
| 66390_at | Cluster Incl. AI302387:qn50g05.x1 Homo sapiens cDNA, | 0.329198527 | 0.000067 |
| | 3 end /clone = IMAGE-1901720 /clone_end = 3′ | | |
| | /gb = AI302387 /gi = 3961733 /ug = Hs.120568 /len = 396′ | | |
| 66860_at | Cluster Incl. AA994029:ou42e09.s1 Homo sapiens cDNA, | 0.328178816 | 0.002065 |
| | 3 end /clone = IMAGE-1628968 /clone_end = 3′ | | |
| | /gb = AA994029 /gi = 3180574 /ug = Hs.129464 /len = 471′ | | |
| 64285_at | Cluster Incl. AI050855:oy47a05.x1 Homo sapiens cDNA, | 0.327569476 | 0.000116 |
| | 3 end /clone = IMAGE-1668944 /clone_end = 3′ | | |
| | /gb = AI050855 /gi = 3307660 /ug = Hs.234984 /len = 427′ | | |
| 48866_at | Cluster Incl. AA176945:zp36c10.s1 Homo sapiens cDNA, | 0.327322228 | 0.044146 |
| | 3 end /clone = IMAGE-611538 /clone_end = 3′ | | |
| | /gb = AA176945 /gi = 1758103 /ug = Hs.111136 /len = 710′ | | |
| 54748_at | Cluster Incl. AI309007:qo90b04.x1 Homo sapiens cDNA, | 0.326909965 | 0.012793 |
| | 3 end /clone = IMAGE-1915759 /clone_end = 3′ | | |
| | /gb = AI309007 /gi = 4003878 /ug = Hs.152569 /len = 424′ | | |
| 65964_at | Cluster Incl. AA203147:zx57d05.r1 Homo sapiens cDNA, | 0.323997933 | 0.016279 |
| | 5 end /clone = IMAGE-446601 /clone_end = 5′ | | |
| | /gb = AA203147 /gi = 1799005 /ug = Hs.8518 /len = 889′ | | |
| 62824_at | Cluster Incl. AI095360:oy17f06.s1 Homo sapiens cDNA, | 0.32360218 | 0.009552 |
| | 3 end /clone = IMAGE-1666115 /clone_end = 3′ | | |
| | /gb = AI095360 /gi = 3434336 /ug = Hs.148696 /len = 428′ | | |
| 60491_at | Cluster Incl. AA767440:nz82c02.s1 Homo sapiens cDNA | 0.323586785 | 0.037968 |
| | /clone = IMAGE-1301954 /gb = AA767440 /gi = 2818455 | | |
| | /ug = Hs.182882 /len = 503 | | |
| 57255_f_a | Cluster Incl. AI991501:ws17d09.x1 Homo sapiens cDNA, | 0.323023022 | 0.016114 |
| | 3 end /clone = IMAGE-2497457 /clone_end = 3′ | | |
| | /gb = AI991501 /gi = 5838406 /ug = Hs.233904 /len = 290′ | | |
| 62246_at | Cluster Incl. T92947:ye27b10.s1 Homo sapiens cDNA, | 0.322335146 | 0.001962 |
| | 3 end /clone = IMAGE-118939 /clone_end = 3′ | | |
| | /gb = T92947 /gi = 724860 /ug = Hs.160999 /len = 458′ | | |
| 63972_at | Cluster Incl. AI985619:wr75e11.x1 Homo sapiens cDNA, | 0.321481527 | 0.012815 |
| | 3 end /clone = IMAGE-2493548 /clone_end = 3′ | | |
| | /gb = AI985619 /gi = 5812896 /ug = Hs.233813 /len = 645′ | | |
| 65471_at | Cluster Incl. AI744118:wc36e07.x1 Homo sapiens cDNA, | 0.319850405 | 0.03235 |
| | 3 end /clone = IMAGE-2317284 /clone_end = 3′ | | |
| | /gb = AI744118 /gi = 5112406 /ug = Hs.169575 /len = 588′ | | |
| 64684_at | Cluster Incl. AA528168:nh91g06.s1 Homo sapiens cDNA, | 0.318842345 | 0.006451 |
| | 3 end /clone = IMAGE-965914 /clone_end = 3′ | | |
| | /gb = AA528168 /gi = 2270237 /ug = Hs.48401 /len = 610′ | | |
| 49175_at | Cluster Incl. AI887986:wm27b05.x1 Homo sapiens cDNA, | 0.317648541 | 0.004512 |
| | 3 end /clone = IMAGE-2437137 /clone_end = 3′ | | |
| | /gb = AI887986 /gi = 5593150 /ug = Hs.110978 /len = 749′ | | |
| 55882_at | Cluster Incl. AI492376:ti27c10.x1 Homo sapiens cDNA, | 0.316649054 | 0.009055 |
| | 3 end /clone = IMAGE-2131698 /clone_end = 3′ | | |
| | /gb = AI492376 /gi = 4393379 /ug = Hs.17572 /len = 538′ | | |
| 64395_at | Cluster Incl. H10808:ym04c09.r1 Homo sapiens cDNA, | 0.316637145 | 0.004543 |
| | 5 end /clone = IMAGE-46861 /clone_end = 5′ | | |
| | /gb = H10808 /gi = 875628 /ug = Hs.44978 /len = 601′ | | |
| 62555_at | Cluster Incl. AI623176:ts78b04.x1 Homo sapiens cDNA, | 0.316473366 | 0.040377 |
| | 3 end /clone = IMAGE-2237359 /clone_end = 3′ | | |
| | /gb = AI623176 /gi = 4648101 /ug = Hs.7392 /len = 664′ | | |
| 64526_at | Cluster Incl. AW051272:wy83e11.x1 Homo sapiens cDNA, | 0.315849581 | 0.038785 |
| | 3 end /clone = IMAGE-2555180 /clone_end = 3′ | | |
| | /gb = AW051272 /gi = 5913542 /ug = Hs.25214 /len = 371′ | | |
| 65796_at | Cluster Incl. AI859366:wm10f01.x1 Homo sapiens cDNA, | 0.315525138 | 0.007601 |
| | 3 end /clone = IMAGE-2435545 /clone_end = 3′ | | |
| | /gb = AI859366 /gi = 5512982 /ug = Hs.237336 /len = 707′ | | |
| 61700_at | Cluster Incl. AI922821:wo14d06.x1 Homo sapiens cDNA, | 0.315495682 | 0.004301 |
| | 3 end /clone = IMAGE-2455307 /clone_end = 3′ | | |
| | /gb = AI922821 /gi = 5658785 /ug = Hs.32433 /len = 537′ | | |
| 61870_g_{—} | Cluster Incl. AI494617:qz17a11.x1 Homo sapiens cDNA, | 0.315484967 | 0.007413 |
| | 3 end /clone = IMAGE-2021756 /clone_end = 3′ | | |
| | /gb = AI494617 /gi = 4395620 /ug = Hs.118211 /len = 646′ | | |
| 60510_at | Cluster Incl. AA772381:ai44c03.s1 Homo sapiens cDNA, | 0.314791598 | 0.011959 |
| | 3 end /clone = 1359844 /clone_end = 3′ | | |
| | /gb = AA772381 /gi = 2824164 /ug = Hs.188429 /len = 570′ | | |
| 57738_at | Cluster Incl. AA195964:zp97c05.r1 Homo sapiens cDNA, | 0.314196784 | 0.007585 |
| | 5 end /clone = IMAGE-628136 /clone_end = 5′ | | |
| | /gb = AA195964 /gi = 1791589 /ug = Hs.87278 /len = 615′ | | |
| 62793_at | Cluster Incl. Al821806:nr33c08.x5 Homo sapiens cDNA, | 0.313701611 | 0.000016 |
| | 3 end /clone = IMAGE-1169774 /clone_ends = 3′ | | |
| | /gb = AI821806 /gi = 5440885 /ug = Hs.191846 /len = 679′ | | |
| 62707_at | Cluster Incl. N21031:yx46f05.s1 Homo sapiens cDNA, | 0.311461874 | 0.0078 |
| | 3 end /clone = IMAGE-264801 /clone_end = 3′ | | |
| | /gb = N21031 /gi = 1126201 /ug = Hs.164779 /len = 554′ | | |
| 63026_at | Cluster Incl. AA886976:oi14h01.s1 Homo sapiens cDNA, | 0.310368296 | 0.00234 |
| | 3 end /clone = IMAGE-1476529 /clone_end = 3′ | | |
| | /gb = AA886976 /gi = 3002084 /ug = Hs.95821 /len = 749′ | | |
| 57240_f_a | Cluster Incl. AI701742:we07g11.x1 Homo sapiens cDNA, | 0.308442897 | 0.002019 |
| | 3 end /clone = IMAGE-2340452 /clone_end = 3′ | | |
| | /gb = AI701742 /gi = 4989642 /ug = Hs.233791 /len = 344′ | | |
| 65185_g_{—} | Cluster Incl. AA015613:ze20f12.s1 Homo sapiens cDNA, | 0.306125434 | 0.000036 |
| | 3 end /clone = IMAGE-359567 /clone_end = 3′ | | |
| | /gb = AA015613 /gi = 1476661 /ug = Hs.13766 /len = 647′ | | |
| 65591_at | Cluster Incl. N64681:yz87g05.s1 Homo sapiens cDNA, | 0.303421174 | 0.022703 |
| | 3 end /clone = IMAGE-290072 /clone_end = 3′ | | |
| | /gb = N64681 /gi = 1212510 /ug = Hs.239120 /len = 606′ | | |
| 65543_at | Cluster Incl. AI621225:ts77a11.x1 Homo sapiens cDNA, | 0.302382221 | 0.003525 |
| | 3 end /clone = IMAGE-2237276 /clone_end = 3′ | | |
| | /gb = AI621225 /gi = 4630351 /ug = Hs.22452 /len = 582′ | | |
| 63952_at | Cluster Incl. AI970855:wr20f09.x1 Homo sapiens cDNA, | 0.302306661 | 0.000153 |
| | 3 end /clone = IMAGE-2488265 /clone_end = 3′ | | |
| | /gb = AI970855 /gi = 5767681 /ug = Hs.233633 /len = 590′ | | |
| 65514_at | Cluster Incl. AA166678:zq41e08.s1 Homo sapiens cDNA, | 0.302069999 | 0.000394 |
| | 3 end /clone = IMAGE-632294 /clone_end = 3′ | | |
| | /gb = AA166678 /gi = 1745133 /ug = Hs.18760 /len = 673′ | | |
| 62287_at | Cluster Incl. AW005044:wz94a11.x1 Homo sapiens cDNA, | 0.301869349 | 0.000105 |
| | 3 end /clone = IMAGE-2566460 /clone_end = 3′ | | |
| | /gb = AW005044 /gi = 5853822 /ug = Hs.167433 /len = 731′ | | |
| 65483_at | Cluster Incl. Al658928:tu07d08.x1 Homo sapiens cDNA, | 0.300258246 | 0.003195 |
| | 3 end /clone = IMAGE-2250351 /clone_end = 3′ | | |
| | /gb = AI658928 /gi = 4762498 /ug = Hs.17110 /len = 530′ | | |
| 64293_at | Cluster Incl. AI971000:wr22f07.x1 Homo sapiens cDNA, | 0.296907004 | 0.00001 |
| | 3 end /clone = IMAGE-2488453 /clone_end = 3′ | | |
| | /gb = AI971000 /gi = 5767826 /ug = Hs.235392 /len = 524′ | | |
| 56545_r_a | Cluster Incl. H77843:ys09f06.s1 Homo sapiens cDNA, | 0.296894418 | 0.000655 |
| | 3 end /clone = IMAGE-214307 /clone_end = 3′ | | |
| | /gb = H77843 /gi = 1055932 /ug = Hs.117886 /len = 331′ | | |
| 54887_at | Cluster Incl. AA772278:ai42d03.s1 Homo sapiens cDNA, | 0.295982417 | 0.003958 |
| | 3 end /clone = 1359653 /clone_end = 3′ | | |
| | /gb = AA772278 /gi = 2824061 /ug = Hs.104623 /len = 529′ | | |
| 56590_s_{—} | Cluster Incl. AI431800:ti25d06.x1 Homo sapiens cDNA, | 0.295067963 | 0.000049 |
| | 3 end /clone = IMAGE-2131499 /clone_end = 3′ | | |
| | /gb = AI431800 /gi = 4305717 /ug = Hs.237258 /len = 517′ | | |
| 60847_at | Cluster Incl. AA406400:zv12b07.r1 Homo sapiens cDNA, | 0.294009282 | 0.006324 |
| | 5 end /clone = IMAGE-753397 /clone_end = 5′ | | |
| | /gb = AA406400 /gi = 2064401 /ug = Hs.22851 /len = 509′ | | |
| 62066_at | Cluster Incl. AI919146:tt34d10.x1 Homo sapiens cDNA, | 0.292800813 | 0.001503 |
| | 3 end /clone = IMAGE-2242675 /clone_end = 3′ | | |
| | /gb = AI919146 /gi = 5639093 /ug = Hs.147293 /len = 174′ | | |
| 54215_at | Cluster Incl. AA742993:ny20a12.s1 Homo sapiens cDNA | 0.292648011 | 0.000982 |
| | /clone = IMAGE-1272286 /gb = AA742993 /gi = 2782499 | | |
| | /ug = Hs.190470 /len = 285 | | |
| 65934_at | Cluster Incl. AI546910:PN2.1_10_A10.r Homo sapiens cDNA, | 0.292566334 | 0.000017 |
| | 5 end /clone_end = 5′ /gb = AI546910 | | |
| | /gi = 4464398 /ug = Hs.7499 /len = 791′ | | |
| 49394_at | Cluster Incl. AA909687:om47d05.s1 Homo sapiens cDNA, | 0.291700552 | 0.00198 |
| | 3 end /clone = IMAGE-1544169 /clone_end = 3′ | | |
| | /gb = AA909687 /gi = 3049092 /ug = Hs.132222 /len = 530′ | | |
| 51763_at | Cluster Incl. AA621061:ag03g05.s1 Homo sapiens cDNA, | 0.29151259 | 0.001387 |
| | 3 end /clone = IMAGE-1056248 /clone_end = 3′ | | |
| | /gb = AA621061 /gi = 2525000 /ug = Hs.238944 /len = 473′ | | |
| 63998_at | Cluster Incl. AA587236:nn82c12.s1 Homo sapiens cDNA, | 0.291223086 | 0.000005 |
| | 3 end /clone = IMAGE-1090390 /clone_end = 3′ | | |
| | /gb = AA587236 /gi = 2398050 /ug = Hs.234146 /len = 630′ | | |
| 62502_at | Cluster Incl. C75510:C75510 Homo sapiens cDNA /clone = hbc7804 | 0.28932962 | 0.000001 |
| | /gb = C75510 /gi = 2366572 /ug = Hs.61933 /len = 543 | | |
| 64485_at | Cluster Incl. AA057445:zf57h11.s1 Homo sapiens cDNA, | 0.288246999 | 0.001207 |
| | 3 end /clone = IMAGE-381093 /clone_end = 3′ | | |
| | /gb = AA057445 /gi = 1550086 /ug = Hs.6176 /len = 576′ | | |
| 65460_at | Cluster Incl. AI669827:tu31g09.x1 Homo sapiens cDNA, | 0.28784121 | 0.001679 |
| | 3 end /clone = IMAGE-2252704 /clone_end = 3′ | | |
| | /gb = AI669827 /gi = 4834601 /ug = Hs.16577 /len = 593′ | | |
| 63782_at | Cluster Incl. AW051353:wy89g06.x1 Homo sapiens cDNA, | 0.287832225 | 0.000028 |
| | 3 end /clone = IMAGE-2555770 /clone_end = 3′ | | |
| | /gb = AW051353 /gi = 5913623 /ug = Hs.184668 /len = 577′ | | |
| 56234_r_a | Cluster Incl. AA053401:zl71b05.s1 Homo sapiens cDNA, | 0.287820353 | 0.00614 |
| | 3 end /clone = IMAGE-510033 /clone_end = 3′ | | |
| | /gb = AA053401 /gi = 1544038 /ug = Hs.177526 /len = 434′ | | |
| 61241_at | Cluster Incl. AI636422:tz79c01.x1 Homo sapiens cDNA, | 0.287143194 | 0.006593 |
| | 3 end /clone = IMAGE-2294784 /clone_end = 3′ | | |
| | /gb = AI636422 /gi = 4687752 /ug = Hs.140491 /len = 599′ | | |
| 49579_at | Cluster Incl. H45299:yn99g07.s1 Homo sapiens cDNA, | 0.2861687 | 0.000328 |
| | 3 end /clone = IMAGE-176604 /clone_end = 3′ | | |
| | /gb = H45299 /gi = 921351 /ug = Hs.19845 /len = 476′ | | |
| 65858_at | Cluster Incl. N49855:yz08h09.s1 Homo sapiens cDNA, | 0.284532394 | 0.000034 |
| | 3 end /clone = IMAGE-282497 /clone_end = 3′ | | |
| | /gb = N49855 /gi = 1191021 /ug = Hs.33054 /len = 633′ | | |
| 66525_at | Cluster Incl. AI860791:wl05h02.x1 Homo sapiens cDNA, | 0.283827138 | 0.00039 |
| | 3 end /clone = IMAGE-2424051 /clone_end = 3′ | | |
| | /gb = AI860791 /gi = 5514407 /ug = Hs.124359 /len = 379′ | | |
| 59962_at | Cluster Incl. AI703476:we24f08.x1 Homo sapiens cDNA, | 0.283690542 | 0.000172 |
| | 3 end /clone = IMAGE-2342055 /clone_end = 3′ | | |
| | /gb = AI703476 /gi = 4991376 /ug = Hs.13214 /len = 512′ | | |
| 62716_at | Cluster Incl. H98970:yx11c05.s1 Homo sapiens cDNA, | 0.282761935 | 0.020256 |
| | 3 end /clone = IMAGE-261416 /clone_end = 3′ | | |
| | /gb = H98970 /gi = 1123638 /ug = Hs.166659 /len = 623′ | | |
| 62115_at | Cluster Incl. H95265:yu20e07.s1 Homo sapiens cDNA, | 0.282482023 | 0.017318 |
| | 3 end /clone = IMAGE-234372 /clone_end = 3′ | | |
| | /gb = H95265 /gi = 1102898 /ug = Hs.42053 /len = 592′ | | |
| 49249_s_{—} | Cluster Incl. AA533079:nj19e12.s1 Homo sapiens cDNA, | 0.279331424 | 0.012289 |
| | 3 end /clone = IMAGE-992974 /clone end = 3′ | | |
| | /gb = AA533079 /gi = 2277175 /ug = Hs.136005 /len = 549′ | | |
| 49749_at | Cluster Incl. AA312110:EST182804 Homo sapiens cDNA, | 0.277737004 | 0.010242 |
| | 5 end /clone = ATCC-159298 /clone_end = 5′ | | |
| | /gb = AA312110 /gi = 1964438 /ug = Hs.239945 /len = 455′ | | |
| 48861_at | Cluster Incl. AA224174:zr15d10.r1 Homo sapiens cDNA, | 0.275987009 | 0.007743 |
| | 5 end /clone = IMAGE-663475 /clone_end = 5′ | | |
| | /gb = AA224174 /gi = 1844838 /ug = Hs.111099 /len = 452′ | | |
| 63674_r_a | Cluster Incl. AI653782:ty01d02.x1 Homo sapiens cDNA, | 0.274034829 | 0.012693 |
| | 3 end /clone = IMAGE-2277795 /clone_end = 3′ | | |
| | /gb = AI653782 /gi = 4737761 /ug = Hs.201337 /len = 548′ | | |
| 60426_at | Cluster Incl. AL047117:DKFZp586C2218_r1 Homo sapiens cDNA, | 0.271993302 | 0.003974 |
| | 5 end /clone = DKFZp586C2218 /clone end = 5′ | | |
| | /gb = AL047117 /gi = 5435160 /ug = Hs.169425 /len = 646′ | | |
| 64327_at | Cluster Incl. AW014889:UI-H-BIo-aaf-b-11-0-UI.s1 Homo sapiens cDNA, | 0.271558043 | 0.000001 |
| | 3 end /clone = IMAGE-2709069 /clone end = 3′ | | |
| | /gb = AW014889 /gi = 5863646 /ug = Hs.236762 /len = 565′ | | |
| 53582_at | Cluster Incl. AI141151:qe19e12.x1 Homo sapiens cDNA, | 0.271415126 | 0.000269 |
| | 3 end /clone = IMAGE-1739470 /clone_end = 3′ | | |
| | /gb = AI141151 /gi = 3648608 /ug = Hs.58330 /len = 426′ | | |
| 56147_f_a | Cluster Incl. T86696:yd86e02.s1 Homo sapiens cDNA, | 0.270730916 | 0.004461 |
| | 3 end /clone = IMAGE-115130 /clone_end = 3′ | | |
| | /gb = T86696 /gi = 715048 /ug = Hs.169968 /len = 329′ | | |
| 65577_at | Cluster Incl. AI870013:wl63g12.x1 Homo sapiens cDNA, | 0.270716848 | 0.016125 |
| | 3 end /clone = IMAGE-2429638 /clone_end = 3′ | | |
| | /gb = AI870013 /gi = 5543981 /ug = Hs.238049 /len = 536′ | | |
| 64451_at | Cluster Incl. AL048814:DKFZp434F1618_s1 Homo sapiens cDNA | 0.270363039 | 0.010424 |
| | /clone = DKFZp434F1618 /gb = AL048814 /gi = 4728123 | | |
| | /ug = Hs.5624 /len = 634 | | |
| 59694_at | Cluster Incl. AI971396:wr04d08.x1 Homo sapiens cDNA, | 0.26973595 | 0.00008 |
| | 3 end /clone = IMAGE-2480559 /clone_end = 3′ | | |
| | /gb = AI971396 /gi = 5768222 /ug = Hs.234838 /len = 624′ | | |
| 65734_at | Cluster Incl. AI744109:wc36d09.x1 Homo sapiens cDNA, | 0.268508824 | 0.025575 |
| | 3 end /clone = IMAGE-2317265 /clone_end = 3′ | | |
| | /gb = AI744109 /gi = 5112397 /ug = Hs.180141 /len = 828′ | | |
| 63892_at | Cluster Incl. AI056075:ox46e08.s1 Homo sapiens cDNA, | 0.267200526 | 0.016718 |
| | 3 end /clone = IMAGE-1659398 /clone_end = 3′ | | |
| | /gb = AI056075 /gi = 3329941 /ug = Hs.239678 /len = 490′ | | |
| AFFX-HU | M33197 Human glyceraldehyde-3-phosphate dehydrogenase (GAPDH) mRNA, | 0.266542141 | 0.018105 |
| | complete cds(_5, _M, _3 represent transcript | | |
| | regions 5 prime, Middle, and 3 prime respectively) | | |
| 54068_at | AA973035:op25g06.s1 Homo sapiens cDNA, | 0.265826141 | 0.002294 |
| | 3 end /clone = IMAGE-1577914 /clone_end = 3′ | | |
| | /gb = AA973035 /gi = 3148215 /ug = Hs.128271 /len = 494′ | | |
| 64094_at | Cluster Incl. AI123601:qa50d10.x1 Homo sapiens cDNA, | 0.26328184 | 0.003637 |
| | 3 end /clone = IMAGE-1690195 /clone end = 3′ | | |
| | /gb = AI123601 /gi = 3539367 /ug = Hs.32580 /len = 603′ | | |
| 50936_g_{—} | Cluster Incl. AA454184:zx48a10.s1 Homo sapiens cDNA, | 0.257098922 | 0.000135 |
| | 3 end /clone = IMAGE-795450 /clone_end = 3′ | | |
| | /gb = AA454184 /gi = 2167853 /ug = Hs.233805 /len = 559′ | | |
| 62972_at | Cluster Incl. W56118:zc56h04.r1 Homo sapiens cDNA, | 0.257076447 | 0.016006 |
| | 5 end /clone = IMAGE-326359 /clone_end = 5′ | | |
| | /gb = W56118 /gi = 1358007 /ug = Hs.87747 /len = 582′ | | |
| 62297_at | Cluster Incl. AL048338:DKFZp586C1424_s1 Homo sapiens cDNA | 0.253314399 | 0.002475 |
| | /clone = DKFZp586C1424 /gb = AL048338 | | |
| | /gi = 4727478 /ug = Hs.167956 /len = 805 | | |
| 48751_at | Cluster Incl. W61000:zc99g11.s1 Homo sapiens cDNA, | 0.252779772 | 0.007829 |
| | 3 end /clone = IMAGE-339332 /clone_end = 3′ | | |
| | /gb = W61000 /gi = 1367759 /ug = Hs.9578 /len = 607′ | | |
| 64095_at | Cluster Incl. AL046950:DKFZp586J1617_s1 Homo sapiens cDNA, | 0.252581936 | 0.026995 |
| | 3 end /clone = DKFZp586J1617 /clone end = 3′ | | |
| | /gb = AL046950 /gi = 5435008 /ug = Hs.32675 /len = 726′ | | |
| 64544_at | Cluster Incl. AA157506:zo55d01.s1 Homo sapiens cDNA, | 0.252105997 | 0.000747 |
| | 3 end /clone = IMAGE-590785 /clone_end = 3′ | | |
| | /gb = AA157506 /gi = 1729131 /ug = Hs.29003 /len = 427′ | | |
| 62942_at | Cluster Incl. AI346341:qp50b09.x1 Homo sapiens cDNA, | 0.251328324 | 0.000433 |
| | 3 end /clone = IMAGE-1926425 /clone_end = 3′ | | |
| | /gb = AI346341 /gi = 4083547 /ug = Hs.82669 /len = 549′ | | |
| 61639_at | Cluster Incl. AA863003:og99d06.s1 Homo sapiens cDNA, | 0.250029119 | 0.004024 |
| | 3 end /clone = IMAGE-1456427 /clone_end = 3′ | | |
| | /gb = AA863003 /gi = 2955482 /ug = Hs.28651 /len = 455′ | | |
| 63845_at | Cluster Incl. AI766309:wh71d09.x1 Homo sapiens cDNA, | 0.249268909 | 0.001144 |
| | 3 end /clone = IMAGE-2386193 /clone_end = 3′ | | |
| | /gb = AI766309 /gi = 5232818 /ug = Hs.23363 /len = 571′ | | |
| 66785_i_a | Cluster Incl. AI223376:qg43d08.x1 Homo sapiens cDNA, | 0.249160717 | 0.002653 |
| | 3 end /clone = IMAGE-1837935 /clone_end = 3′ | | |
| | /gb = AI223376 /gi = 3805579 /ug = Hs.128454 /len = 387′ | | |
| 52038_r_a | Cluster Incl. AI223016:qg52f04.x1 Homo sapiens cDNA, | 0.24791803 | 0.00541 |
| | 3 end /clone = IMAGE-1838815 /clone_end = 3′ | | |
| | /gb = AI223016 /gi = 3805219 /ug = Hs.144742 /len = 281′ | | |
| 56809_at | Cluster Incl. AI052524:oz27f07.x1 Homo sapiens cDNA, | 0.245992054 | 0.000385 |
| | 3 end /clone = IMAGE-1676581 /clone_end = 3′ | | |
| | /gb = AI052524 /gi = 3308515 /ug = Hs.4799 /len = 537′ | | |
| 65175_at | Cluster Incl. AI741026:wg25e11.x1 Homo sapiens cDNA, | 0.2449656 | 0.000409 |
| | 3 end /clone = IMAGE-2366156 /clone_end = 3′ | | |
| | /gb = AI741026 /gi = 5109314 /ug = Hs.13299 /len = 592′ | | |
| 65893_at | Cluster Incl. AI151271:qc88b06.x1 Homo sapiens cDNA, | 0.24384702 | 0.001358 |
| | 3 end /clone = IMAGE-1721267 /clone_end = 3′ | | |
| | /gb = AI151271 /gi = 3679740 /ug = Hs.5243 /len = 616′ | | |
| 62692_at | Cluster Incl. AA410788:zt35b11.r1 Homo sapiens cDNA, | 0.243344597 | 0.006983 |
| | 5 end /clone = IMAGE-724317 /clone_end = 5′ | | |
| | /gb = AA410788 /gi = 2069895 /ug = Hs.183673 /len = 484′ | | |
| 54730_at | Cluster Incl. AA553527:nk78a04.s1 Homo sapiens cDNA, | 0.242978961 | 0.000938 |
| | 3 end /clone = IMAGE-1019598 /clone_end = 3′ | | |
| | /gb = AA553527 /gi = 2324066 /ug = Hs.152432 /len = 510′ | | |
| 60481_i_a | Cluster Incl. AA932331:oo60a08.s1 Homo sapiens cDNA, | 0.241809966 | 0.006633 |
| | 3 end /clone = IMAGE-1570550 /clone_end = 3′ | | |
| | /gb = AA932331 /gi = 3086569 /ug = Hs.181174 /len = 508′ | | |
| 54556_at | Cluster Incl. AI554741:tn27g07.x1 Homo sapiens cDNA, | 0.241602147 | 0.003086 |
| | 3 end /clone = IMAGE-2168892 /clone_end = 3′ | | |
| | /gb = AI554741 /gi = 4487104 /ug = Hs.150657 /len = 466′ | | |
| 61247_f_a | Cluster Incl. R67332:yi32e02.s1 Homo sapiens cDNA, | 0.241131758 | 0.012114 |
| | 3 end /clone = IMAGE-140954 /clone_end = 3′ | | |
| | /gb = R67332 /gi = 839970 /ug = Hs.140987 /len = 423′ | | |
| 60029_i_a | Cluster Incl. AI589514:tm57a12.x1 Homo sapiens cDNA, | 0.23979923 | 0.005698 |
| | 3 end /clone = IMAGE-2162206 /clone_end = 3′ | | |
| | /gb = AI589514 /gi = 4598562 /ug = Hs.15688 /len = 493′ | | |
| 56675_at | Cluster Incl. H28004:yl59g07.s1 Homo sapiens cDNA, | 0.235365417 | 0.000016 |
| | 3 end /clone = IMAGE-162588 /clone_end = 3′ | | |
| | /gb = H28004 /gi = 898357 /ug = Hs.25699 /len = 462′ | | |
| 65113_at | Cluster Incl. AI952965:wq49d11.x1 Homo sapiens cDNA, | 0.234876957 | 0.001006 |
| | 3 end /clone = IMAGE-2474613 /clone_end = 3′ | | |
| | /gb = AI952965 /gi = 5745275 /ug = Hs.97837 /len = 472′ | | |
| 58434_at | Cluster Incl. AI268312:qm04b12.x1 Homo sapiens cDNA, | 0.233510248 | 0.000001 |
| | 3 end /clone = IMAGE-1880831 /clone_end = 3′ | | |
| | /gb = AI268312 /gi = 3887479 /ug = Hs.103009 /len = 609′ | | |
| 63311_at | Cluster Incl. AI742378:wg40c02.x1 Homo sapiens cDNA, | 0.232118688 | 0.004954 |
| | 3 end /clone = IMAGE-2367554 /clone_end = 3′ | | |
| | /gb = AI742378 /gi = 5110666 /ug = Hs.101514 /len = 672′ | | |
| 62573_at | Cluster Incl. H04627:yj49f04.r1 Homo sapiens cDNA, | 0.230460891 | 0.002567 |
| | 5 end /clone = IMAGE-152095 /clone_end = 5′ | | |
| | /gb = H04627 /gi = 867560 /ug = Hs.79793 /len = 576′ | | |
| 62351_at | Cluster Incl. AI217310:qh25d09.x1 Homo sapiens cDNA, | 0.230064353 | 0.000264 |
| | 3 end /clone = IMAGE-1845713 /clone_end = 3′ | | |
| | /gb = AI217310 /gi = 3797125 /ug = Hs.147568 /len = 390′ | | |
| 65173_at | Cluster Incl. H92987:yv07d04.s1 Homo sapiens cDNA, | 0.225358214 | 0.000567 |
| | 3 end /clone = IMAGE-242023 /clone_end = 3′ | | |
| | /gb = H92987 /gi = 1099315 /ug = Hs.13299 /len = 650′ | | |
| 60058_at | Cluster Incl. AA557237:nl75d07.s1 Homo sapiens cDNA, | 0.224424263 | 0.021308 |
| | 3 end /clone = IMAGE-1056493 /clone_end = 3′ | | |
| | /gb = AA557237 /gi = 2327714 /ug = Hs.168776 /len = 605′ | | |
| 56677_at | Cluster Incl. AA557324:nl81a02.s1 Homo sapiens cDNA, | 0.220198572 | 0.002338 |
| | 3 end /clone = IMAGE-1057034 /clone_end = 3′ | | |
| | /gb = AA557324 /gi = 2327801 /ug = Hs.26040 /len = 568′ | | |
| 64357_at | Cluster Incl. AI991817:wr32f11.x1 Homo sapiens cDNA, | 0.220156505 | 0.012518 |
| | 3 end /clone = IMAGE-2489421 /clone_end = 3′ | | |
| | /gb = AI991817 /gi = 5838722 /ug = Hs.237718 /len = 388′ | | |
| 60532_at | Cluster Incl. AA034289:zk18e07.r1 Homo sapiens cDNA, | 0.219583921 | 0.006195 |
| | 5 end /clone = IMAGE-470916 /clone_end = 5′ | | |
| | /gb = AA034289 /gi = 1506098 /ug = Hs.200499 /len = 588′ | | |
| 58504_at | Cluster Incl. AA149860:zl47e11.r1 Homo sapiens cDNA, | 0.218848321 | 0.000376 |
| | 5 end /clone = IMAGE-505100 /clone_end = 5′ | | |
| | /gb = AA149860 /gi = 1720940 /ug = Hs.107755 /len = 659′ | | |
| 63567_at | Cluster Incl. H50153:yo27e01.r1 Homo sapiens cDNA, | 0.21856838 | 0.000001 |
| | 5 end /clone = IMAGE-179160 /clone_end = 5′ | | |
| | /gb = H50153 /gi = 989994 /ug = Hs.21659 /len = 580′ | | |
| 64137_at | Cluster Incl. AI094860:qa09a11.x1 Homo sapiens cDNA, | 0.217551174 | 0.005466 |
| | 3 end /clone = IMAGE-1686236 /clone_end = 3′ | | |
| | /gb = AI094860 /gi = 3433836 /ug = Hs.239512 /len = 452′ | | |
| 58086_i_a | Cluster Incl. AA815371:ai64g06.s1 Homo sapiens cDNA, | 0.216986503 | 0.000395 |
| | 3 end /clone = 1375642 /clone_end = 3′ | | |
| | /gb = AA815371 /gi = 2884967 /ug = Hs.122965 /len = 426′ | | |
| 62562_at | Cluster Incl. AI674123:wd18d08.x1 Homo sapiens cDNA, | 0.215616168 | 0.000068 |
| | 3 end /clone = IMAGE-2328495 /clone_end = 3′ | | |
| | /gb = AI674123 /gi = 4874603 /ug = Hs.7615 /len = 547′ | | |
| 58404_at | Cluster Incl. AA487503:aa95c01.s1 Homo sapiens cDNA, | 0.214993271 | 0.000121 |
| | 3 end /clone = IMAGE-839040 /clone_end = 3′ | | |
| | /gb = AA487503 /gi = 2217667 /ug = Hs.100636 /len = 486′ | | |
| 57792_at | Cluster Incl. AA399630:zt93d07.s1 Homo sapiens cDNA, | 0.213130496 | 0.000122 |
| | 3 end /clone = IMAGE-729901 /clone_end = 3′ | | |
| | /gb = AA399630 /gi = 2052644 /ug = Hs.94396 /len = 553′ | | |
| 62599_r_a | Cluster Incl. AI742422:wg40f11.x1 Homo sapiens cDNA, | 0.209883294 | 0.000954 |
| | 3 end /clone = IMAGE-2367597 /clone_end = 3′ | | |
| | /gb = AI742422 /gi = 5110710 /ug = Hs.174363 /len = 577′ | | |
| 65165_at | Cluster Incl. AI453545:tj57c03.x1 Homo sapiens cDNA, | 0.20820513 | 0.011588 |
| | 3 end /clone = IMAGE-2145604 /clone_end = 3′ | | |
| | /gb = AI453545 /gi = 4282767 /ug = Hs.12842 /len = 636′ | | |
| 64709_at | Cluster Incl. AI810632:tu19b06.x1 Homo sapiens cDNA, | 0.20784757 | 0 |
| | 3 end /clone = IMAGE-2251475 /clone_end = 3′ | | |
| | /gb = AI810632 /gi = 5397198 /ug = Hs.55080 /len = 542′ | | |
| 61625_at | Cluster Incl. AI278995:qm22e01.x1 Homo sapiens cDNA, | 0.20742973 | 0.000095 |
| | 3 end /clone = IMAGE-1882584 /clone_end = 3′ | | |
| | /gb = AI278995 /gi = 3917229 /ug = Hs.27457 /len = 581′ | | |
| 60445_at | Cluster Incl. AA534542:nf77a03.s1 Homo sapiens cDNA, | 0.206277647 | 0.015576 |
| | 3 end /clone = IMAGE-925900 /clone_end = 3′ | | |
| | /gb = AA534542 /gi = 2278795 /ug = Hs.172849 /len = 489′ | | |
| 49068_at | Cluster Incl. AI031674:ow48g03.x1 Homo sapiens cDNA, | 0.204781876 | 0.000281 |
| | 3 end /clone = IMAGE-1650100 /clone_end = 3′ | | |
| | /gb = AI031674 /gi = 3249886 /ug = Hs.5850 /len = 804′ | | |
| 59911_f_a | Cluster Incl. AI124631:am59f08.x1 Homo sapiens cDNA, | 0.202857127 | 0.034818 |
| | 3 end /clone = IMAGE-1539879 /clone_end = 3′ | | |
| | /gb = AI124631 /gi = 3593145 /ug = Hs.130893 /len = 416′ | | |
| 53313_at | Cluster Incl. AA284232:zc39c01.T7 Homo sapiens cDNA, | 0.202265466 | 0.000233 |
| | 3 end /clone = IMAGE-324672 /clone_end = 3′ | | |
| | /gb = AA284232 /gi = 1928532 /ug = Hs.55983 /len = 546′ | | |
| 62763_at | Cluster Incl. AI978918:wr61h01.x1 Homo sapiens cDNA, | 0.200697429 | 0.000276 |
| | 3 end /clone = IMAGE-2492209 /clone_end = 3′ | | |
| | /gb = AI978918 /gi = 5803948 /ug = Hs.179608 /len = 588′ | | |
| 54326_at | Cluster Incl. AI928203:wo95d03.x1 Homo sapiens cDNA, | 0.196029076 | 0.000171 |
| | 3 end /clone = IMAGE-2463077 /clone_end = 3′ | | |
| | /gb = AI928203 /gi = 5664167 /ug = Hs.86379 /len = 554′ | | |
| 48857_at | Cluster Incl. AI924323:wn55d07.x1 Homo sapiens cDNA, | 0.194383948 | 0.000252 |
| | 3 end /clone = IMAGE-2449357 /clone_end = 3′ | | |
| | /gb = AI924323 /gi = 5660287 /ug = Hs.110024 /len = 525′ | | |
| 62593_at | Cluster Incl. AA425714:zv47e06:r1 Homo sapiens cDNA, | 0.194165766 | 0.000008 |
| | 5 end /clone = IMAGE-756802 /clone_end = 5′ | | |
| | /gb = AA425714 /gi = 2107364 /ug = Hs.173704 /len = 454′ | | |
| 55676_r_a | Cluster Incl. H40497:yn87f03.s1 Homo sapiens cDNA, | 0.193742511 | 0.000159 |
| | 3 end /clone = IMAGE-175421 /clone_end = 3′ | | |
| | /gb = H40497 /gi = 916549 /ug = Hs.237249 /len = 446′ | | |
| 65550_at | Cluster Incl. AI546943:PN2.1_10_E06.r Homo sapiens cDNA, | 0.19337696 | 0.000005 |
| | 5 end /clone_end = 5′ /gb = AI546943 | | |
| | /gi = 4464431 /ug = Hs.23136 /len = 706′ | | |
| 55581_at | Cluster Incl. AI051688:oy97e02.x1 Homo sapiens cDNA, | 0.192450405 | 0.035989 |
| | 3 end /clone = IMAGE-1673786 /clone_end = 3′ | | |
| | /gb = AI051688 /gi = 3307222 /ug = Hs.230273 /len = 449′ | | |
| 60401_at | Cluster Incl. AI769290:wg36b12.x1 Homo sapiens cDNA, | 0.191038508 | 0.000043 |
| | 3 end /clone = IMAGE-2367167 /clone_end = 3′ | | |
| | /gb = AI769290 /gi = 5235799 /ug = Hs.134190 /len = 486′ | | |
| 56691_at | Cluster Incl. AI935202:wp17a11.x1 Homo sapiens cDNA, | 0.181080399 | 0.002371 |
| | 3 end /clone = IMAGE-2465084 /clone end = 3′ | | |
| | /gb = AI935202 /gi = 5674072 /ug = Hs.31181 /len = 571′ | | |
| 63476_at | Cluster.Incl. AI796235:wh44c01.x1 Homo sapiens cDNA, | 0.179038438 | 0.000039 |
| | 3 end /clone = IMAGE-2383584 /clone end = 3′ | | |
| | /gb = AI796235 /gi = 5361687 /ug = Hs.21299 /len = 530′ | | |
| 53810_f_a | Cluster Incl. AA401302:zv66h05.s1 Homo sapiens cDNA, | 0.175285063 | 0.000001 |
| | 3 end /clone = IMAGE-758649 /clone_end = 3′ | | |
| | /gb = AA401302 /gi = 2055205 /ug = Hs.79881 /len = 543′ | | |
| 65876_at | Cluster Incl. R45447:yg43b01.s1 Homo sapiens cDNA, | 0.168282876 | 0.001526 |
| | 3 end /clone = IMAGE-35226 /clone_end = 3′ | | |
| | /gb = R45447 /gi = 820704 /ug = Hs.4213 /len = 537′ | | |
| 50938_at | Cluster Incl. AA778522:af85g10.s1 Homo sapiens cDNA, | 0.168035248 | 0.016005 |
| | 3 end /clone = 1048866 /clone_end = 3′ | | |
| | /gb = AA778522 /gi = 2837853 /ug = Hs.233824 /len = 499′ | | |
| 64151_r_a | Cluster Incl. H23482:ym57d12.s1 Homo sapiens cDNA, | 0.16558005 | 0.001158 |
| | 3 end /clone = IMAGE-52543 /clone_end = 3′ | | |
| | /gb = H23482 /gi = 892177 /ug = Hs.24088 /len = 560′ | | |
| 58065_at | Cluster Incl. AI765978:wj23a01.x1 Homo sapiens cDNA, | 0.165471752 | 0 |
| | 3 end /clone = IMAGE-2403624 /clone_end = 3′ | | |
| | /gb = AI765978 /gi = 5232487 /ug = Hs.122909 /len = 338′ | | |
| 62968_at | Cluster Incl. AI290476:ql98b08.x1 Homo sapiens cDNA, | 0.161962046 | 0.010789 |
| | 3 end /clone = IMAGE-1880343 /clone_end = 3′ | | |
| | /gb = AI290476 /gi = 3933250 /ug = Hs.87597 /len = 491′ | | |
| 61929_at | Cluster Incl. AW024884:wu92c03.x1 Homo sapiens cDNA, | 0.15832857 | 0.018434 |
| | 3 end /clone = IMAGE-990839 /clone_end = 3′ | | |
| | /gb = AW024884 /gi = 5878414 /ug = Hs.134478 /len = 472′ | | |
| 64925_at | Cluster Incl. AI307808:tb28d05.x1 Homo sapiens cDNA, | 0.158241319 | 0.001113 |
| | 3 end /clone = IMAGE-2055657 /clone_end = 3′ | | |
| | /gb = AI307808 /gi = 4002412 /ug = Hs.7402 /len = 622′ | | |
| 49042_at | Cluster Incl. AA402161:zu55f06.r1 Homo sapiens cDNA, | 0.156140952 | 0.000036 |
| | 5 end /clone = IMAGE-741923 /clone_end = 5′ | | |
| | /gb = AA402161 /gi = 2056126 /ug = Hs.239890 /len = 540′ | | |
| 61681_at | Cluster Incl. AA921922:om40h06.s1 Homo sapiens cDNA, | 0.147708822 | 0.012553 |
| | 3 end /clone = IMAGE-1543547 /clone_end = 3′ | | |
| | /gb = AA921922 /gi = 3069231 /ug = Hs.31412 /len = 488′ | | |
| 62723_r_a | Cluster Incl. AI590722:tw87h05.x1 Homo sapiens cDNA, | 0.137146209 | 0.014933 |
| | 3 end /clone = IMAGE-2266713 /clone_end = 3′ | | |
| | /gb = AI590722 /gi = 4599770 /ug = Hs.167569 /len = 691′ | | |
| 62817_at | Cluster Incl. AI201812:qi42c12.x1 Homo sapiens cDNA, | 0.13454914 | 0.007808 |
| | 3 end /clone = IMAGE-1859158 /clone_end = 3′ | | |
| | /gb = AI201812 /gi = 3754418 /ug = Hs.148587 /len = 464′ | | |
| 63131_i_a | Cluster Incl. R11248:yf41c02.r1 Homo sapiens cDNA, | 0.133193785 | 0.00248 |
| | 5 end /clone = IMAGE-129410 /clone_end = 5′ | | |
| | /gb = R11248 /gi = 763983 /ug = Hs.191935 /len = 456′ | | |
| 60231_at | Cluster Incl. W20054:zb40a08.r1 Homo sapiens cDNA, | 0.128912912 | 0.00004 |
| | 5 end /clone = IMAGE-306038 /clone_end = 5′ | | |
| | /gb = W20054 /gi = 1295925 /ug = Hs.102987 /len = 574′ | | |
| 63059_r_a | Cluster Incl. T79615:yd71e05.s1 Homo sapiens cDNA, | 0.109126683 | 0.000031 |
| | 3 end /clone = IMAGE-113696 /clone_end = 3′ | | |
| | /gb = T796.15 /gi = 698124 /ug = Hs.184260 /len = 569′ | | |
| 54320_at | Cluster Incl. AI962905:wt24f04.x1 Homo sapiens cDNA, | 0.103706856 | 0 |
| | 3 end /clone = IMAGE-2508415 /clone_end = 3′ | | |
| | /gb = AI962905 /gi = 5755618 /ug = Hs.86030 /len = 617′ | | |
| 61755_i_a | Cluster Incl. W67816:zd38a02.r1 Homo sapiens cDNA, | 0.098989494 | 0.012557 |
| | 5 end /clone = IMAGE-342890 /clone_end = 5′ | | |
| | /gb = W67816 /gi = 1376706 /ug = Hs.110196 /len = 599′ | | |
| 51794_at | Cluster Incl. AI971202:wr26d09.x1 Homo sapiens cDNA, | 0.082261318 | 0.000014 |
| | 3 end /clone = IMAGE-2488817 /clone_end = 3′ | | |
| | /gb = AI971202 /gi = 5768028 /ug = Hs.239290 /len = 587′ | | |
| 65618_at | Cluster Incl. AI672527:wb32c06.x1 Homo sapiens cDNA, | 0.078251936 | 0.000052 |
| | 3 end /clone = IMAGE-2307370 /clone_end = 3′ | | |
| | /gb = AI672527 /gi = 4852258 /ug = Hs.27836 /len = 529′ | | |
| 62998_at | Cluster Incl. AI831452:wj49b03.x1 Homo sapiens cDNA, | 0.07541159 | 0.004277 |
| | 3 end /clone = IMAGE-2406125 /clone_end = 3′ | | |
| | /gb = AI831452 /gi = 5452123 /ug = Hs.91539 /len = 597′ | | |
| 57186_at | Cluster Incl. AI979.134:wr70h09.x1 Homo sapiens cDNA, | 0.073273444 | 0.000306 |
| | 3 end /clone = IMAGE-2493089 /clone_end = 3′ | | |
| | /gb = AI979134 /gi = 5804164 /ug = Hs.230154 /len = 494′ | | |
| 60228_at | Cluster Incl. R24011:yh29e05.r1 Homo sapiens cDNA, | 0.059028357 | 0.000122 |
| | 5 end /clone = IMAGE-131168 /clone_end = 5′ | | |
| | /gb = R24011 /gi = 778899 /ug = Hs.100931 /len = 456′ | | |
| 54791_at | Cluster Incl. AI620463:tu56a09.x1 Homo sapiens cDNA, | 0.057352223 | 0.000062 |
| | 3 end /clone = IMAGE-2255032 /clone_end = 3′ | | |
| | /gb = AI620463 /gi = 4629589 /ug = Hs.99197 /len = 468′ | | |
| 60587_at | Cluster Incl. AI694073:wc82e02.x1 Homo sapiens cDNA, | 0.052183792 | 0.00012 |
| | 3 end /clone = IMAGE-2325146 /clone_end = 3′ | | |
| | /gb = AI694073 /gi = 4971413 /ug = Hs.48956 /len = 443′ | | |
| 54805_at | Cluster Incl. AI623978:ts25b06.x1 Homo sapiens cDNA, | 0.04331356 | 0.000001 |
| | 3 end /clone = IMAGE-2229587 /clone_end = 3′ | | |
| | /gb = AI623978 /gi = 4648909 /ug = Hs.99384 /len = 461′ | | |
| 62247_at | Cluster Incl. W68630:zd36c11.s1 Homo sapiens cDNA, | 0.035040967 | 0.000179 |
| | 3 end /clone = IMAGE-342740 /clone_end = 3′ | | |
| | /gb = W68630 /gi = 1377499 /ug = Hs.161566 /len = 510′ | | |
| 66443_at | Cluster Incl. AA775536:zf23h10.s1 Homo sapiens cDNA, | 0.032947258 | 0.000713 |
| | 3 end /clone = 377827 /clone_end = 3′ | | |
| | /gb = AA775536 /gi = 2834870 /ug = Hs.121824 /len = 368′ | | |
| 61756_r_a | Cluster Incl. W67816:zd38a02.r1 Homo sapiens cDNA, | 0.024870079 | 0.002205 |
| | 5 end /clone = IMAGE-342890 /clone_end = 5′ | | |
| | /gb = W67816 /gi = 1376706 /ug = Hs.110196 /len = 599′ | | |
| 66392_at | Cluster Incl. AA743820:ny29f11.s1 Homo sapiens cDNA | 0.020219012 | 0.000042 |
| | /clone = IMAGE-1273197 /gb = AA743820 /gi = 2783171 | | |
| | /ug = Hs.120606 /len = 466 | | |

[0140] TABLE 5
U95_D Fold Change Genes (>3 over-expressed in Barrett's associated
esophageal adenocarcinoma (BA), <0.33 under-expressed in BA)

| Affy ID | Gene Name | Fold Change | P-value |
|---|---|---|---|
| 72629_at | Cluster Incl. AI308063:tb22f06.x1 Homo sapiens cDNA, | 126.8832056 | 0.000003 |
| | 3 end /clone = IMAGE-2055107 /clone_end = 3′ | | |
| | /gb = AI308063 /gi = 4002698 /ug = Hs.222212 /len = 205′ | | |
| 89917_at | Cluster Incl. AW005911:wz90g01.x1 Homo sapiens cDNA, | 33.92289597 | 0.000005 |
| | 3 end /clone = IMAGE-2566128 /clone_end = 3′ | | |
| | /gb = AW005911 /gi = 5854701 /ug = Hs.234064 /len = 485′ | | |
| 86031_at | Cluster Incl. AI803868:tp36g05.x1 Homo sapiens cDNA, | 18.75245815 | 0.001902 |
| | 3 end /clone = IMAGE-2189912 /clone_end = 3′ | | |
| | /gb = AI803868 /gi = 5369329 /ug = Hs.177164 /len = 274′ | | |
| 89895_f_a | Cluster Incl. AW001128:wu24f06.x1 Homo sapiens cDNA, | 17.33803078 | 0.000302 |
| | 3 end /clone = IMAGE-990870 /clone_end = 3′ | | |
| | /gb = AW001128 /gi = 5848044 /ug = Hs.233945 /len = 239′ | | |
| 74815_at | Cluster Incl. AI864016:wj53h10.x1 Homo sapiens cDNA, | 17.16521833 | 0.002611 |
| | 3 end /clone = IMAGE-2406595 /clone_end = 3′ | | |
| | /gb = AI864016 /gi = 5528123 /ug = Hs.234375 /len = 511′ | | |
| 90481_at | Cluster Incl. AI125252:qd87h06.x1 Homo sapiens cDNA, | 15.90611723 | 0.000001 |
| | 3 end /clone = IMAGE-1736507 /clone_end = 3′ | | |
| | /gb = AI125252 /gi = 3593766 /ug = Hs.126419 /len = 466′ | | |
| 77946_at | Cluster Incl. AI744130:wc36f07.x1 Homo sapiens cDNA, | 14.72840034 | 0.00036 |
| | 3 end /clone = IMAGE-2317285 /clone_end = 3′ | | |
| | /gb = AI744130 /gi = 5112418 /ug = Hs.131201 /len = 483′ | | |
| 78668_r_a | Cluster Incl. AI673818:to73f12.x1 Homo sapiens cDNA, | 14.66402976 | 0.003391 |
| | 3 end /clone = IMAGE-2183951 /clone end = 3′ | | |
| | /gb = AI673818 /gi = 4853549 /ug = Hs.134665 /len = 201′ | | |
| 73337_at | Cluster Incl. AI355709:qt56h08.x1 Homo sapiens cDNA, | 12.24921906 | 0.001589 |
| | 3 end /clone = IMAGE-1952031 /clone_end = 3′ | | |
| | /gb = AI355709 /gi = 4095862 /ug = Hs.225823 /len = 460′ | | |
| 73859_at | Cluster Incl. AW008822:ws71h07.x1 Homo sapiens cDNA, | 12.03887849 | 0.000945 |
| | 3 end /clone = IMAGE-2502685 /clone_end = 3′ | | |
| | /gb = AW008822 /gi = 5857600 /ug = Hs.231934 /len = 369′ | | |
| 74904_at | Cluster Incl. AI984156:wu21d07.x1 Homo sapiens cDNA, | 11.93939119 | 0.000234 |
| | 3 end /clone = IMAGE-990944 /clone_end = 3′ | | |
| | /gb = AI984156 /gi = 5811375 /ug = Hs.235120 /len = 436′ | | |
| 85022_at | Cluster Incl. AI039701:ox32g01.s1 Homo sapiens cDNA, | 10.15512075 | 0.000008 |
| | 3 end /clone = IMAGE-1658064 /clone_end = 3′ | | |
| | /gb = AI039701 /gi = 3278895 /ug = Hs.167408 /len = 447′ | | |
| 74036_at | Cluster Incl. AW015189:UI-H-BI0p-aba-c-08-0-UI.s1 Homo sapiens cDNA, | 9.081911797 | 0.010398 |
| | 3 end /clone = IMAGE-2711054 /clone end = 3′ | | |
| | /gb = AW015189 /gi = 5863876 /ug = Hs.232065 /len = 407′ | | |
| 87776_at | Cluster Incl. AI023610:ov80c08.s1 Homo sapiens cDNA, | 8.799715822 | 0.000913 |
| | 3 end /clone = IMAGE-1643630 /clone_end = 3′ | | |
| | /gb = AI023610 /gi = 3238654 /ug = Hs.190586 /len = 436′ | | |
| 82342_at | Cluster Incl. AI675419:wb99b08.x1 Homo sapiens cDNA, | 7.772438703 | 0.014188 |
| | 3 end /clone = IMAGE-2313783 /clone_end = 3′ | | |
| | /gb = AI675419 /gi = 4875899 /ug = Hs.164464 /len = 504′ | | |
| 83665_at | Cluster Incl. AI375018:ta54d05.x1 Homo sapiens cDNA, | 7.219466585 | 0.005004 |
| | 3 end /clone = IMAGE-2047881 /clone_end = 3′ | | |
| | /gb = AI375018 /gi = 4175008 /ug = Hs.158717 /len = 474′ | | |
| 71502_at | Cluster Incl. AI910824:wi45g06.x1 Homo sapiens cDNA, | 7.213872979 | 0.000034 |
| | 3 end /clone = IMAGE-2393242 /clone_end = 3′ | | |
| | /gb = AI910824 /gi = 5630560 /ug = Hs.214202 /len = 235′ | | |
| 71136_at | Cluster Incl. AA631215:nq80g07.s1 Homo sapiens cDNA, | 7.099901302 | 0.001724 |
| | 3 end /clone = IMAGE-1158684 /clone_end = 3′ | | |
| | /gb = AA631215 /gi = 2553826 /ug = Hs.212640 /len = 491′ | | |
| 83222_at | Cluster Incl. AA911052:ok65e02.s1 Homo sapiens cDNA, | 7.077863313 | 0.005694 |
| | 3 end /clone = IMAGE-1518842 /clone_end = 3′ | | |
| | /gb = AA911052 /gi = 3050342 /ug = Hs.174950 /len = 451′ | | |
| 69494_at | Cluster Incl. AI703451:we24d06.x1 Homo sapiens cDNA, | 6.987691644 | 0.005066 |
| | 3 end /clone = IMAGE-2342027 /clone_end = 3′ | | |
| | /gb = AI703451 /gi = 4991351 /ug = Hs.202656 /len = 433′ | | |
| 70836_i_a | Cluster Incl. AI824055:wj35e12.x1 Homo sapiens cDNA, | 6.70015517 | 0.003057 |
| | 3 end /clone = IMAGE-2404846 /clone_end = 3′ | | |
| | /gb = AI824055 /gi = 5444726 /ug = Hs.211396 /len = 577′ | | |
| 74989_at | Cluster Incl. AW007442:wt55g06.x1 Homo sapiens cDNA, | 6.403445233 | 0.000249 |
| | 3 end /clone = IMAGE-2511418 /clone_end = 3′ | | |
| | /gb = AW007442 /gi = 5856220 /ug = Hs.235961 /len = 424′ | | |
| 74767_at | Cluster Incl AI869919:we75h03.x1 Homo sapiens cDNA, | 6.279662141 | 0.000435 |
| | 3 end /clone = IMAGE-2346965 /clone_end = 3′ | | |
| | /gb = AI869919 /gi = 5543887 /ug = Hs.234197 /len = 279′ | | |
| 76918_at | Cluster Incl. AI732969:oh70b01.x5 Homo sapiens cDNA, | 6.121303029 | 0.002211 |
| | 3 end /clone = IMAGE-1472329 /clone_end = 3′ | | |
| | /gb = AI732969 /gi = 5054082 /ug = Hs.126245 /len = 536′ | | |
| 74336_at | Cluster Incl. AW026718:wv44b03.x1 Homo sapiens cDNA, | 5.852600413 | 0.003442 |
| | 3 end /clone = IMAGE-990720 /clone_end = 3′ | | |
| | /gb = AW026718 /gi = 5880171 /ug = Hs.233303 /len = 693′ | | |
| 79398_at | Cluster Incl. AA580664:nd41b07.r1 Homo sapiens cDNA, | 5.528854288 | 0.013039 |
| | 5 end /clone = IMAGE-802837 /clone_end = 5′ | | |
| | /gb = AA580664 /gi = 2358321 /ug = Hs.142944 /len = 488′ | | |
| 81693_at | Cluster Incl. AI582751:tn17b08.x1 Homo sapiens cDNA, | 5.400844754 | 0.003535 |
| | 3 end /clone = IMAGE-2167863 /clone_end = 3′ | | |
| | /gb = AI582751 /gi = 4568648 /ug = Hs.159028 /len = 416′ | | |
| 76515_at | Cluster Incl. AA777011:zf28a12.s1 Homo sapiens cDNA, | 5.2764043 | 0.000093 |
| | 3 end /clone = 378238 /clone_end = 3′ | | |
| | /gb = AA777011 /gi = 2836342 /ug = Hs.122678 /len = 485′ | | |
| 74689_at | Cluster Incl. AW003135:wq63a10.x1 Homo sapiens cDNA, | 5.204740505 | 0.017468 |
| | 3 end /clone = IMAGE-2475930 /clone_end = 3′ | | |
| | /gb = AW003135 /gi = 5850051 /ug = Hs.234003 /len = 416′ | | |
| 89483_i_a | Cluster Incl. AI804066:tc60h05.x1 Homo sapiens cDNA, | 5.160756744 | 0.000671 |
| | 3 end /clone = IMAGE-2069049 /clone_end = 3′ | | |
| | /gb = AI804066 /gi = 5369538 /ug = Hs.210477 /len = 300′ | | |
| 80829_at | Cluster Incl. AA210905:zr90h02.r1 Homo sapiens cDNA, | 5.152266697 | 0.002582 |
| | 5 end /clone = IMAGE-682995 /clone_end = 5′ | | |
| | /gb = AA210905 /gi = 1809551 /ug = Hs.151875 /len = 588′ | | |
| 81411_at | Cluster Incl. AI339743:qq42g10.x1 Homo sapiens cDNA, | 5.081809717 | 0.000737 |
| | 3 end /clone = IMAGE-1935234 /clone_end = 3′ | | |
| | /gb = AI339743 /gi = 4076670 /ug = Hs.157177 /len = 476′ | | |
| 75224_s_{—} | Cluster Incl. AI992172:wt75e05.x1 Homo sapiens cDNA, | 5.038001155 | 0.000025 |
| | 3 end /clone = IMAGE-2513312 /clone_end = 3′ | | |
| | /gb = AI992172 /gi = 5839077 /ug = Hs.237455 /len = 762′ | | |
| 81496_at | Cluster Incl. AI870708:wl47h10.x1 Homo sapiens cDNA, | 5.031768797 | 0.000144 |
| | 3 end /clone = IMAGE-2428099 /clone_end = 3′ | | |
| | /gb = AI870708 /gi = 5544676 /ug = Hs.157601 /len = 398′ | | |
| 75258_f_a | Cluster Incl. AA224344:zr16d12.s1 Homo sapiens cDNA, | 5.018648158 | 0.002285 |
| | 3 end /clone = IMAGE-663575 /clone_end = 3′ | | |
| | /gb = AA224344 /gi = 1844967 /ug = Hs.237937 /len = 420′ | | |
| 75017_r_a | Cluster Incl. AW006583:wr25f01.x1 Homo sapiens cDNA, | 5.01502499 | 0.000541 |
| | 3 end /clone = IMAGE-2488729 /clone_end = 3′ | | |
| | /gb = AW006583 /gi = 5855361 /ug = Hs.236125 /len = 124′ | | |
| 73095_at | Cluster Incl. AI335277:tb29h06.x1 Homo sapiens cDNA, | 4.940911102 | 0.001852 |
| | 3 end /clone = IMAGE-2055803 /clone_end = 3′ | | |
| | /gb = AI335277 /gi = 4072204 /ug = Hs.224764 /len = 388′ | | |
| 77486_at | Cluster Incl. AA976712:oq06d04.s1 Homo sapiens cDNA, | 4.920359602 | 0.022545 |
| | 3 end /clone = IMAGE-1585543 /clone_end = 3′ | | |
| | /gb = AA976712 /gi = 3154158 /ug = Hs.128899 /len = 463′ | | |
| 87087_at | Cluster Incl. AI283643:qj67c11.x1 Homo sapiens cDNA, | 4.810346144 | 0.008358 |
| | 3 end /clone = IMAGE-1864532 /clone_end = 3′ | | |
| | /gb = AI283643 /gi = 3921876 /ug = Hs.188120 /len = 447′ | | |
| 73385_at | Cluster Incl. AA252082:zr63f09.s1 Homo sapiens cDNA, | 4.801518841 | 0.000861 |
| | 3 end /clone = IMAGE-668105 /clone_end = 3′ | | |
| | /gb = AA252082 /gi = 1887043 /ug = Hs.226391 /len = 399′ | | |
| 84678_i_a | Cluster Incl. AI056542:oy98c12.x1 Homo sapiens cDNA, | 4.720912558 | 0.002732 |
| | 3 end /clone = IMAGE-1673878 /clone_end = 3′ | | |
| | /gb = AI056542 /gi = 3330408 /ug = Hs.164276 /len = 361′ | | |
| 75737_g_{—} | Cluster Incl. AA625990:zu92h03.s1 Homo sapiens cDNA, | 4.719254539 | 0.004595 |
| | 3 end /clone = IMAGE-745493 /clone_end = 3′ | | |
| | /gb = AA625990 /gi = 2538377 /ug = Hs.116114 /len = 432′ | | |
| 77706_at | Cluster Incl. AA641972:ns18f01.r1 Homo sapiens cDNA, | 4.716780979 | 0.009315 |
| | 5 end /clone = IMAGE-1183993 /clone_end = 5′ | | |
| | /gb = AA641972 /gi = 2567190 /ug = Hs.130058 /len = 447′ | | |
| 75242_f_a | Cluster Incl. AW001140:wu24g09.x1 Homo sapiens cDNA, | 4.701250066 | 0.011085 |
| | 3 end /clone = IMAGE-990899 /clone_end = 3′ | | |
| | /gb = AW001140 /gi = 5848056 /ug = Hs.237782 /len = 415′ | | |
| 84996_at | Cluster Incl. AI379186:tc66d08.x1 Homo sapiens cDNA, | 4.6838985 | 0.001649 |
| | 3 end /clone = IMAGE-2069583 /clone_end = 3′ | | |
| | /gb = AI379186 /gi = 4189039 /ug = Hs.167183 /len = 473′ | | |
| 90289_at | Cluster Incl. AI827330:wl10d06.x1 Homo sapiens cDNA, | 4.653039196 | 0.014564 |
| | 3 end /clone = IMAGE-2424491 /clone_end = 3′ | | |
| | /gb = AI827330 /gi = 5448001 /ug = Hs.120750 /len = 435′ | | |
| 78672_at | Cluster Incl. AI276246:ql65e01.x1 Homo sapiens cDNA, | 4.623270914 | 0.000543 |
| | 3 end /clone = IMAGE-1877208 /clone_end = 3′ | | |
| | /gb = AI276246 /gi = 3898520 /ug = Hs.134702 /len = 473′ | | |
| 77739_i_a | Cluster Incl. AA910562:ok66g12.s1 Homo sapiens cDNA, | 4.589575228 | 0.00161 |
| | 3 end /clone = IMAGE-1518982 /clone_end = 3′ | | |
| | /gb = AA910562 /gi = 3049852 /ug = Hs.130207 /len = 416′ | | |
| 89820_at | Cluster Incl. AI828439:wk85b01.x1 Homo sapiens cDNA, | 4.574990842 | 0.016532 |
| | 3 end /clone = IMAGE-2422153 /clone_end = 3′ | | |
| | /gb = AI828439 /gi = 5449110 /ug = Hs.231580 /len = 388′ | | |
| 80876_at | Cluster Incl. AA513406:ne59g08.s1 Homo sapiens cDNA, | 4.547281772 | 0.019458 |
| | 3 end /clone = IMAGE-901694 /clone_end = 3′ | | |
| | /gb = AA513406 /gi = 2251818 /ug = Hs.152307 /len = 467′ | | |
| 83883_at | Cluster Incl. AA927837:on79e06.s1 Homo sapiens cDNA, | 4.503173747 | 0.011657 |
| | 3 end /clone = IMAGE-1562914 /clone_end = 3′ | | |
| | /gb = AA927837 /gi = 3077127 /ug = Hs.160112 /len = 348′ | | |
| 74077_at | Cluster Incl. AA888985:ak24f07.s1 Homo sapiens cDNA, | 4.464473172 | 0.004661 |
| | 3 end /clone = IMAGE-1406917 /clone_end = 3′ | | |
| | /gb = AA888985 /gi = 3015855 /ug = Hs.232115 /len = 369′ | | |
| 92121_r_a | Cluster Incl. AI022636:ox05f02.x1 Homo sapiens cDNA, | 4.380454753 | 0.045704 |
| | 3 end /clone = IMAGE-1655451 /clone_end = 3′ | | |
| | /gb = AI022636 /gi = 3237877 /ug = Hs.175531 /len = 495′ | | |
| 80193_at | Cluster Incl. AI130878:qc14d09.x1 Homo sapiens cDNA, | 4.312572045 | 0.005574 |
| | 3 end /clone = IMAGE-1709585 /clone_end = 3′ | | |
| | /gb = AI130878 /gi = 3600894 /ug = Hs.146517 /len = 432′ | | |
| 70825_at | Cluster Incl. AI301513:qn44h05.x1 Homo sapiens cDNA, | 4.257879375 | 0.000701 |
| | 3 end /clone = IMAGE-1901145 /clone_end = 3′ | | |
| | /gb = AI301513 /gi = 3960859 /ug = Hs.211386 /len = 427′ | | |
| 78478_r_a | Cluster Incl. H89231:yw25g04.r1 Homo sapiens cDNA, | 4.235271418 | 0.004183 |
| | 5 end /clone = IMAGE-253302 /clone_end = 5′ | | |
| | /gb = H89231/gi = 1071491/ug = Hs.133504 /len = 395′ | | |
| 90910_at | Cluster Incl. AI091388:oo26f02.x1 Homo sapiens cDNA, | 4.208360659 | 0.005383 |
| | 3 end /clone = IMAGE-1567323 /clone_end = 3′ | | |
| | /gb = AI091388 /gi = 3430447 /ug = Hs.134855 /len = 485′ | | |
| 81303._at | Cluster Incl. AI346656:qp52b03.x1 Homo sapiens cDNA, | 4.20318803 | 0.031305 |
| | 3 end /clone = IMAGE-1926605 /clone_end = 3′ | | |
| | /gb = AI346656 /gi = 4083862 /ug = Hs.156652 /len = 585′ | | |
| 82896_at | Cluster Incl. AI476732:tm23f10.x1 Homo sapiens cDNA, | 4.169388472 | 0.037823 |
| | 3 end /clone = IMAGE-2157451/clone_end = 3′ | | |
| | /gb = AI476732 /gi = 4329777 /ug = Hs.170624 /len = 446′ | | |
| 87624_at | Cluster Incl. AA668464:ab86a05.s1 Homo sapiens cDNA, | 4.167316157 | 0.002637 |
| | 3 end /clone = IMAGE-853808 /clone_end = 3′ | | |
| | /gb = AA668464 /gi = 2629963 /ug = Hs.190309 /len = 328′ | | |
| 91225_at | Cluster Incl. AW015211:UI-H-BI0p-aba-e-11-0-UI.s1 Homo sapiens cDNA, | 4.164345384 | 0.00008 |
| | 3 end /clone = IMAGE-2711156 /clone_end = 3′ | | |
| | /gb = AW015211/gi = 5863898 /ug = Hs.146181/len = 471′ | | |
| 81939_at | Cluster Incl. AI417773:th31c01.x1 Homo sapiens cDNA, | 4.138057591 | 0.004722 |
| | 3 end /clone = IMAGE-2119872 /clone end = 3′ | | |
| | /gb = AI417773 /gi = 4261277 /ug = Hs.161145 /len = 382′ | | |
| 69357_at | Cluster Incl. AI753726:cr14c07.x1 Homo sapiens cDNA, | 4.130344884 | 0.001956 |
| | 3 end /clone = HBMSC_cr14c07 /clone_end = 3′ | | |
| | /gb = AI753726 /gi = 5131990 /ug = Hs.202333 /len = 449′ | | |
| 77353_at | Cluster Incl. AI733279:oo46f12.x5 Homo sapiens cDNA, | 4.121422229 | 0.008861 |
| | 3 end /clone = IMAGE-1569263 /clone_end = 3′ | | |
| | /gb = AI733279 /gi = 5054392 /ug = Hs.128317 /len = 271′ | | |
| 79696_at | Cluster Incl. AA013440:ze26e09.s1 Homo sapiens cDNA, | 4.09631447 | 0.012229 |
| | 3 end /clone = IMAGE-360136 /clone_end = 3′ | | |
| | /gb = AA013440 /gi = 1474486 /ug = Hs.144252 /len = 463′ | | |
| 86510_at | Cluster Incl. AI076326:oy95d08.x1 Homo sapiens cDNA, | 4.086715666 | 0.025182 |
| | 3 end /clone = IMAGE-1673583 /clone end = 3′ | | |
| | /gb = AI076326 /gi = 3405504 /ug = Hs.185677 /len = 441′ | | |
| 79369_at | Cluster Incl. AA927001:om26d10.s1 Homo sapiens cDNA, | 4.051608302 | 0.000344 |
| | 3 end /clone = IMAGE-1542163 /clone_end = 3′ | | |
| | /gb = AA927001/gi = 3075898 /ug = Hs.142584 /len = 346′ | | |
| 88942_at | Cluster Incl. AI300447:qo13f06.x1 Homo sapiens cDNA, | 4.040588934 | 0.013394 |
| | 3 end /clone = IMAGE-1908419 /clone_end = 3′ | | |
| | /gb = AI300447 /gi = 3959793 /ug = Hs.202429 /len = 327′ | | |
| 84125_at | Cluster Incl. R86170:yp88e07.r1 Homo sapiens cDNA, | 4.014774285 | 0.00934 |
| | 5 end /clone = IMAGE-194532 /clone_end = 5′ | | |
| | /gb = R86170 /gi = 944576 /ug = Hs.161221 /len = 467′ | | |
| 73210_at | Cluster Incl. AI872472:ty42e07.x1 Homo sapiens cDNA, | 4.008599635 | 0.001324 |
| | 3 end /clone = IMAGE-2281764 /clone_end = 3′ | | |
| | /gb = AI872472 /gi = 5546521 /ug = Hs.225040 /len = 401′ | | |
| 78569_at | Cluster Incl. AI700684:we39c12.x1 Homo sapiens cDNA, | 4.002473204 | 0.000006 |
| | 3 end /clone = IMAGE-2343478 /clone_end = 3′ | | |
| | /gb = AI700684 /gi = 4988584 /ug = Hs.134166 /len = 571′ | | |
| 77117_at | Cluster Incl. AA938245:oo95b09.s1 Homo sapiens cDNA, | 3.972806977 | 0.012473 |
| | 3 end /clone = IMAGE-1573913 /clone_end = 3′ | | |
| | /gb = AA938245 /gi = 3096356 /ug = Hs.127160 /len = 421′ | | |
| 70838_r_a | Cluster Incl. AI824055:wj35e12.x1 Homo sapiens cDNA, | 3.946917752 | 0.023713 |
| | 3 end /clone = IMAGE-2404846 /clone_end = 3′ | | |
| | /gb = AI824055 /gi = 5444726 /ug = Hs.211396 /len = 577′ | | |
| 91676_at | Cluster Incl. AA534325:nf75e10.s1 Homo sapiens cDNA, | 3.926181357 | 0.019084 |
| | 3 end /clone = IMAGE-925770 /clone_end = 3′ | | |
| | /gb = AA534325 /gi = 2278578 /ug = Hs.162183 /len = 460′ | | |
| 68192_at | Cluster Incl. T92888:ye22e09.s1 Homo sapiens cDNA, | 3.901616313 | 0.014332 |
| | 3 end /clone = IMAGE-118504 /clone_end = 3′ | | |
| | /gb = T92888 /gi = 724801 /ug = Hs.191864 /len = 495′ | | |
| 84978_at | Cluster Incl. AI362920:qy81c11.x1 Homo sapiens cDNA, | 3.879227403 | 0.03697 |
| | 3 end /clone = IMAGE-2018420 /clone_end = 3′ | | |
| | /gb = AI362920 /gi = 4114541 /ug = Hs.167139 /len = 388′ | | |
| 82314_at | Cluster Incl. AI436813:th82h12.x1 Homo sapiens cDNA, | 3.836361251 | 0.02183 |
| | 3 end /clone = IMAGE-2125223 /clone_end = 3′ | | |
| | /gb = AI436813 /gi = 4284696 /ug = Hs.164217 /len = 508′ | | |
| 82070_at | Cluster Incl. AA564641:nj25e12.s1 Homo sapiens cDNA, | 3.77142292 | 0.003544 |
| | 3 end /clone = IMAGE-993550 /clone_end = 3′ | | |
| | /gb = AA564641 /gi = 2336280 /ug = Hs.162343 /len = 475′ | | |
| 79351_at | Cluster Incl. AA195514:zr33d12.s1 Homo sapiens cDNA, | 3.764326148 | 0.04421 |
| | 3 end /clone = IMAGE-665207 /clone end = 3′ | | |
| | /gb = AA195514 /gi = 1785400 /ug = Hs.142104 /len = 385′ | | |
| 84289_at | Cluster Incl. AI912393:tz05a01.x1 Homo sapiens cDNA, | 3.732611335 | 0.00756 |
| | 3 end /clone = IMAGE-2287656 /clone_end = 3′ | | |
| | /gb = AI912393 /gi = 5632248 /ug = Hs.162279 /len = 454′ | | |
| 70936_at | Cluster Incl. AI921300:wo23a09.x1 Homo sapiens cDNA, | 3.728217248 | 0.019033 |
| | 3 end /clone = IMAGE-2456152 /clone_end = 3′ | | |
| | /gb = AI921300 /gi = 5657264 /ug = Hs.211711 /len = 613′ | | |
| 74810_s_{—} | Cluster Incl. AW021074:df18e02.y1 Homo sapiens cDNA, | 3.722045457 | 0.00037 |
| | 5 end /clone = IMAGE-2483787 /clone_end = 5′ | | |
| | /gb = AW021074 /gi = 5874604 /ug = Hs.234355 /len = 351′ | | |
| 75014_i_a | Cluster Incl. AW006583:wr25f01.x1 Homo sapiens cDNA, | 3.681403454 | 0.000484 |
| | 3 end /clone = IMAGE-2488729 /clone_end = 3′ | | |
| | /gb = AW006583 /gi = 5855361 /ug = Hs.236125 /len = 124′ | | |
| 77741_r_a | Cluster Incl. AA910562:ok66g12.s1 Homo sapiens cDNA, | 3.68077061 | 0.004724 |
| | 3 end /clone = IMAGE-1518982 /clone_end = 3′ | | |
| | /gb = AA910562 /gi = 3049852 /ug = Hs.130207 /len = 416′ | | |
| 78304_at | Cluster Incl. AI056977:oy89d09.x1 Homo sapiens cDNA, | 3.617156362 | 0.013155 |
| | 3 end /clone = IMAGE-1673009 /clone_end = 3′ | | |
| | /gb = AI056977 /gi = 3330766 /ug = Hs.132900 /len = 459′ | | |
| 80124_at | Cluster Incl. AA643238:nr61f06.s1 Homo sapiens cDNA, | 3.580942752 | 0.001471 |
| | 3 end /clone = IMAGE-1172483 /clone_end = 3′ | | |
| | /gb = AA643238 /gi = 2568456 /ug = Hs.146144 /len = 476′ | | |
| 84304_at | Cluster Incl. AA521177:aa73f03.s1 Homo sapiens cDNA, | 3.57711283 | 0.002455 |
| | 3 end /clone = IMAGE-826589 /clone_end = 3′ | | |
| | /gb = AA521177 /gi = 2261720 /ug = Hs.162409 /len = 559′ | | |
| 89972_at | Cluster Incl. AI420969:te97b09.x1 Homo sapiens cDNA, | 3.575423765 | 0.007712 |
| | 3 end /clone = IMAGE-2094617 /clone_end = 3′ | | |
| | /gb = AI420969 /gi = 4266900 /ug = Hs.235870 /len = 383′ | | |
| 90581_at | Cluster Incl. AA974579:op28g10.s1 Homo sapiens cDNA, | 3.567570093 | 0.028452 |
| | 3 end /clone = IMAGE-1578210 /clone_end = 3′ | | |
| | /gb = AA974579 /gi = 3149759 /ug = Hs.128385 /len = 408′ | | |
| 74922_at | Cluster Incl. AW025554:wu97g07.x1 Homo sapiens cDNA, | 3.544362859 | 0.008025 |
| | 3 end /clone = IMAGE-990991 /clone_end = 3′ | | |
| | /gb = AW025554 /gi = 5879084 /ug = Hs.235239 /len = 443′ | | |
| 81319_at | Cluster Incl. AI686894:tp90h06.x1 Homo sapiens cDNA, | 3.538203629 | 0.01427 |
| | 3 end /clone = IMAGE-2206619 /clone_end = 3′ | | |
| | /gb = AI686894 /gi = 4898188 /ug = Hs.156704 /len = 476′ | | |
| 88620_at | Cluster Incl. AI970185:wr08c07.x1 Homo sapiens cDNA, | 3.533373724 | 0.00708 |
| | 3 end /clone = IMAGE-2480940 /clone_end = 3′ | | |
| | /gb = AI970185 /gi = 5767011 /ug = Hs.197641 /len = 514′ | | |
| 87615_r_a | Cluster Incl. AA626219:zv88a11.s1 Homo sapiens cDNA, | 3.515678463 | 0.030307 |
| | 3 end /clone = IMAGE-766844 /clone_end = 3′ | | |
| | /gb = AA626219 /gi = 2538606 /ug = Hs.190274 /len = 263′ | | |
| 77005_r_a | Cluster Incl. AA918616:ol67a12.s1 Homo sapiens cDNA, | 3.50824968 | 0.004026 |
| | 3 end /clone = IMAGE-1534654 /clone_end = 3′ | | |
| | /gb = AA918616 /gi = 3058506 /ug = Hs.126658 /len = 495′ | | |
| 81874_at | Cluster Incl. AI734974:as54e06.x1 Homo sapiens cDNA, | 3.495899557 | 0.042114 |
| | 3 end /clone = IMAGE-2332546 /clone_end = 3′ | | |
| | /gb = AI734974 /gi = 5056498 /ug = Hs.160604 /len = 506′ | | |
| 90190_at | Cluster Incl. AI819924:wj11c04.x1 Homo sapiens cDNA, | 3.492860427 | 0.000238 |
| | 3 end /clone = IMAGE-2402502 /clone_end = 3′ | | |
| | /gb = AI819924 /gi = 5439003 /ug = Hs.116559 /len = 534′ | | |
| 88949_at | Cluster Incl. AI744009:wc32f04.x1 Homo sapiens cDNA, | 3.484438351 | 0.000883 |
| | 3 end /clone = IMAGE-2316895 /clone_end = 3′ | | |
| | /gb = AI744009 /gi = 5112297 /ug = Hs.202451 /len = 568′ | | |
| 92039_at | Cluster Incl. AI955491:wt30e12.x1 Homo sapiens cDNA, | 3.436563997 | 0.006207 |
| | 3 end /clone = IMAGE-2509006 /clone_end = 3′ | | |
| | /gb = AI955491 /gi = 5747801 /ug = Hs.171372 /len = 671′ | | |
| 74868_at | Cluster Incl. AI991048:wu36c07.x1 Homo sapiens cDNA, | 3.42763578 | 0.000285 |
| | 3 end /clone = IMAGE-990847 /clone_end = 3′ | | |
| | /gb = AI991048 /gi = 5837945 /ug = Hs.234668 /len = 429′ | | |
| 85706_at | Cluster Incl. AI218358:qh21g07.x1 Homo sapiens cDNA, | 3.422351762 | 0.017153 |
| | 3 end /clone = IMAGE-1845372 /clone_end = 3′ | | |
| | /gb = AI218358 /gi = 3798173 /ug = Hs.175048 /len = 411′ | | |
| 71117_f_a | Cluster Incl. AI982832:wt44e02.x1 Homo sapiens cDNA, | 3.418516359 | 0.001844 |
| | 3 end /clone = IMAGE-2510330 /clone_end = 3′ | | |
| | /gb = AI982832 /gi = 5810051 /ug = Hs.212529 /len = 497′ | | |
| 68339_at | Cluster Incl. AI624028:ts25g07.x1 Homo sapiens cDNA, | 3.404452919 | 0.000617 |
| | 3 end /clone = IMAGE-2229660 /clone_end = 3′ | | |
| | /gb = AI624028 /gi = 4648959 /ug = Hs.192626 /len = 213′ | | |
| 78680_at | Cluster Incl. AA282171:zt02c06.s1 Homo sapiens cDNA, | 3.401834363 | 0.009019 |
| | 3 end /clone = IMAGE-711946 /clone_end = 3′ | | |
| | /gb = AA282171 /gi = 1925032 /ug = Hs.134740 /len = 427′ | | |
| 90436_at | Cluster Incl. W93113:zh45f06.s1 Homo sapiens cDNA, | 3.40090527 | 0.021093 |
| | 3 end /clone = IMAGE-415043 /clone_end = 3′ | | |
| | /gb = W93113 /gi = 1422275 /ug = Hs.125212 /len = 421′ | | |
| 81650_at | Cluster Incl. AA631047:nq77b01.s1 Homo sapiens cDNA, | 3.353588529 | 0.000357 |
| | 3 end /clone = IMAGE-1158313 /clone_end = 3′ | | |
| | /gb = AA631047 /gi = 2553658 /ug = Hs.158761 /len = 588′ | | |
| 73248_at | Cluster Incl. AI955755:wt59b10.x1 Homo sapiens cDNA, | 3.33387584 | 0.006207 |
| | 3 end /clone = IMAGE-2511739 /clone_end = 3′ | | |
| | /gb = AI955755 /gi = 5748065 /ug = Hs.225142 /len = 525′ | | |
| 73315_at | Cluster Incl. AI868289:tj44g02.x1 Homo sapiens cDNA, | 3.332728736 | 0.00066 |
| | 3 end /clone = IMAGE-2144402 /clone_end = 3′ | | |
| | /gb = AI868289 /gi = 5541305 /ug = Hs.225651 /len = 289′ | | |
| 67401_at | Cluster Incl. AI434675:ti35f10.x1 Homo sapiens cDNA, | 3.330352227 | 0.00106 |
| | 3 end /clone = IMAGE-2132491 /clone_end = 3′ | | |
| | /gb = AI434675 /gi = 4297838 /ug = Hs.164299 /len = 340′ | | |
| 76150_at | Cluster Incl. AA778773:zj41h06.s1 Homo sapiens cDNA, | 3.324537689 | 0.01164 |
| | 3 end /clone = 452891 /clone_end = 3′ | | |
| | /gb = AA778773 /gi = 2838104 /ug = Hs.119691 /len = 423′ | | |
| 75183_at | Cluster Incl. AI990633:ws22f07.x1 Homo sapiens cDNA, | 3.313399383 | 0.006284 |
| | 3 end /clone = IMAGE-2497957 /clone_end = 3′ | | |
| | /gb = AI990633 /gi = 5837514 /ug = Hs.237246 /len = 445′ | | |
| 80971_at | Cluster Incl. AI033377:ox03b10.s1 Homo sapiens cDNA, | 3.307979211 | 0.008879 |
| | 3 end /clone = IMAGE-1655227 /clone_end = 3′ | | |
| | /gb = AI033377 /gi = 3254330 /ug = Hs.153298 /len = 485′ | | |
| 86810_at | Cluster Incl. AI581415:to71f12.x1 Homo sapiens cDNA, | 3.286327472 | 0.027513 |
| | 3 end /clone = IMAGE-2183759 /clone_end = 3′ | | |
| | /gb = AI581415 /gi = 4565791 /ug = Hs.187260 /len = 392′ | | |
| 80261_s_{—} | Cluster Incl. AI961818:wt66g05.x1 Homo sapiens cDNA, | 3.248004767 | 0.00471 |
| | 3 end /clone = IMAGE-2512472 /clone_end = 3′ | | |
| | /gb = AI961818 /gi = 5754531 /ug = Hs.146916 /len = 643′ | | |
| 71177_at | Cluster Incl. AI921931:wn86g12.x1 Homo sapiens cDNA, | 3.241857044 | 0.020963 |
| | 3 end /clone = IMAGE-2452774 /clone_end = 3′ | | |
| | /gb = AI921931 /gi = 5657895 /ug = Hs.212815 /len = 516′ | | |
| 81927_at | Cluster Incl. AI417669:tg80g11.x1 Homo sapiens cDNA, | 3.235184899 | 0.038241 |
| | 3 end /clone = IMAGE-2115140 /clone_end = 3′ | | |
| | /gb = AI417669 /gi = 4261173 /ug = Hs.161134 /len = 391′ | | |
| 80623_s_{—} | Cluster Incl. AI640222:wa30f03.x1 Homo sapiens cDNA, | 3.218612679 | 0.008845 |
| | 3 end /clone = IMAGE-2299613 /clone_end = 3′ | | |
| | /gb = AI640222 /gi = 4703331 /ug = Hs.149993 /len = 451′ | | |
| 74696_r_a | Cluster Incl. AW003358:wq65g09.x1 Homo sapiens cDNA, | 3.216414783 | 0.000981 |
| | 3 end /clone = IMAGE-2476192 /clone_end = 3′ | | |
| | /gb = AW003358 /gi = 5850274 /ug = Hs.234010 /len = 406′ | | |
| 87133_at | Cluster Incl. AI275499:ql74d03.x1 Homo sapiens cDNA, | 3.215553093 | 0.029742 |
| | 3 end /clone = IMAGE-1878053 /clone_end = 3′ | | |
| | /gb = AI275499 /gi = 3897773 /ug = Hs.188350 /len = 472′ | | |
| 77363_at | Cluster Incl. AI651606:wb07c02.x1 Homo sapiens cDNA, | 3.205498008 | 0.0075 |
| | 3 end /clone = IMAGE-2304962 /clone_end = 3′ | | |
| | /gb = AI651606 /gi = 4735585 /ug = Hs.128395 /len = 588′ | | |
| 75791_f_a | Cluster Incl. AI821102:nr20h03.y5 Homo sapiens cDNA | 3.197729341 | 0.013912 |
| | /clone = IMAGE-1168565 /gb = AI821102 /gi = 5440181 | | |
| | /ug = Hs.116350 /len = 419 | | |
| 73261_at | Cluster Incl. AI692539:wd73e11.x1 Homo sapiens cDNA, | 3.194807353 | 0.000008 |
| | 3 end /clone = IMAGE-2337260 /clone_end = 3′ | | |
| | /gb = AI692539 /gi = 4969879 /ug = Hs.225186 /len = 534′ | | |
| 81717_at | Cluster Incl. AI375700:ta58g09.x1 Homo sapiens cDNA, | 3.189360956 | 0.024927 |
| | 3 end /clone = IMAGE-2048320 /clone_end = 3′ | | |
| | /gb = AI375700 /gi = 4175690 /ug = Hs.159185 /len = 407′ | | |
| 69102_at | Cluster Incl. AI950819:wx55f02.x1 Homo sapiens cDNA, | 3.182469138 | 0.037281 |
| | 3 end /clone = IMAGE-2547579 /clone_end = 3′ | | |
| | /gb = AI950819 /gi = 5743129 /ug = Hs.201680 /len = 484′ | | |
| 81452_at | Cluster Incl. AI421933:tf45a12.x1 Homo sapiens cDNA, | 3.159839766 | 0.024083 |
| | 3 end /clone = IMAGE-2099134 /clone_end = 3′ | | |
| | /gb = AI421933 /gi = 4267864 /ug = Hs.157383 /len = 465′ | | |
| 83115_at | Cluster Incl. AI346114:qp48f09.x1 Homo sapiens cDNA, | 3.143614459 | 0.003379 |
| | 3 end /clone = IMAGE-1926281 /clone_end = 3′ | | |
| | /gb = AI346114 /gi = 4083320 /ug = Hs.173495 /len = 458′ | | |
| 74630_r_a | Cluster Incl. AA995791:os29f07.s1 Homo sapiens cDNA, | 3.121958997 | 0.046206 |
| | 3 end /clone = IMAGE-1606789 /clone_end = 3′ | | |
| | /gb = AA995791 /gi = 3182280 /ug = Hs.233832 /len = 477′ | | |
| 80664_at | Cluster Incl. AI248671:qh66g01.x1 Homo sapiens cDNA, | 3.116104719 | 0.004129 |
| | 3 end /clone = IMAGE-1849680 /clone_end = 3′ | | |
| | /gb = AI248671 /gi = 3844068 /ug = Hs.150289 /len = 432′ | | |
| 78136_at | Cluster Incl. AI038623:ox39b12.s1 Homo sapiens cDNA, | 3.114649496 | 0.037841 |
| | 3 end /clone = IMAGE-1658687 /clone_end = 3′ | | |
| | /gb = AI038623 /gi = 3277817 /ug = Hs.132087 /len = 452′ | | |
| 68888_at | Cluster Incl. AI671829:wb34d12.x1 Homo sapiens cDNA, | 3.114197965 | 0.03414 |
| | 3 end /clone = IMAGE-2307575 /clone_end = 3′ | | |
| | /gb = AI671829 /gi = 4851560 /ug = Hs.200573 /len = 504′ | | |
| 79683_at | Cluster Incl. AI223034:qg52h05.x1 Homo sapiens cDNA, | 3.104715847 | 0.018458 |
| | 3 end /clone = IMAGE-1838841 /clone_end = 3′ | | |
| | /gb = AI223034 /gi = 3805237 /ug = Hs.144137 /len = 497′ | | |
| 75012_at | Cluster Incl. AI989698:ws35d09.x1 Homo sapiens cDNA, | 3.103880371 | 0.037238 |
| | 3 end /clone = IMAGE-2499185 /clone_end = 3′ | | |
| | /gb = AI989698 /gi = 5836579 /ug = Hs.236112 /len = 380′ | | |
| 67147_at | Cluster Incl. AI040048:ox28a08.x1 Homo sapiens cDNA, | 3.098224539 | 0.032493 |
| | 3 end /clone = IMAGE-1657622 /clone_end = 3′ | | |
| | /gb = AI040048 /gi = 3279242 /ug = Hs.157207 /len = 416′ | | |
| 72075_at | Cluster Incl. AA279019:zs83a10.s1 Homo sapiens cDNA, | 3.08870358 | 0.004529 |
| | 3 end /clone = IMAGE-704058 /clone_end = 3′ | | |
| | /gb = AA279019 /gi = 1920638 /ug = Hs.221039 /len = 445′ | | |
| 69524_at | Cluster Incl. AI739558:wi35a05.x1 Homo sapiens cDNA, | 3.079273337 | 0.033429 |
| | 3 end /clone = IMAGE-2392208 /clone_end = 3′ | | |
| | /gb = AI739558 /gi = 5101539 /ug = Hs.203481 /len = 335′ | | |
| 72512_at | Cluster Incl. AA653151:ag64c01.s1 Homo sapiens cDNA, | 3.065825864 | 0.041772 |
| | 3 end /clone = IMAGE-1127712 /clone_end = 3′ | | |
| | /gb = AA653151 /gi = 2589322 /ug = Hs.222057 /len = 408′ | | |
| 71211_at | Cluster Incl. AI050877:oy47c06.x1 Homo sapiens cDNA, | 3.041281957 | 0.002806 |
| | 3 end /clone = IMAGE-1668970 /clone_end = 3′ | | |
| | /gb = AI050877 /gi = 3307682 /ug = Hs.212948 /len = 357′ | | |
| 88788_i_a | Cluster Incl. AA969517:oo85a11.s1 Homo sapiens cDNA, | 3.032310778 | 0.005066 |
| | 3 end /clone = IMAGE-1572956 /clone_end = 3′ | | |
| | /gb = AA969517 /gi = 3144697 /ug = Hs.201079 /len = 377′ | | |
| 77052_at | Cluster Incl. AI914225:wd74g03.x1 Homo sapiens cDNA, | 3.023302076 | 0.004485 |
| | 3 end /clone = IMAGE-2337364 /clone_end = 3′ | | |
| | /gb = AI914225 /gi = 5634080 /ug = Hs.126865 /len = 447′ | | |
| 75551_at | Cluster Incl. AI566143:tn53h10.x1 Homo sapiens cDNA, | 3.017433674 | 0.021729 |
| | 3 end /clone = IMAGE-2172163 /clone_end = 3′ | | |
| | /gb = AI566143 /gi = 4524595 /ug = Hs.113010 /len = 420′ | | |
| 84740_at | Cluster Incl. N73628:yz78b01.s1 Homo sapiens cDNA, | 3.014935259 | 0.020032 |
| | 3 end /clone = IMAGE-289129 /clone_end = 3′ | | |
| | /gb = N73628 /gi = 1230913 /ug = Hs.165153 /len = 453′ | | |
| 74611_s_{—} | Cluster Incl. AI983615:wu19h07.x1 Homo sapiens cDNA, | 3.012380075 | 0.042251 |
| | 3 end /clone = IMAGE-990800 /clone_end = 3′ | | |
| | /gb = AI983615 /gi = 5810834 /ug = Hs.233756 /len = 482′ | | |
| 76464_g_{—} | Cluster Incl. AA781854:ai61h03.s1 Homo sapiens cDNA, | 3.006117339 | 0.0097 |
| | 3 end /clone = 1375349 /clone_end = 3′ | | |
| | /gb = AA781854 /gi = 2841185 /ug = Hs.122275 /len = 367′ | | |
| 90055_s_{—} | Cluster Incl. AA778124:zf46g09.s1 Homo sapiens cDNA, | 0.327601885 | 0.003177 |
| | 3 end /clone = 380032 /clone_end = 3′ | | |
| | /gb = AA778124 /gi = 2837525 /ug = Hs.238767 /len = 466′ | | |
| 89108_at | Cluster Incl. AA780912:ag98f07.s1 Homo sapiens cDNA, | 0.326532542 | 0.031272 |
| | 3 end /clone = 1155205 /clone_end = 3′ | | |
| | /gb = AA780912 /gi = 2840243 /ug = Hs.204249 /len = 489′ | | |
| 78594_at | Cluster Incl. AI080633:ox54b12.x1 Homo sapiens cDNA, | 0.326310174 | 0.04264 |
| | 3 end /clone = IMAGE-1660127 /clone_end = 3′ | | |
| | /gb = AI080633 /gi = 3416884 /ug = Hs.134225 /len = 519′ | | |
| 84816_at | Cluster Incl. AA995233:ou17a03.s1 Homo sapiens cDNA, | 0.326189959 | 0.000316 |
| | 3 end /clone = IMAGE-1626508 /clone_end = 3′ | | |
| | /gb = AA995233 /gi = 3181722 /ug = Hs.166309 /len = 497′ | | |
| 76410_at | Cluster Incl. H05391:yl80b11.r1 Homo sapiens cDNA, | 0.316419067 | 0.001262 |
| | 5 end /clone = IMAGE-44222 /clone_end = 5′ | | |
| | /gb = H05391 /gi = 868943 /ug = Hs.122008 /len = 443′ | | |
| 74367_at | Cluster Incl. AI989468:ws25b02.x1 Homo sapiens cDNA, | 0.315634857 | 0.005064 |
| | 3 end /clone = IMAGE-2498187 /clone_end = 3′ | | |
| | /gb = AI989468 /gi = 5836349 /ug = Hs.233354 /len = 407′ | | |
| 88668_at | Cluster Incl. AI631519:wa99a02.x1 Homo sapiens cDNA, | 0.314758398 | 0.028635 |
| | 3 end /clone = IMAGE-2304266 /clone_end = 3′ | | |
| | /gb = AI631519 /gi = 4682849 /ug = Hs.198000 /len = 494′ | | |
| 91172_at | Cluster Incl. AA772360:ai43d11.s1 Homo sapiens cDNA, | 0.31434908 | 0.013501 |
| | 3 end /clone = 1359765 /clone_end = 3′ | | |
| | /gb = AA772360 /gi = 2824143 /ug = Hs.145274 /len = 471′ | | |
| 80238_at | Cluster Incl. AA507036:ni02h04.s1 Homo sapiens cDNA, | 0.311633699 | 0.003808 |
| | 3 end /clone = IMAGE-966871 /clone_end = 3′ | | |
| | /gb = AA507036 /gi = 2243475 /ug = Hs.146822 /len = 466′ | | |
| 85907_at | Cluster Incl. AI276085:ql74f09.x1 Homo sapiens cDNA, | 0.31047302 | 0.004634 |
| | 3 end /clone = IMAGE-1878089 /clone_end = 3′ | | |
| | /gb = AI276085 /gi = 3898359 /ug = Hs.176222 /len = 465′ | | |
| 80485_i_a | Cluster Incl. AI808768:wf57h12.x1 Homo sapiens cDNA, | 0.308522904 | 0.016329 |
| | 3 end /clone = IMAGE-2359751 /clone_end = 3′ | | |
| | /gb = AI808768 /gi = 5395334 /ug = Hs.148867 /len = 481′ | | |
| 72026_g_{—} | Cluster Incl. AA427578:zw54b07.s1 Homo sapiens cDNA, | 0.308401991 | 0.001714 |
| | 3 end /clone = IMAGE-773845 /clone_end = 3′ | | |
| | /gb = AA427578 /gi = 2112006 /ug = Hs.220975 /len = 525′ | | |
| 72703_at | Cluster Incl. AA010008:zi07c10.s1 Homo sapiens cDNA, | 0.307232814 | 0.000017 |
| | 3 end /clone = IMAGE-430098 /clone_end = 3′ | | |
| | /gb = AA010008 /gi = 1471055 /ug = Hs.222505 /len = 436′ | | |
| 87230_at | Cluster Incl. AA521281:aa75g12.s1 Homo sapiens cDNA, | 0.305350897 | 0.049077 |
| | 3 end /clone = IMAGE-826822 /clone_end = 3′ | | |
| | /gb = AA521281 /gi = 2261824 /ug = Hs.188830 /len = 556′ | | |
| 77885_at | Cluster Incl. AI733673:ov09h03.x5 Homo sapiens cDNA, | 0.305290936 | 0.00235 |
| | 3 end /clone = IMAGE-1636853 /clone_end = 3′ | | |
| | /gb = AI733673 /gi = 5054786 /ug = Hs.131005 /len = 464′ | | |
| 87827_at | Cluster Incl. AI200630:qf87g12.x1 Homo sapiens cDNA, | 0.303877717 | 0.022954 |
| | 3 end /clone = IMAGE-1757062 /clone_end = 3′ | | |
| | /gb = AI200630 /gi = 3753236 /ug = Hs.190725 /len = 449′ | | |
| 73346_at | Cluster Incl. AA732736:ai28a09.s1 Homo sapiens cDNA, | 0.303166429 | 0.000992 |
| | 3 end /clone = 1344088 /clone_end = 3′ | | |
| | /gb = AA732736 /gi = 2754095 /ug = Hs.225853 /len = 464′ | | |
| 76154_i_a | Cluster Incl. AI634548:tx52g01.x1 Homo sapiens cDNA, | 0.302833962 | 0.000105 |
| | 3 end /clone = IMAGE-2273232 /clone_end = 3′ | | |
| | /gb = AI634548 /gi = 4685878 /ug = Hs.119748 /len = 523′ | | |
| 79735_at | Cluster Incl. AA037529:zk36c07.r1 Homo sapiens cDNA, | 0.302793001 | 0.000342 |
| | 5 end /clone = IMAGE-484908 /clone_end = 5′ | | |
| | /gb = AA037529 /gi = 1512629 /ug = Hs.144559 /len = 489′ | | |
| 84844_at | Cluster Incl. AI269474:qh47e02.x1 Homo sapiens cDNA, | 0.301592705 | 0.006328 |
| | 3 end /clone = IMAGE-1847834 /clone_end = 3′ | | |
| | /gb = AI269474 /gi = 3888641 /ug = Hs.166420 /len = 398′ | | |
| 80874_at | Cluster Incl. AI659898:tu01d09.x1 Homo sapiens cDNA, | 0.299388186 | 0.014565 |
| | 3 end /clone = IMAGE-2249777 /clone_end = 3′ | | |
| | /gb = AI659898 /gi = 4763468 /ug = Hs.152298 /len = 521′ | | |
| 84768_at | Cluster Incl. AI446224:tj25f11.x1 Homo sapiens cDNA, | 0.295386963 | 0.010618 |
| | 3 end /clone = IMAGE-2142573 /clone_end = 3′ | | |
| | /gb = AI446224 /gi = 4293712 /ug = Hs.165817 /len = 350′ | | |
| 77908_at | Cluster Incl. AI016841:ov33d08.x1 Homo sapiens cDNA, | 0.29124207 | 0.009569 |
| | 3 end /clone = IMAGE-1639119 /clone_end = 3′ | | |
| | /gb = AI016841 /gi = 3231177 /ug = Hs.131106 /len = 408′ | | |
| 76248_at | Cluster Incl. AI653732:wb36g02.x1 Homo sapiens cDNA, | 0.288672932 | 0.038981 |
| | 3 end /clone = IMAGE-2307794 /clone_end = 3′ | | |
| | /gb = AI653732 /gi = 4737711 /ug = Hs.120691 /len = 457′ | | |
| 75779_at | Cluster Incl. AA629059:zu84b05.s1 Homo sapiens cDNA, | 0.286202318 | 0.01828 |
| | 3 end /clone = IMAGE-744657 /clone_end = 3′ | | |
| | /gb = AA629059 /gi = 2541446 /ug = Hs.116298 /len = 570′ | | |
| 91145_at | Cluster Incl. AI759990:wh36g05.x1 Homo sapiens cDNA, | 0.285672403 | 0.004773 |
| | 3 end /clone = IMAGE-2382872 /clone_end = 3′ | | |
| | /gb = AI759990 /gi = 5175657 /ug = Hs.144824 /len = 351′ | | |
| 75293_s_{—} | Cluster Incl. AW009667:ws85g02.x1 Homo sapiens cDNA, | 0.284658559 | 0.003682 |
| | 3 end /clone = IMAGE-2504786 /clone_end = 3′ | | |
| | /gb = AW009667 /gi = 5858445 /ug = Hs.238353 /len = 601′ | | |
| 81973_r_a | Cluster Incl. AI421200:tf24f09.x1 Homo sapiens cDNA, | 0.284252973 | 0.010971 |
| | 3 end /clone = IMAGE-2097161 /clone_end = 3′ | | |
| | /gb = AI421200 /gi = 4267131 /ug = Hs.161312 /len = 422′ | | |
| AFFX-HU | M33197 Human glyceraldehyde-3-phosphate dehydrogenase (GAPDH) mRNA, | 0.284040649 | 0.015245 |
| | complete cds (_5, _M, _3 represent transcript regions | | |
| | 5 prime, Middle, and 3 prime respectively) | | |
| 91840_at | Cluster Incl. W39635:zc19c08.r1 Homo sapiens cDNA, | 0.282077522 | 0.038709 |
| | 5 end /clone = IMAGE-322766 /clone_end = 5′ | | |
| | /gb = W39635 /gi = 1321344 /ug = Hs.167828 /len = 435′ | | |
| 83720_at | Cluster Incl. AI380073:tf78f01.x1 Homo sapiens cDNA, | 0.280175516 | 0.000283 |
| | 3 end /clone = IMAGE-2105401 /clone_end = 3′ | | |
| | /gb = AI380073 /gi = 4189926 /ug = Hs.158949 /len = 443′ | | |
| 81035_i_a | Cluster Incl. AI573275:tn03f10.x1 Homo sapiens cDNA, | 0.278845944 | 0.042646 |
| | 3 end /clone = IMAGE-2166571 /clone_end = 3′ | | |
| | /gb = AI573275 /gi = 4536649 /ug = Hs.153892 /len = 503′ | | |
| 73217_at | Cluster Incl. AI950400:wq35a04.x1 Homo sapiens cDNA, | 0.278037315 | 0.023478 |
| | 3 end /clone = IMAGE-2473230 /clone_end = 3′ | | |
| | /gb = AI950400 /gi = 5742710 /ug = Hs.225073 /len = 684′ | | |
| 87996_at | Cluster Incl. AI215886:qm35g06.x1 Homo sapiens cDNA, | 0.271801622 | 0.027086 |
| | 3 end /clone = IMAGE-1883866 /clone_end = 3′ | | |
| | /gb = AI215886 /gi = 3784927 /ug = Hs.191824 /len = 483′ | | |
| 69515_at | Cluster Incl. AI738451:wi32a06.x1 Homo sapiens cDNA, | 0.26449689 | 0:003509 |
| | 3 end /clone = IMAGE-2391922 /clone_end = 3′ | | |
| | /gb = AI738451 /gi = 5100432 /ug = Hs.203304 /len = 534′ | | |
| 79472_at | Cluster Incl. N53442:yv41a09.s1 Homo sapiens cDNA, | 0.264444183 | 0.000068 |
| | 3 end /clone = IMAGE-245272 /clone_end = 3′ | | |
| | /gb = N53442 /gi = 1194608 /ug = Hs.143443 /len = 479′ | | |
| 81629_r_a | Cluster Incl. AI939503:qy19d04.x5 Homo sapiens cDNA, | 0.26339748 | 0.000103 |
| | 3 end /clone = IMAGE-2012455 /clone_end = 3′ | | |
| | /gb = AI939503 /gi = 5678292 /ug = Hs.158545 /len = 428′ | | |
| 92166_at | Cluster Incl. AI190864:qd55a08.x1 Homo sapiens cDNA, | 0.261339615 | 0.00325 |
| | 3 end /clone = IMAGE-1733366 /clone_end = 3′ | | |
| | /gb = AI190864 /gi = 3742073 /ug = Hs.178226 /len = 451′ | | |
| 81217_at | Cluster Incl. AI971594:wq87h01.x1 Homo sapiens cDNA, | 0.261004215 | 0.009305 |
| | 3 end /clone = IMAGE-2479057 /clone_end = 3′ | | |
| | /gb = AI971594 /gi = 5768420 /ug = Hs.156105 /len = 501′ | | |
| 89937_at | Cluster Incl. AA700625:zi43a06.s1 Homo sapiens cDNA, | 0.258257021 | 0.001392 |
| | 3 end /clone = 433522 /clone_end = 3′ | | |
| | /gb = AA700625 /gi = 2703588 /ug = Hs.234473 /len = 564′ | | |
| 81584_at | Cluster Incl. AI828498:wk30a12.x1 Homo sapiens cDNA, | 0.257194389 | 0.016235 |
| | 3 end /clone = IMAGE-2413822 /clone_end = 3′ | | |
| | /gb = AI828498 /gi = 5449169 /ug = Hs.158186 /len = 539′ | | |
| 70409_at | Cluster Incl. AI792564:qi73h09.y5 Homo sapiens cDNA, | 0.253124275 | 0.019626 |
| | 5 end /clone = IMAGE-1862177 /clone_end = 5′ | | |
| | /gb = AI792564 /gi = 5340280 /ug = Hs.209447 /len = 326′ | | |
| 88042_i_a | Cluster Incl. AA704465:zj19c02.s1 Homo sapiens cDNA, | 0.252686592 | 0.000395 |
| | 3 end /clone = 450722 /clone_end = 3′ | | |
| | /gb = AA704465 /gi = 2714383 /ug = Hs.191941 /len = 480′ | | |
| 74756_at | Cluster Incl. AI869008:wc17h01.x1 Homo sapiens cDNA, | 0.25104725 | 0.01521 |
| | 3 end /clone = IMAGE-2315473 /clone_end = 3′ | | |
| | /gb = AI869008 /gi = 5542976 /ug = Hs.234184 /len = 352′ | | |
| 80680_at | Cluster Incl. AI279514:ql51c11.x1 Homo sapiens cDNA, | 0.247710917 | 0.036068 |
| | 3 end /clone = IMAGE-1875860 /clone_end = 3′ | | |
| | /gb = AI279514 /gi = 3917748 /ug = Hs.150459 /len = 565′ | | |
| 71324_at | Cluster Incl. AI761935:wh50a05.x1 Homo sapiens cDNA, | 0.247617951 | 0.004563 |
| | 3 end /clone = IMAGE-2384144 /clone_end = 3′ | | |
| | /gb = AI761935 /gi = 5177602 /ug = Hs.213335 /len = 452′ | | |
| 69100_at | Cluster Incl. AI682297:wc51d01.x1 Homo sapiens cDNA, | 0.247438489 | 0.001126 |
| | 3 end /clone = IMAGE-2322145 /clone_end = 3′ | | |
| | /gb = AI682297 /gi = 4892479 /ug = Hs.201657 /len = 481′ | | |
| 82786_at | Cluster Incl. AW014764:UI-H-BI0-aae-f-08-0-UI.s1 Homo sapiens cDNA, | 0.245652038. | 0.017259 |
| | 3 end /clone = IMAGE-2709254 /clone_end = 3′ | | |
| | /gb = AW014764 /gi = 5863521 /ug = Hs.169169 /len = 383′ | | |
| 75211_s_{—} | Cluster Incl. H78699:yu29h0-1.s1 Homo sapiens cDNA, | 0.244829232 | 0.000058 |
| | 3 end /clone = IMAGE-235249 /clone_end = 3′ | | |
| | /gb = H78699 /gi = 1056788 /ug = Hs.237375 /len = 418′ | | |
| 78158_at | Cluster Incl. AI042180:oy37c12.x1 Homo sapiens cDNA, | 0.24479353 | 0.000431 |
| | 3 end /clone = IMAGE-1668022 /clone_end = 3′ | | |
| | /gb = AI042180 /gi = 3281374 /ug = Hs.132160 /len = 533′ | | |
| 79294_i_a | Cluster Incl. R95918:yq51f07.s1 Homo sapiens cDNA, | 0.240319896 | 0.003866 |
| | 3 end /clone = IMAGE-199333 /clone_end = 3′ | | |
| | /gb = R95918 /gi = 981578 /ug = Hs.140871 /len = 296′ | | |
| 68112_at | Cluster Incl. AA931562:oo56c11.s1 Homo sapiens cDNA, | 0.240105629 | 0.029475 |
| | 3 end /clone = IMAGE-1570196 /clone_end = 3′ | | |
| | /gb = AA931562 /gi = 3085948 /ug = Hs.190736 /len = 488′ | | |
| 79618_at | Cluster Incl. AI740621:wg23e12.x1 Homo sapiens cDNA, | 0.239308307 | 0.004818 |
| | 3 end /clone = IMAGE-2365966 /clone_end = 3′ | | |
| | /gb = AI740621 /gi = 5108909 /ug = Hs.143873 /len = 457′ | | |
| 75719_at | Cluster Incl. AI039291:ox33e10.s1 Homo sapiens cDNA, | 0.239047129 | 0.001528 |
| | 3 end /clone = IMAGE-1658154 /clone_end = 3′ | | |
| | /gb = AI039291 /gi = 3278485 /ug = Hs.116061 /len = 435′ | | |
| 78779_at | Cluster Incl. AI087874:ow60d03.x1 Homo sapiens cDNA, | 0.238520097 | 0.003141 |
| | 3 end /clone = IMAGE-1651205 /clone_end = 3′ | | |
| | /gb = AI087874 /gi = 3426907 /ug = Hs.135162 /len = 515′ | | |
| 71787_r_a | Cluster Incl. AI312358:ta78h12.x2 Homo sapiens cDNA, | 0.237885742 | 0.033666 |
| | 3 end /clone = IMAGE-2050247 /clone_end = 3′ | | |
| | /gb = AI312358 /gi = 4017963 /ug = Hs.220599 /len = 146′ | | |
| 71560_r_a | Cluster Incl. AI932356:wd27d09.x1 Homo sapiens cDNA, | 0.234298993 | 0.002953 |
| | 3 end /clone = IMAGE-2329361 /clone_end = 3′ | | |
| | /gb = AI932356 /gi = 5671093 /ug = Hs.216016 /len = 486′ | | |
| 78580_at | Cluster Incl. AI344345:tc03h05.x1 Homo sapiens cDNA, | 0.234044364 | 0.003148 |
| | 3 end /clone = IMAGE-2062809 /clone_end = 3′ | | |
| | /gb = AI344345 /gi = 4081551 /ug = Hs.134198 /len = 501′ | | |
| 78563_at | Cluster Incl. AI302188:qn58d06.x1 Homo sapiens cDNA, | 0.228535599 | 0.000468 |
| | 3 end /clone = IMAGE-1902443 /clone_end = 3′ | | |
| | /gb = AI302188 /gi = 3961534 /ug = Hs.134128 /len = 464′ | | |
| 87915_i_a | Cluster Incl. W93079:zh45a08.s1 Homo sapiens cDNA, | 0.223549654 | 0.000173 |
| | 3 end /clone = IMAGE-414998 /clone_end = 3′ | | |
| | /gb = W93079 /gi = 1422241 /ug = Hs.191396 /len = 352′ | | |
| 90914_at | Cluster Incl. AI088153:oz96a09.x1 Homo sapiens cDNA, | 0.219235587 | 0.040539 |
| | 3 end /clone = IMAGE-1683160 /clone_end = 3′ | | |
| | /gb = AI088153 /gi = 3427129 /ug = Hs.134902 /len = 485′ | | |
| 86791_at | Cluster Incl. AA461106:zx63g09.s1 Homo sapiens cDNA, | 0.218378808 | 0.000089 |
| | 3 end /clone = IMAGE-796192 /clone_end = 3′ | | |
| | /gb = AA461106 /gi = 2186226 /ug = Hs.187123 /len = 400′ | | |
| 89355_at | Cluster Incl. AI819564:wj91f12.x1 Homo sapiens cDNA, | 0.214671449 | 0.001157 |
| | 3 end /clone = IMAGE-2410223 /clone_end = 3′ | | |
| | /gb = AI819564 /gi = 5438643 /ug = Hs.208230 /len = 469′ | | |
| 88225_at | Cluster Incl. AA779891:af46d05.s1 Homo sapiens cDNA, | 0.213518745 | 0.005318 |
| | 3 end /clone = 1034697 /clone_end = 3′ | | |
| | /gb = AA779891 /gi = 2839222 /ug = Hs.193052 /len = 472′ | | |
| 73771_at | Cluster Incl. AI632232:tt20e05.x1 Homo sapiens cDNA, | 0.212420493 | 0.002735 |
| | 3 end /clone = IMAGE-2241344 /clone_end = 3′ | | |
| | /gb = AI632232 /gi = 4683562 /ug = Hs.231855 /len = 496′ | | |
| 82591_r_a | Cluster Incl. AI309223:qo68a10.x1 Homo sapiens cDNA, | 0.212211885 | 0.006857 |
| | 3 end /clone = IMAGE-1913658 /clone_end = 3′ | | |
| | /gb = AI309223 /gi = 4004094 /ug = Hs.167011 /len = 331′ | | |
| 80687_at | Cluster Incl. AA921994:om41a07.s1 Homo sapiens cDNA, | 0.210798369 | 0.010674 |
| | 3 end /clone = IMAGE-1543572 /clone_end = 3′ | | |
| | /gb = AA921994 /gi = 3069303 /ug = Hs.150493 /len = 411′ | | |
| 78370_at | Cluster Incl. AI053597:qi72e03.x1 Homo sapiens cDNA, | 0.209176341 | 0.001388 |
| | 3 end /clone = IMAGE-1862044 /clone_end = 3′ | | |
| | /gb = AI053597 /gi = 3321384 /ug = Hs.133138 /len = 546′ | | |
| 82231_at | Cluster Incl. AA367838:EST79039 Homo sapiens cDNA | 0.208973443 | 0.000022 |
| | /clone = ATCC-172567 /gb = AA367838 /gi = 2020198 | | |
| | /ug = Hs.163834 /len = 374 | | |
| 73517_at | Cluster Incl. AI865729:wk50e02.x1 Homo sapiens cDNA, | 0.208676712 | 0.001615 |
| | 3 end /clone = IMAGE-2418842 /clone_end = 3′ | | |
| | /gb = AI865729 /gi = 5529836 /ug = Hs.229800 /len = 283′ | | |
| 85305_at | Cluster Incl. AI440266:tj01e04.x1 Homo sapiens cDNA, | 0.207370287 | 0.000035 |
| | 3 end /clone = IMAGE-2140254 /clone_end = 3′ | | |
| | /gb = AI440266 /gi = 4281451 /ug = Hs.170673 /len = 461′ | | |
| 74891_at | Cluster Incl. AA928646:om75f04.s1 Homo sapiens cDNA, | 0.20599295 | 0.02766 |
| | 3 end /clone = IMAGE-1553023 /clone_end = 3′ | | |
| | /gb = AA928646 /gi = 3076937 /ug = Hs.234976 /len = 488′ | | |
| 78399_at | Cluster Incl. AI052543:oz27h04.x1 Homo sapiens cDNA, | 0.204116157 | 0.001194 |
| | 3 end /clone = IMAGE-1676599 /clone_end = 3′ | | |
| | /gb = AI052543 /gi = 3308534 /ug = Hs.133244 /len = 452′ | | |
| 77478_at | Cluster Incl. AA977896:oq62b04.s1 Homo sapiens cDNA, | 0.198979696 | 0.001194 |
| | 3 end /clone = IMAGE-1590895 /clone_end = 3′ | | |
| | /gb = AA977896 /gi = 3155342 /ug = Hs.128873 /len = 417′ | | |
| 72808_at | Cluster Incl. AI640523:wa29b01.x1 Homo sapiens cDNA, | 0.198366813 | 0.00004 |
| | 3 end /clone = IMAGE-2299465 /clone_end = 3′ | | |
| | /gb = AI640523 /gi = 4703632 /ug = Hs.223553 /len = 442′ | | |
| 84903_f_a | Cluster Incl. AI264299:qk20f06.x1 Homo sapiens cDNA, | 0.197923908 | 0.007339 |
| | 3 end /clone = IMAGE-1869539 /clone_end = 3′ | | |
| | /gb = AI264299 /gi = 3872502 /ug-Hs.166784 /ten = 396′ | | |
| 84077_at | Cluster Incl. AI379425:tc66g04x1 .Homo sapiens cDNA, | 0.195398279 | 0.002798 |
| | 3 end /clone = IMAGE-2069622 /clone_end = 3′ | | |
| | /gb = AI379425 /gi = 4189278 /ug = Hs.160942 /len = 472′ | | |
| 85747_at | Cluster Incl. AI610910:tt60a11.x1 Homo sapiens cDNA, | 0.193631412 | 0.000081 |
| | 3 end /clone = IMAGE-2245148 /clone_end = 3′ | | |
| | /gb = AI610910 /gi = 4620077 /ug = Hs.175357 /len = 122′ | | |
| 81913_at | Cluster Incl. AI371042:ta29f06.x1 Homo sapiens cDNA, | 0.193436596 | 0.001955 |
| | 3 end /clone = IMAGE-2045507 /clone_end = 3′ | | |
| | /gb = AI371042 /gi = 4149795 /ug = Hs.160911 /len = 484′ | | |
| 88656_at | Cluster Incl. AI650477:wa91d08.x1 Homo sapiens cDNA, | 0.190979429 | 0.037893 |
| | 3 end /clone = IMAGE-2303535 /clone_end = 3′ | | |
| | /gb = AI650477 /gi = 4734456 /ug = Hs.197758 /len = 478′ | | |
| 69365_at | Cluster Incl. AI703361:wd93d02.x1 Homo sapiens cDNA, | 0.184683765 | 0.000162 |
| | 3 end /clone = IMAGE-2339139 /clone_end = 3′ | | |
| | /gb = AI703361 /gi = 4991261 /ug = Hs.202354 /len = 530′ | | |
| 77598_at | Cluster Incl. AA994249:ou05b11.s1 Homo sapiens cDNA, | 0.182835726 | 0.0023 |
| | 3 end /clone = IMAGE-1625373 /clone_end = 3′ | | |
| | /gb = AA994249 /gi = 3180794 /ug = Hs.129479 /len = 414′ | | |
| 73971_at | Cluster Incl. AI375662:tc09c10.x1 Homo sapiens cDNA, | 0.181763269 | 0.001296 |
| | 3 end /clone = IMAGE-2063346 /clone_end = 3′ | | |
| | /gb = AI375662 /gi = 4175652 /ug = Hs.232023 /len = 435′ | | |
| 82063_at | Cluster Incl. AA552017:ng01g11.s1 Homo sapiens cDNA, | 0.17951496 | 0.002115 |
| | 3 end /clone = IMAGE-928196 /clone_end = 3′ | | |
| | /gb = AA552017 /gi = 2322269 /ug = Hs.162245 /len = 460′ | | |
| 90300_g_{—} | Cluster Incl. AA721234:nz72b08.s1 Homo sapiens cDNA | 0.17343166 | 0.010479 |
| | /clone = IMAGE-1300983 /gb = AA721234 /gi = 2737369 | | |
| | /ug = Hs.121121 /len = 345 | | |
| 91925_at | Cluster Incl. AI360231:qy84d11.x1 Homo sapiens cDNA, | 0.171324444 | 0.029254 |
| | 3 end /clone = IMAGE-2018709 /clone_end = 3′ | | |
| | /gb = AI360231 /gi = 4111852 /ug = Hs.170245 /len = 485′ | | |
| 79022_at | Cluster Incl. AI821803:nr20b05.x5 Homo sapiens cDNA | 0.170191727 | 0.000004 |
| | /clone = IMAGE-1168497 /gb = AI821803 /gi = 5440882 | | |
| | /ug = Hs.136580 /len = 307 | | |
| 82302_at | Cluster Incl. AI436290:th81c01.x1 Homo sapiens cDNA, | 0.169417008 | 0.000324 |
| | 3 end /clone = IMAGE-2125056 /clone_end = 3′ | | |
| | /gb = AI436290 /gi = 4309151 /ug = Hs.164162 /len = 497′ | | |
| 91591_at | Cluster Incl. AI469896:tj88c11.x1 Homo sapiens cDNA, | 0.164920143 | 0.002275 |
| | 3 end /clone = IMAGE-2148596 /clone_end = 3′ | | |
| | /gb = AI469896 /gi = 4331986 /ug = Hs.158866 /len = 459′ | | |
| 77589_at | Cluster Incl. AI377752:te56h12.x1 Homo sapiens cDNA, | 0.161975336 | 0.000178 |
| | 3 end /clone = IMAGE-2090759 /clone_end = 3′ | | |
| | /gb = AI377752 /gi = 4187605 /ug = Hs.129448 /len = 429′ | | |
| 84438_at | Cluster Incl. AA843562:aj54f01.s1 Homo sapiens cDNA, | 0.15021849 | 0.003363 |
| | 3 end /clone = IMAGE-1394137 /clone_end = 3′ | | |
| | /gb = AA843562 /gi = 2930080 /ug = Hs.163277 /len = 435′ | | |
| 74557_s_{—} | Cluster Incl. AI739473:wi14a05.xl Homo sapiens cDNA, | 0.142318725 | 0.000049 |
| | 3 end /clone = IMAGE-2390192 /clone_end = 3′ | | |
| | /gb = AI739473 /gi = 5101454 /ug = Hs.233630 /len = 463′ | | |
| 87274_at | Cluster Incl. AA700621;zi43a01.s1 Homo sapiens cDNA, | 0.138942719 | 0.000066 |
| | 3 end /clone = 433512 /clone_end = 3′ | | |
| | /gb = AA700621 /gi = 2703584 /ug = Hs.188964 /len = 519′ | | |
| 90647_at | Cluster Incl. AI701529:we36a05.x1 Homo sapiens cDNA, | 0.134163985 | 0.000207 |
| | 3 end /clone = IMAGE-2343152 /clone_end = 3′ | | |
| | /gb = AI701529 /gi = 4989429 /ug = Hs.129519 /len = 507′ | | |
| 91481_at | Cluster Incl. AW025687:wu07b01.x1 Homo sapiens cDNA, | 0.132765609 | 0.000971 |
| | 3 end /clone = IMAGE-2516233 /clone_end = 3′ | | |
| | /gb = AW025687 /gi = 5879217 /ug = Hs.156452 /len = 408′ | | |
| 89107_s_{—} | Cluster Incl. AA161147:zo74a11.s1 Homo sapiens cDNA, | 0.131705656 | 0.048733 |
| | 3 end /clone = IMAGE-592604 /clone end = 3′ | | |
| | /gb = AA161147 /gi = 1735384 /ug = Hs.204218 /len = 345′ | | |
| 77818_at | Cluster Incl. AA927633:om19g09.s1 Homo sapiens cDNA, | 0.129714004 | 0.000441 |
| | 3 end /clone = IMAGE-1541536 /clone_end = 3′ | | |
| | /gb = AA927633 /gi = 3077054 /ug = Hs.130685 /len = 654′ | | |
| 87657_at | Cluster Incl. AA699394:zi33d10.s1 Homo sapiens cDNA, | 0.128325924 | 0.010529 |
| | 3 end /clone = 432595 /clone_end = 3′ | | |
| | /gb = AA699394 /gi = 2702588 /ug = Hs.190348 /len = 445′ | | |
| 83947_at | Cluster Incl. AI221304:qg74f11.x1 Homo sapiens cDNA, | 0.127051245 | 0.004949 |
| | 3 end /clone = IMAGE-1840941 /clone_end = 3′ | | |
| | /gb = AI221304 /gi = 3803507 /ug = Hs.160372 /len = 410′ | | |
| 77148_at | Cluster Incl. AA939266:oq31a09.s1 Homo sapiens cDNA, | 0.126798542 | 0.01012 |
| | 3 end /clone = IMAGE-1587928 /clone_end = 3′ | | |
| | /gb = AA939266 /gi = 3099179 /ug = Hs.127309 /len = 513′ | | |
| 81632_i_a | Cluster Incl. AI369347:qy92a02.x1 Homo sapiens cDNA, | 0.126685823 | 0.000114 |
| | 3 end /clone = IMAGE-2019434 /clone_end = 3′ | | |
| | /gb = AI369347 /gi = 4148100 /ug = Hs.158592 /len = 215′ | | |
| 91500_at | Cluster Incl. AA069788:zf72h10.s1 Homo sapiens cDNA, | 0.126293774 | 0.006699 |
| | 3 end /clone = IMAGE-382531 /clone_end = 3′ | | |
| | /gb = AA069788 /gi = 1577156 /ug = Hs.156880 /len = 637′ | | |
| 67260_r_a | Cluster Incl. AI383679:tc45h10.x1 Homo sapiens cDNA, | 0.120913902 | 0.000002 |
| | 3 end /clone = IMAGE-2067619 /clone_end = 3′ | | |
| | /gb = AI383679 /gi = 4196460 /ug = Hs.159114 /len = 244′ | | |
| 72368_f_a | Cluster Incl. AI583312:ts31g07.x1 Homo sapiens cDNA, | 0.113556615 | 0.028878 |
| | 3 end /clone = IMAGE-2230236 /clone_end = 3′ | | |
| | /gb = AI583312 /gi = 4569209 /ug = Hs.221671 /len = 356′ | | |
| 80075_at | Cluster Incl. AI034221:ow09g01.x1 Homo sapiens cDNA, | 0.110154914 | 0.000049 |
| | 3 end /clone = IMAGE-1646352 /clone_end = 3′ | | |
| | /gb = AI034221 /gi = 3255174 /ug = Hs.146035 /len = 432′ | | |
| 91129_at | Cluster Incl. AI208356:qg35f06.x1 Homo sapiens cDNA, | 0.106889175 | 0.0002 |
| | 3 end /clone = IMAGE-1837187 /clone_end = 3′ | | |
| | /gb = AI208356 /gi = 3770298 /ug = Hs.144507 /len = 388′ | | |
| 69853_at | Cluster Incl. AI798028:wh80e11.x1 Homo sapiens cDNA, | 0.104569948 | 0.000275 |
| | 3 end /clone = IMAGE-2387084 /clone_end = 3′ | | |
| | /gb = AI798028 /gi = 5363500 /ug = Hs.207474 /len = 549′ | | |
| 74508_at | Cluster Incl. AW015038:UI-H-BI0-aal-a-03-0-UI.s1 Homo sapiens cDNA, | 0.104558745 | 0.004341 |
| | 3 end /clone = IMAGE-2709413 /clone_end = 3′ | | |
| | /gb = AW015038 /gi = 5863795 /ug = Hs.233530 /len = 423′ | | |
| 72462_f_a | Cluster Incl. H40456:yp60d12.s1 Homo sapiens cDNA, | 0.101016546 | 0.000992 |
| | 3 end /clone = IMAGE-191831 /clone_end = 3′ | | |
| | /gb = H40456 /gi = 916508 /ug = Hs.221895 /len = 418′ | | |
| 84947_at | Cluster Incl. AI286188:qi02a08.x1 Homo sapiens cDNA, | 0.092519177 | 0.001823 |
| | 3 end /clone = IMAGE-1855286 /clone_end = 3′ | | |
| | /gb = AI286188 /gi = 3924421 /ug = Hs.166980 /len = 417′ | | |
| 70855_at | Cluster Incl. AI829652:wf02h07.x1 Homo sapiens cDNA, | 0.083077091 | 0.000164 |
| | 3 end /clone = IMAGE-2349469 /clone_end = 3′ | | |
| | /gb = AI829652 /gi = 5450323 /ug = Hs.211443 /len = 494′ | | |
| 90484_at | Cluster Incl. AI809578:wf31a09.x1 Homo sapiens cDNA, | 0.079933078 | 0.000211 |
| | 3 end /clone = IMAGE-2357176 /clone_end = 3′ | | |
| | /gb = AI809578 /gi = 5396144 /ug = Hs.126434 /len = 496′ | | |
| 69162_at | Cluster Incl. AI692566:wd73h03.x1 Homo sapiens cDNA, | 0.079613815 | 0.000067 |
| | 3 end /clone = IMAGE-2337269 /clone_end = 3′ | | |
| | /gb = AI692566 /gi = 4969906 /ug = Hs.201888 /len = 455′ | | |
| 69526_at | Cluster Incl. AA158249:zo76c07.s1 Homo sapiens cDNA, | 0.075582558 | 0.000006 |
| | 3 end /clone = IMAGE-592812 /clone_end = 3′ | | |
| | /gb = AA158249 /gi = 1733044 /ug = Hs.203537 /len = 580′ | | |
| 91579_at | Cluster Incl. AI939511:qy28e02.x5 Homo sapiens cDNA, | 0.06757725 | 0.00086 |
| | 3 end /clone = IMAGE-2013338 /clone_end = 3′ | | |
| | /gb = AI939511 /gi = 5678300 /ug = Hs.158678 /len = 547′ | | |
| 86283_r_a | Cluster Incl. T47055:yb12g05.s1 Homo sapiens cDNA, | 0.067022858 | 0.005615 |
| | 3 end /clone = IMAGE-71000 /clone_end = 3′ | | |
| | /gb = T47055 /gi = 649038 /ug = Hs.182019 /len = 348′ | | |
| 84082_at | Cluster Incl. AI566771:tq67e02.x1 Homo sapiens cDNA, | 0.059933336 | 0.00077 |
| | 3 end /clone = IMAGE-2213882 /clone_end = 3′ | | |
| | /gb = AI566771 /gi = 4525223 /ug = Hs.160953 /len = 461′ | | |
| 83466_at | Cluster Incl. AA468767:ne09e12.s1 Homo sapiens cDNA, | 0.057826652 | 0 |
| | 3 end /clone = IMAGE-880750 /clone_end = 3′ | | |
| | /gb = AA468767 /gi = 2195301 /ug = Hs.178337 /len = 442′ | | |
| 73402_at | Cluster Incl. AA781220:ai46a03.s1 Homo sapiens cDNA, | 0.052624187 | 0.000058 |
| | 3 end /clone = 1360012 /clone_end = 3′ | | |
| | /gb = AA781220 /gi = 2840551 /ug = Hs.226722 /len = 426′ | | |
| 84869_at | Cluster Incl. AI123917:qa37e01.x1 Homo sapiens cDNA, | 0.049170602 | 0.000018 |
| | 3 end /clone = IMAGE-1688952. /clone end = 3′ | | |
| | /gb = AI123917 /gi = 3539683 /ug = Hs.166597 /len = 495′ | | |
| 73243_at | Cluster Incl. AI199897:qf84a05.x1 Homo sapiens cDNA, | 0.045513684 | 0 |
| | 3 end /clone = IMAGE-1756688 /clone_end = 3′ | | |
| | /gb = AI199897 /gi = 3752503 /ug = Hs.225137 /len = 563′ | | |
| 73485_at | Cluster Incl. T71258:yd35b05.s1 Homo sapiens cDNA, | 0.041793009 | 0.000017 |
| | 3 end /clone = IMAGE-110193 /clone_end = 3′ | | |
| | /gb = T71258 /gi = 685779 /ug = Hs.228790 /len = 517′ | | |
| 75857_at | Cluster Incl. W80832:zd90g02.s1 Homo sapiens cDNA, | 0.035564271 | 0.000051 |
| | 3 end /clone = IMAGE-356786 /clone_end = 3′ | | |
| | /gb = W80832 /gi = 1391875 /ug = Hs.116773 /len = 467′ | | |
| 90122_f_a | Cluster Incl. AW025309:wu73c09.x1 Homo sapiens cDNA, | 0.024715815 | 0 |
| | 3 end /clone = IMAGE-990947 /clone_end = 3′ | | |
| | /gb = AW025309 /gi = 5878839 /ug = Hs.113165 /len = 497′ | | |
| 91361_at | Cluster Incl. AI265958:qq90h05.x1 Homo sapiens cDNA, | 0.017169688 | 0.00001 |
| | 3 end /clone = IMAGE-1938681 /clone_end = 3′ | | |
| | /gb = AI265958 /gi = 3884116 /ug = Hs.150821 /len = 490′ | | |
| 84270_at | Cluster Incl. AI829641:wf02g08.x1 Homo sapiens cDNA, | 0.014034927 | 0.003989 |
| | 3 end /clone = IMAGE-2349470 /clone_end = 3′ | | |
| | /gb = AI829641 /gi = 5450312 /ug = Hs.162204 /len = 348′ | | |
| 69149_at | Cluster Incl. AI282714:qt65b06.x1 Homo sapiens cDNA, | 0.012878608 | 0.00022 |
| | 3 end /clone-IMAGE-1960115 /clone_end = 3′ | | |
| | /gb = AI282714 /gi = 3920947 /ug = Hs.201877 /len = 412′ | | |

[0141] TABLE 6
U95_E Fold Change Genes (>3 over-expressed in Barrett's associated
esophageal adenocarcinoma (BA), <0.33 under-expressed in BA)

| Affy ID | Gene Name | Fold Change | P-value |
|---|---|---|---|
| 88567_s_{—} | Cluster Incl. AI344053:tc01h08.x1 Homo sapiens cDNA, | 33.12163404 | 0.000003 |
| | 3 end /clone = IMAGE-2062623 /clone_end = 3′ | | |
| | /gb = AI344053 /gi = 4081259 /ug = Hs.115838 /len = 449′ | | |
| 76739_at | Cluster Incl. AI337014:qx87g02.x1 Homo sapiens cDNA, | 24.46364831 | 0 |
| | 3 end /clone = IMAGE-2009522 /clone_end = 3′ | | |
| | /gb = AI337014 /gi = 4073941 /ug = Hs.132989 /len = 679′ | | |
| 83365_at | Cluster Incl. AI341602:qx92g05.x1 Homo sapiens cDNA, | 21.6308226 | 0.001328 |
| | 3 end /clone = IMAGE-2010008 /clone_end = 3′ | | |
| | /gb = AI341602 /gi = 4078529 /ug = Hs.152932 /len = 461′ | | |
| 81562_at | Cluster Incl. AI733811:qk04h06.x5 Homo sapiens cDNA, | 20.13979542 | 0.000018 |
| | 3 end /clone = IMAGE-1868027 /clone_end = 3′ | | |
| | /gb = AI733811 /gi = 5054924 /ug = Hs.121194 /len = 609′ | | |
| 73111_s_{—} | Cluster Incl. AI859854:wm21c10.x1 Homo sapiens cDNA, | 19.38056138 | 0.000001 |
| | 3 end /clone = IMAGE-2436594 /clone_end = 3′ | | |
| | /gb = AI859854 /gi = 5513459 /ug = Hs.234479 /len = 455′ | | |
| 90421_at | Cluster Incl. AA633203:nq57b02.s1 Homo sapiens cDNA, | 19.2499917 | 0.000051 |
| | 3 end /clone = IMAGE-1147947 /clone_end = 3′ | | |
| | /gb = AA633203 /gi = 2556617 /ug = Hs.14258 /len = 570′ | | |
| 88580_at | Cluster Incl. AI275140:ql70h02.x1 Homo sapiens cDNA, | 18.08284727 | 0.000109 |
| | 3 end /clone = IMAGE-1877715 /clone_end = 3′ | | |
| | /gb = AI275140 /gi = 3897414 /ug = Hs.116104 /len = 444′ | | |
| 78328_at | Cluster Incl. AI691066:wf22b05.x1 Homo sapiens cDNA, | 15.78241233 | 0.000067 |
| | 3 end /clone = IMAGE-2351313 /clone_end = 3′ | | |
| | /gb = AI691066 /gi = 4902368 /ug = Hs.165619 /len = 448′ | | |
| 89808_at | Cluster Incl. AA628967:af28h06.s1 Homo sapiens cDNA, | 15.29942334 | 0.00001 |
| | 3 end /clone = IMAGE-1033019 /clone_end = 3′ | | |
| | /gb = AA628967 /gi = 2541354 /ug = Hs.115274 /len = 753′ | | |
| 90582_at | Cluster Incl. AI688604:wc90f10.x1 Homo sapiens cDNA, | 15.09542862 | 0.000754 |
| | 3 end /clone = IMAGE-2325931 /clone_end = 3′ | | |
| | /gb = AI688604 /gi = 4899898 /ug = Hs.154903 /len = 454′ | | |
| 87884_at | Cluster Incl. AI922828:wo14e03.x1 Homo sapiens cDNA, | 14.54781052 | 0.00033 |
| | 3 end /clone = IMAGE-2455324 /clone_end = 3′ | | |
| | /gb = AI922828 /gi = 5658792 /ug = Hs.236102 /len = 548′ | | |
| 68693_at | Cluster Incl. T69015:yc31f04.s1 Homo sapiens cDNA, | 14.08619278 | 0.000013 |
| | 3 end /clone = IMAGE-82303 /clone_end = 3′ | | |
| | /gb = T69015 /gi = 680163 /ug = Hs.192728 /len = 478′ | | |
| 73054_at | Cluster Incl. C06075:C06075 Homo sapiens cDNA | 11.3375198 | 0.012822 |
| | /clone = hbc5496 /gb = C06075 /gi = 1502851 | | |
| | /ug = Hs.234147 /len = 454 | | |
| 81774_at | Cluster Incl. AI683036:tw48f06.x1 Homo sapiens cDNA, | 10.36686915 | 0.004902 |
| | 3 end /clone = IMAGE-2262947 /clone_end = 3′ | | |
| | /gb = AI683036 /gi = 4893218 /ug = Hs.124135 /len = 482′ | | |
| 82840_at | Cluster Incl. AI799626:to74b03.x1 Homo sapiens cDNA, | 10.18825096 | 0.000015 |
| | 3 end /clone = IMAGE-2183981 /clone_end = 3′ | | |
| | /gb = AI799626 /gi = 5365098 /ug = Hs.145807 /len = 558′ | | |
| 88504_at | Cluster Incl. AI955239:wx31f07.x1 Homo sapiens cDNA, | 9.83796577 | 0.002999 |
| | 3 end /clone = IMAGE-2545285 /clone_end = 3′ | | |
| | /gb = AI955239 /gi = 5747549 /ug = Hs.112460 /len = 467′ | | |
| 77510_at | Cluster Incl. AA088446:zl89f04.s1 Homo sapiens cDNA, | 9.77410756 | 0.000003 |
| | 3 end /clone = IMAGE-511807 /clone_end = 3′ | | |
| | /gb = AA088446 /gi = 1633958 /ug = Hs.170298 /len = 590′ | | |
| 78379_at | Cluster Incl. AI684746:wa85f10.x1 Homo sapiens cDNA, | 9.652586214 | 0.000012 |
| | 3 end /clone = IMAGE-2302987 /clone_end = 3′ | | |
| | /gb = AI684746 /gi = 4896040 /ug = Hs.119274 /len = 768′ | | |
| 73464_r_a | Cluster Incl. AA648038:HGBBT038 Homo sapiens cDNA | 9.485196734 | 0.002348 |
| | /gb = AA648038 /gi = 2574467 /ug = Hs.95614 /len = 180 | | |
| 90136_at | Cluster Incl. AI638295:tt09b11.x1 Homo sapiens cDNA, | 9.024823944 | 0.001058 |
| | 3 end /clone = IMAGE-2240253 /clone_end = 3′ | | |
| | /gb = AI638295 /gi = 4690529 /ug = Hs.128685 /len = 547′ | | |
| 73826_at | Cluster Incl. AI971242:wr27a01.x1 Homo sapiens cDNA, | 8.515076242 | 0.000011 |
| | 3 end /clone = IMAGE-2488872 /clone_end = 3′ | | |
| | /gb = AI971242 /gi = 5768068 /ug = Hs.124854 /len = 453′ | | |
| 84271_r_a | Cluster Incl. AW025560:wu97h02.x1 Homo sapiens cDNA, | 7.818636431 | 0.002861 |
| | 3 end /clone = IMAGE-990982 /clone_end = 3′ | | |
| | /gb = AW025560 /gi = 5879090 /ug = Hs.166398 /len = 458′ | | |
| 73493_at | Cluster Incl. AA701983:zi70a04.s1 Homo sapiens cDNA, | 7.302601124 | 0.00004 |
| | 3 end /clone = 436110 /clone_end = 3′ | | |
| | /gb = AA701983 /gi = 2705096 /ug = Hs.114085 /len = 522′ | | |
| 76364_at | Cluster Incl. AA643507:nq86f06.s1 Homo sapiens cDNA, | 6.913074606 | 0.001015 |
| | 3 end /clone = IMAGE-1159235 /clone_end = 3′ | | |
| | /gb = AA643507 /gi = 2568725 /ug = Hs.124840 /len = 509′ | | |
| 91095_s_{—} | Cluster Incl. AA535819:nj79e01.s1 Homo sapiens cDNA | 6.873901823 | 0.002754 |
| | /clone = IMAGE-998712 /gb = AA535819 /gi = 2280072 | | |
| | /ug = Hs.238355 /len = 522 | | |
| 81623_at | Cluster Incl. AI208954:qg29e05.x1 Homo sapiens cDNA, | 6.825834554 | 0.001662 |
| | 3 end /clone = IMAGE-1836608 /clone_end = 3′ | | |
| | /gb = AI208954 /gi = 3770896 /ug = Hs.121876 /len = 418′ | | |
| 81690_at | Cluster Incl. AI093231:qb04b09.x1 Homo sapiens cDNA, | 6.794338221 | 0.000834 |
| | 3 end /clone = IMAGE-1695257 /clone_end = 3′ | | |
| | /gb = AI093231 /gi = 3432207 /ug = Hs.122910 /len = 451′ | | |
| 81932_at | Cluster Incl. AI659966:we64e02.x1 Homo sapiens cDNA, | 6.724516081 | 0.00524 |
| | 3 end /clone = IMAGE-2345882 /clone_end = 3′ | | |
| | /gb = AI659966 /gi = 4763536 /ug = Hs.126478 /len = 490′ | | |
| 77540_at | Cluster Incl. AA007367:zh98b03.s1 Homo sapiens cDNA, | 6.57607309 | 0.003018 |
| | 3 end /clone = IMAGE-429293 /clone_end = 3′ | | |
| | /gb = AA007367 /gi = 1463371 /ug = Hs.173088 /len = 462′ | | |
| 73238_at | Cluster Incl. AI457905:tj48b10.x1 Homo sapiens cDNA, | 6.48771467 | 0.006137 |
| | 3 end /clone = IMAGE-2144731 /clone_end = 3′ | | |
| | /gb = AI457905 /gi = 4310786 /ug = Hs.235943 /len = 546′ | | |
| 85141_at | Cluster Incl. AI192838:qe63c04.x1 Homo sapiens cDNA, | 6.18069379 | 0.002186 |
| | 3 end /clone = IMAGE-1743654 /clone_end = 3′ | | |
| | /gb = AI192838 /gi = 3744047 /ug = Hs.183053 /len = 444′ | | |
| 85126_at | Cluster Incl. AI751438:cn10a03.y1 Homo sapiens cDNA | 6.087887372 | 0.00056 |
| | /clone = NHTBC_cn10a03-(random) /gb = AI751438 | | |
| | /gi = 5129702 /ug = Hs.182827 /len = 513 | | |
| 81668_at | Cluster Incl. AI346446:qp45a07.x1 Homo sapiens cDNA, | 6.04859158 | 0.000438 |
| | 3 end /clone = IMAGE-1925940 /clone_end = 3′ | | |
| | /gb = AI346446 /gi = 4083652 /ug = Hs.122587 /len = 470′ | | |
| 88155_at | Cluster Incl. AI125923:qc41f07.x1 Homo sapiens cDNA, | 5.967007568 | 0.020546 |
| | 3 end /clone = IMAGE-1712197 /clone_end = 3′ | | |
| | /gb = AI125923 /gi = 3594437 /ug = Hs.239324 /len = 512′ | | |
| 88222_at | Cluster Incl. AW013949:UI-H-BI0-aad-g-11-0-UI.s1 Homo sapiens cDNA, | 5.934357544 | 0.000747 |
| | 3 end /clone = IMAGE-2708949 /clone_end = 3′ | | |
| | /gb = AW013949 /gi = 5862706 /ug = Hs.239673 /len = 361′ | | |
| 80604_at | Cluster Incl. AW007566:wt02e03.x1 Homo sapiens cDNA, | 5.811542288 | 0.015477 |
| | 3 end /clone = IMAGE-2506300 /clone_end = 3′ | | |
| | /gb = AW007566 /gi = 5856429 /ug = Hs.239193 /len = 624′ | | |
| 67197_r_a | Cluster Incl. AI187329:qe26c02.x1 Homo sapiens cDNA, | 5.794363406 | 0.031677 |
| | 3 end /clone = IMAGE-1740098 /clone_end = 3′ | | |
| | /gb = AI187329 /gi = 3737967 /ug = Hs.182051 /len = 483′ | | |
| 77572_at | Cluster Incl. AI740961:wg18g09.x1 Homo sapiens cDNA, | 5.69131656 | 0.000179 |
| | 3 end /clone = IMAGE-2365504 /clone_end = 3′ | | |
| | /gb = AI740961 /gi = 5109249 /ug = Hs.179791 /len = 538′ | | |
| 88041_at | Cluster Incl. AI984261:wz57h06.x1 Homo sapiens cDNA, | 5.620260813 | 0.000122 |
| | 3 end /clone = IMAGE-2562203 /clone_end = 3′ | | |
| | /gb = AI984261 /gi = 5811480 /ug = Hs.238551 /len = 486′ | | |
| 85197_at | Cluster Incl. H53229:yq84e08.r1 Homo sapiens cDNA, | 5.587699119 | 0.001786 |
| | 5 end /clone = IMAGE-202502 /clone_end = 5′ | | |
| | /gb = H53229 /gi = 993376 /ug = Hs.183775 /len = 529′ | | |
| 90566_at | Cluster Incl. AI831961:wh90b03.x1 Homo sapiens cDNA, | 5.56730113 | 0.023455 |
| | 3 end /clone = IMAGE-2387981 /clone_end = 3′ | | |
| | /gb = AI831961 /gi = 5452632 /ug = Hs.153850 /len = 496′ | | |
| 84480_at | Cluster Incl. AI821052:nr06c07.y5 Homo sapiens cDNA, | 5.510588082 | 0.003876 |
| | 5 end /clone = IMAGE-1161036 /clone_end = 5′ | | |
| | /gb = AI821052 /gi = 5440131 /ug = Hs.168974 /len = 579′ | | |
| 87888_s_{—} | Cluster Incl. AI611162:tw39g10.x1 Homo sapiens cDNA, | 5.340707416 | 0.001304 |
| | 3 end /clone = IMAGE-2262114 /clone_end = 3′ | | |
| | /gb = AI611162 /gi = 4620329 /ug = Hs.236173 /len = 513′ | | |
| 91873_s_{—} | Cluster Incl. AI690773:tx99c07.x1 Homo sapiens cDNA, | 5.339491382 | 0.016636 |
| | 3 end /clone = IMAGE-2277708 /clone_end = 3′ | | |
| | /gb = AI690773 /gi = 4902075 /ug = Hs.133294 /len = 368′ | | |
| 73036_r_a | Cluster Incl. AA602984:np31e11.s1 Homo sapiens cDNA, | 5.273912907 | 0.0033 |
| | 3 end /clone = IMAGE-1117964 /clone_end = 3′ | | |
| | /gb = AA602984 /gi = 2436845 /ug = Hs.234035 /len = 487′ | | |
| 76463_at | Cluster Incl. AW007116:wt09d07.x1 Homo sapiens cDNA, | 5.263622629 | 0.000009 |
| | 3 end /clone = IMAGE-2506957 /clone_end = 3′ | | |
| | /gb = AW007116 /gi = 5855894 /ug = Hs.127007 /len = 521′ | | |
| 82385_at | Cluster Incl. AA534591:nf81b04.s1 Homo sapiens cDNA, | 5.252002344 | 0.011367 |
| | 3 end /clone = IMAGE-926287 /clone_end = 3′ | | |
| | /gb = AA534591 /gi = 2278844 /ug = Hs.135657 /len = 492′ | | |
| 82482_r_a | Cluster Incl. H07125:yl82e05.s1 Homo sapiens cDNA, | 5.144291508 | 0.005336 |
| | 3 end /clone = IMAGE-44497 /clone_end = 3′ | | |
| | /gb = H07125 /gi = 870657 /ug = Hs.138418 /len = 526′ | | |
| 69197_r_a | Cluster Incl. AA508552:nh67b08.s1 Homo sapiens cDNA | 5.137532156 | 0.001736 |
| | /clone = IMAGE-957399 /gb = AA508552 /gi = 2246055 | | |
| | /ug = Hs.195839 /len = 315 | | |
| 67549_at | Cluster Incl. AA001232:zh82g06.r1 Homo sapiens cDNA, | 5.065760716 | 0.00041 |
| | 5 end /clone = IMAGE-427834 /clone_end = 5′ | | |
| | /gb = AA001232 /gi = 1437355 /ug = Hs.186593 /len = 473′ | | |
| 70873_at | Cluster Incl. AI807627:wf49b09.x1 Homo sapiens cDNA, | 5.04405858 | 0.000025 |
| | 3 end /clone = IMAGE-2358905 /clone_end = 3′ | | |
| | /gb = AI807627 /gi = 5394193 /ug = Hs.209978 /len = 530′ | | |
| 73800_at | Cluster Incl. AI890347:wm84b05.x1 Homo sapiens cDNA, | 4.884088199 | 0.000153 |
| | 3 end /clone = IMAGE-2442609 /clone_end = 3′ | | |
| | /gb = AI890347 /gi = 5595511 /ug = Hs.124380 /len = 620′ | | |
| 70170_f_a | Cluster Incl. AI251913:qu76a04.x1 Homo sapiens cDNA, | 4.811398521 | 0.002454 |
| | 3 end /clone = IMAGE-1977966 /clone_end = 3′ | | |
| | /gb = AI251913 /gi = 3848442 /ug = Hs.203582 /len = 289′ | | |
| 69170_at | Cluster Incl. AI990825:ws32c05.x1 Homo sapiens cDNA, | 4.779712151 | 0.033749 |
| | 3 end /clone = IMAGE-2498888 /clone_end = 3′ | | |
| | /gb = AI990825 /gi = 5837706 /ug = Hs.195398 /len = 549′ | | |
| 74042_g_{—} | Cluster Incl. AI732208:ne53h01.x5 Homo sapiens cDNA, | 4.765311344 | 0.006798 |
| | 3 end /clone = IMAGE-901105 /clone_end = 3′ | | |
| | /gb = AI732208 /gi = 5053321 /ug = Hs.126783 /len = 536′ | | |
| 88923_at | Cluster Incl. AW025183:wu72c05.x1 Homo sapiens cDNA, | 4.616589303 | 0.000839 |
| | 3 end /clone = IMAGE-990843 /clone_end = 3′ | | |
| | /gb = AW025183 /gi = 5878713 /ug = Hs.127680 /len = 504′ | | |
| 89983_at | Cluster Incl. AI762857:wi63b04.x1 Homo sapiens cDNA, | 4.571238045 | 0.004145 |
| | 3 end /clone = IMAGE-2397967 /clone_end = 3′ | | |
| | /gb = AI762857 /gi = 5178524 /ug = Hs.123177 /len = 554′ | | |
| 88043_g_{—} | Cluster Incl. AI984261:wz57h06.x1 Homo sapiens cDNA, | 4.56014179 | 0.001077 |
| | 3 end /clone = IMAGE-2562203 /clone_end = 3′ | | |
| | /gb = AI984261 /gi = 5811480 /ug = Hs.238551 /len = 486′ | | |
| 82985_at | Cluster Incl. AI817781:wk40b08.x1 Homo sapiens cDNA, | 4.501873026 | 0.038048 |
| | 3 end /clone = IMAGE-2417847 /clone_end = 3′ | | |
| | /gb = AI817781 /gi = 5436860 /ug = Hs.146905 /len = 470′ | | |
| 67667_at | Cluster Incl. R02826:ye80g11.s1 Homo sapiens cDNA, | 4.458109865 | 0.008755 |
| | 3 end /clone = IMAGE-124100 /clone_end = 3′ | | |
| | /gb = R02826 /gi = 752562 /ug = Hs.187456 /len = 371′ | | |
| 74965_at | Cluster Incl. AI075710:oz24f10.x1 Homo sapiens cDNA, | 4.433933192 | 0.000294 |
| | 3 end /clone = IMAGE-1676299 /clone_end = 3′ | | |
| | /gb = AI075710 /gi = 3404888 /ug = Hs.133988 /len = 458′ | | |
| 81447_at | Cluster Incl. AI540087:td09b08.x1 Homo sapiens cDNA, | 4.336850383 | 0.034037 |
| | 3 end /clone = IMAGE-2075127 /clone_end = 3′ | | |
| | /gb = AI540087 /gi = 4457460 /ug = Hs.120243 /len = 489′ | | |
| 85757_at | Cluster Incl. AI635504:ts95a01.x1 Homo sapiens cDNA, | 4.307200411 | 0.001228 |
| | 3 end /clone = IMAGE-2238984 /clone_end = 3′ | | |
| | /gb = AI635504 /gi = 4686834 /ug = Hs.191229 /len = 496′ | | |
| 86946_s_{—} | Cluster Incl. AL044106:DKFZp434M0528_s1 Homo sapiens cDNA, | 4.274201098 | 0.000009 |
| | 3 end /clone = DKFZp434M0528 /clone_end = 3′ | | |
| | /gb = AL044106 /gi = 5432332 /ug = Hs.209359 /len = 574′ | | |
| 78442_at | Cluster Incl. AI819340:wg61a01.x1 Homo sapiens cDNA, | 4.255225315 | 0.03273 |
| | 3 end /clone = IMAGE-2369544 /clone_end = 3′ | | |
| | /gb = AI819340 /gi = 5438419 /ug = Hs.13561 /len = 539′ | | |
| 77354_at | Cluster Incl. AI935827:wo51c06.x1 Homo sapiens cDNA, | 4.221724462 | 0.000009 |
| | 3 end /clone = IMAGE-2458858 /clone_end = 3′ | | |
| | /gb = AI935827 /gi = 5674697 /ug = Hs.161791 /len = 533′ | | |
| 73264_f_a | Cluster Incl. AW025939:wu09c06.x1 Homo sapiens cDNA, | 4.184011102 | 0.012722 |
| | 3 end /clone = IMAGE-2516458 /clone_end = 3′ | | |
| | /gb = AW025939 /gi = 5879469 /ug = Hs.236356 /len = 326′ | | |
| 82129_at | Cluster Incl. AI914323:wd77d01.x1 Homo sapiens cDNA, | 4.163620114 | 0.007416 |
| | 3 end /clone = IMAGE-2337601 /clone_end = 3′ | | |
| | /gb = AI914323 /gi = 5634178 /ug = Hs.131175 /len = 543′ | | |
| 77848_f_a | Cluster Incl. AA018663:ze53f11.s1 Homo sapiens cDNA, | 4.141843067 | 0.001411 |
| | 3 end /clone = IMAGE-362733 /clone_end = 3′ | | |
| | /gb = AA018663 /gi = 1481928 /ug = Hs.204007 /len = 496′ | | |
| 82858_at | Cluster Incl. AI754693:cr28h02.x1 Homo sapiens cDNA, | 4.138901583 | 0.000443 |
| | 3 end /clone = HBMSC_cr28h02 /clone_end = 3′ | | |
| | /gb = AI754693 /gi = 5132957 /ug = Hs.145968 /len = 515′ | | |
| 87558_f_a | Cluster Incl. W85857:zh52f11.s1 Homo sapiens cDNA, | 4.078971064 | 0.015864 |
| | 3 end /clone = IMAGE-415725 /clone_end = 3′ | | |
| | /gb = W85857 /gi = 1398355 /ug = Hs.226604 /len = 446′ | | |
| 76571_at | Cluster Incl. AI820585:os03a03.x5 Homo sapiens cDNA, | 4.07737079 | 0.00185 |
| | 3 end /clone = IMAGE-1604236 /clone end = 3′ | | |
| | /gb = AI820585 /gi = 5439664 /ug = Hs.129107 /len = 538′ | | |
| AFFX-Bio | J04423 E coli bioB gene biotin synthetase (-5, -M, -3 represent | 4.074822599 | 0.006154 |
| | transcript regions 5 prime, Middle, and 3 prime respectively) | | |
| 77364_at | Cluster Incl. AI676059:wc04g08.x1 Homo sapiens cDNA, | 4.032646341 | 0.027423 |
| | 3 end /clone = IMAGE-2314238 /clone_end = 3′ | | |
| | /gb = AI676059 /gi = 4876539 /ug = Hs.163900 /len = 562′ | | |
| 79405_at | Cluster Incl. AA740146:ob26a07.s1 Homo sapiens cDNA | 4.01839873 | 0.013599 |
| | /clone = IMAGE-1324788 /gb = AA740146 /gi = 2778738 | | |
| | /ug = Hs.192397 /len = 460 | | |
| 90224_at | Cluster Incl. AI276259:ql65f03.x1 Homo sapiens cDNA, | 4.004273997 | 0.008055 |
| | 3 end /clone = IMAGE-1877213 /clone_end = 3′ | | |
| | /gb = AI276259 /gi = 3898533 /ug = Hs.13337 /len = 505′ | | |
| 87802_at | Cluster Incl. AA613291:no39d04.s1 Homo sapiens cDNA, | 3.985917634 | 0.004647 |
| | 3 end /clone = IMAGE-1103047 /clone_end = 3′ | | |
| | /gb = AA613291 /gi = 2464329 /ug = Hs.234346 /len = 482′ | | |
| 87684_at | Cluster Incl. AW007058:ws49f05.x1 Homo sapiens cDNA, | 3.965226206 | 0.017504 |
| | 3 end /clone = IMAGE-2500545 /clone_end = 3′ | | |
| | /gb = AW007058 /gi = 5855836 /ug = Hs.232261 /len = 345′ | | |
| 82496_at | Cluster Incl. AA832417:oc99d03.s1 Homo sapiens cDNA, | 3.933719194 | 0.022181 |
| | 3 end /clone = IMAGE-1357829 /clone_end = 3′ | | |
| | /gb = AA832417 /gi = 2905516 /ug = Hs.139650 /len = 402′ | | |
| 89253_at | Cluster Incl:AI653050:wb42h02.x1 Homo sapiens cDNA, | 3.928266882 | 0.000754 |
| | 3 end /clone = IMAGE-2308371 /clone_end = 3′ | | |
| | /gb = AI653050 /gi = 4737029 /ug = Hs.162717 /len = 698′ | | |
| 78846_at | Cluster Incl. AA931876:oo58f04.s1 Homo sapiens cDNA, | 3.910353677 | 0.005377 |
| | 3 end /clone = IMAGE-1570399 /clone_end = 3′ | | |
| | /gb = AA931876 /gi = 3086262 /ug = Hs.181245 /len = 489′ | | |
| 88840_at | Cluster Incl. AI393205:tg14b07.x1 Homo sapiens cDNA, | 3.900166459 | 0.01782 |
| | 3 end /clone = IMAGE-2108725 /clone_end = 3′ | | |
| | /gb = AI393205 /gi = 4222752 /ug = Hs.126265 /len = 614′ | | |
| 86478_at | Cluster Incl. AI741566:wg21g12.x1 Homo sapiens cDNA, | 3.89585652 | 0.000249 |
| | 3 end /clone = IMAGE-2365798 /clone_end = 3′ | | |
| | /gb = AI741566 /gi = 5109854 /ug = Hs.200099 /len = 614′ | | |
| 89973_at | Cluster Incl. AI656161:tt43g10.x1 Homo sapiens cDNA, | 3.853888055 | 0.003549 |
| | 3 end /clone = IMAGE-2243586 /clone_end = 3′ | | |
| | /gb = AI656161 /gi = 4740140 /ug = Hs.122810 /len = 542′ | | |
| 69247_at | Cluster Incl. AI984074:wz56c02.x1 Homo sapiens cDNA, | 3.846943175 | 0.002703 |
| | 3 end /clone = IMAGE-2562050 /clone_end = 3′ | | |
| | /gb = AI984074 /gi = 5811293 /ug = Hs.196398 /len = 614′ | | |
| 77225_at | Cluster Incl. AI740516:wg16a11.x1 Homo sapiens cDNA, | 3.845535109 | 0.003211 |
| | 3 end /clone = IMAGE-2365244 /clone_end = 3′ | | |
| | /gb = AI740516 /gi = 5108804 /ug = Hs.152812 /len = 591′ | | |
| 90524_at | Cluster Incl. AI889361:wm98b08.x1 Homo sapiens cDNA, | 3.806709116 | 0.032956 |
| | 3 end /clone = IMAGE-2443959 /clone_end = 3′ | | |
| | /gb = AI889361 /gi = 5594525 /ug = Hs.148289 /len = 486′ | | |
| 72388_at | Cluster Incl. AA608808:af04e10.s1 Homo sapiens cDNA, | 3.793457244 | 0.000011 |
| | 3 end /clone = IMAGE-1030698 /clone_end = 3′ | | |
| | /gb = AA608808 /gi = 2457236 /ug = Hs.225118 /len = 393′ | | |
| 84407_r_a | Cluster Incl. AI032906:ox19e08.s1 Homo sapiens cDNA, | 3.767444971 | 0.00167 |
| | 3 end /clone = IMAGE-1656806 /clone_end = 3′ | | |
| | /gb = AI032906 /gi = 3253859 /ug = Hs.167800 /len = 471′ | | |
| 75621_at | Cluster Incl. AI935035:wd17g08.x1 Homo sapiens cDNA, | 3.764029378 | 0.048154 |
| | 3 end /clone = IMAGE-2328446 /clone_end = 3′ | | |
| | /gb = AI935035 /gi = 5673905 /ug = Hs.145656 /len = 483′ | | |
| 82539_at | Cluster Incl. AI935586:wo98c05.x1 Homo sapiens cDNA, | 3.761588053 | 0.004131 |
| | 3 end /clone = IMAGE-2463368 /clone_end = 3′ | | |
| | /gb = AI935586 /gi = 5674456 /ug = Hs.142869 /len = 516′ | | |
| 90265_at | Cluster Incl. AW050627:wz19e03.x1 Homo sapiens cDNA, | 3.751652632 | 0.000052 |
| | 3 end /clone = IMAGE-2558524 /clone_end = 3′ | | |
| | /gb = AW050627 /gi = 5912897 /ug = Hs.135183 /len = 477′ | | |
| 81787_i_a | Cluster Incl. AI425019:tg50c11.x1 Homo sapiens cDNA, | 3.729431315 | 0.020585 |
| | 3 end /clone = IMAGE-2112212 /clone_end = 3′ | | |
| | /gb = AI425019 /gi = 4270950 /ug = Hs.124280 /len = 509′ | | |
| 81953_at | Cluster Incl. AI733253:oo60c07.x5 Homo sapiens cDNA, | 3.673677735 | 0.001218 |
| | 3 end /clone = IMAGE-1570572 /clone_end = 3′ | | |
| | /gb = AI733253 /gi = 5054366 /ug = Hs.126860 /len = 531′ | | |
| 89731_at | Cluster Incl. AI017165:ou28a11.x1 Homo sapiens cDNA, | 3.660093991 | 0.026076 |
| | 3 end /clone = IMAGE-1627580 /clone_end = 3′ | | |
| | /gb = AI017165 /gi = 3231501 /ug = Hs.104573 /len = 461′ | | |
| 88214_at | Cluster Incl. AI473909:ti68d07.x1 Homo sapiens cDNA, | 3.657078333 | 0.001554 |
| | 3 end /clone = IMAGE-2137165 /clone_end = 3′ | | |
| | /gb = AI473909 /gi = 4326954 /ug = Hs.239658 /len = 402′ | | |
| 71534_at | Cluster Incl. AA584378:nn77b04.s1 Homo sapiens cDNA, | 3.64418462 | 0.000698 |
| | 3 end /clone = IMAGE-1089871 /clone_end = 3′ | | |
| | /gb = AA584378 /gi = 2368987 /ug = Hs.219473 /len = 404′ | | |
| 91313_at | Cluster Incl. AA131041:zo16e03.s1 Homo sapiens cDNA, | 3.641675284 | 0.003603 |
| | 3 end /clone = IMAGE-587068 /clone_end = 3′ | | |
| | /gb = AA131041 /gi = 1692593 /ug = Hs.82554 /len = 539′ | | |
| 74698_at | Cluster Incl. AW003102:wr03e03.x1 Homo sapiens cDNA, | 3.636444818 | 0.004914 |
| | 3 end /clone = IMAGE-2480476 /clone_end = 3′ | | |
| | /gb = AW003102 /gi = 5849940 /ug = Hs.131886 /len = 512′ | | |
| 76293_at | Cluster Incl. AI632750:wa33g09.x1 Homo sapiens cDNA, | 3.614166118 | 0.001198 |
| | 3 end /clone = IMAGE-2299936 /clone_end = 3′ | | |
| | /gb = AI632750 /gi = 4684080 /ug = Hs.121233 /len = 519′ | | |
| 67246_at | Cluster Incl. AI040381:ox16c09.x1 Homo-sapienscDNA, | 3.607391355 | 0.010336 |
| | 3 end /clone = IMAGE-1656496 /clone_end = 3′ | | |
| | /gb = AI040381 /gi = 3279575 /ug = Hs.182430 /len = 535′ | | |
| 76041_g_{—} | Cluster Incl. AI492574:ti29f08.x1 Homo sapiens cDNA, | 3.554944957 | 0.001981 |
| | 3 end /clone = IMAGE-2131911 /clone_end = 3′ | | |
| | /gb = AI492574 /gi = 4393577 /ug = Hs.234190 /len = 535′ | | |
| 91762_at | Cluster Incl. AA496243:zx70g12.s1 Homo sapiens cDNA, | 3.524153823 | 0.004236 |
| | 3 end /clone = IMAGE-796870 /clone_end = 3′ | | |
| | /gb = AA496243 /gi = 2229564 /ug = Hs.84640 /len = 579′ | | |
| 76137_at | Cluster Incl. AA639753:nq82c12.s1 Homo sapiens cDNA, | 3.523452759 | 0.005364 |
| | 3 end /clone = IMAGE-1158838 /clone_end = 3′ | | |
| | /gb = AA639753 /gi = 2563532 /ug = Hs.116462 /len = 645′ | | |
| 87456_at | Cluster Incl. AI990471:ws40a05.x1 Homo sapiens cDNA, | 3.511142884 | 0.000815 |
| | 3 end /clone = IMAGE-2499632 /clone_end = 3′ | | |
| | /gb = AI990471 /gi = 5837352 /ug = Hs.224630 /len = 497′ | | |
| 80760_i_a | Cluster Incl. AI888428:wn20h08.x1 Homo sapiens cDNA, | 3.509284285 | 0.024008 |
| | 3 end /clone = IMAGE-2446047 /clone_end = 3′ | | |
| | /gb = AI888428 /gi = 5593515 /ug = Hs.5402 /len = 395′ | | |
| 88678_at | Cluster Incl. AF121164:AF121164 Homo sapiens cDNA | 3.494772543 | 0.001841 |
| | /clone = PFGTG1-2 /gb = AF121164 /gi = 4886240 | | |
| | /ug = Hs.120879 /len = 654 | | |
| 90509_at | Cluster Incl. AI968197:wu14c07.x1 Homo sapiens cDNA, | 3.477306776 | 0.010461 |
| | 3 end /clone = IMAGE-2516940 /clone_end = 3′ | | |
| | /gb = AI968197 /gi = 5765015 /ug = Hs.14587 /len = 541′ | | |
| 73188_s_{—} | Cluster Incl. AA948682:oq49b11.s1 Homo sapiens cDNA, | 3.462332464 | 0.003352 |
| | 3 end /clone = IMAGE-1589661 /clone_end = 3′ | | |
| | /gb = AA948682 /gi = 3109935 /ug = Hs.235393 /len = 411′ | | |
| 74964_at | Cluster Incl. AA045735:zk81g12.s1 Homo sapiens cDNA, | 3.461482296 | 0.000176 |
| | 3 end /clone = IMAGE-489286 /clone_end = 3′ | | |
| | /gb = AA045735 /gi = 1525629 /ug = Hs.133961 /len = 399′ | | |
| 89166_at | Cluster Incl. AI953998:wx78c12.x1 Homo sapiens cDNA, | 3.455539647 | 0.000616 |
| | 3 end /clone = IMAGE-2549782 /clone_end = 3′ | | |
| | /gb = AI953998 /gi = 5746308 /ug = Hs.152510 /len = 679′ | | |
| 90732_at | Cluster Incl. W45137:zc81g05.s1 Homo sapiens cDNA, | 3.437671708 | 0.001008 |
| | 3 end /clone = IMAGE-328760 /clone_end = 3′ | | |
| | /gb = W45137 /gi = 1329442 /ug = Hs.183576 /len = 481′ | | |
| 69037_r_a | Cluster Incl. AA730798:nw49b12.s1 Homo sapiens cDNA | 3.434365508 | 0.02404 |
| | /clone = IMAGE-1249919 /gb = AA730798 /gi = 2752002 | | |
| | /ug = Hs.194135 /len = 310 | | |
| 84983_at | Cluster Incl. AI741880:wg48b12.x1 Homo sapiens cDNA, | 3.429078419 | 0.022269 |
| | 3 end /clone = IMAGE-2368319 /clone_end = 3′ | | |
| | /gb = AI741880 /gi = 5110255 /ug = Hs.179891 /len = 454′ | | |
| 92067_s_{—} | Cluster Incl. AI348900:ta98e05.x1 Homo sapiens cDNA, | 3.420352947 | 0.031666 |
| | 3 end /clone = IMAGE-2052128 /clone_end = 3′ | | |
| | /gb = AI348900 /gi = 4086106 /ug = Hs.25199 /len = 420′ | | |
| 80859_at | Cluster Incl. AI684877:wa86f08.x1 Homo sapiens cDNA, | 3.414213425 | 0.000763 |
| | 3 end /clone = IMAGE-2303079 /clone_end = 3′ | | |
| | /gb = AI684877 /gi = 4896171 /ug = Hs.105489 /len = 768′ | | |
| 75954_at | Cluster Incl. AI978606:wr57b07.x1 Homo sapiens cDNA, | 3.410569117 | 0.019697 |
| | 3 end /clone = IMAGE-2491765 /clone_end = 3′ | | |
| | /gb = AI978606 /gi = 5803636 /ug = Hs.201615 /len = 585′ | | |
| 74159_at | Cluster Incl. AA534390:nf79h07.s1 Homo sapiens cDNA, | 3.401564012 | 0.029962 |
| | 3 end /clone = IMAGE-926173 /clone_end = 3′ | | |
| | /gb = AA534390 /gi = 2278643 /ug = Hs.127762 /len = 588′ | | |
| 76075_at | Cluster Incl. AW014657:UI-H-BI0p-aaw-b-11-0-UI.s1 Homo sapiens cDNA, | 3.375380748 | 0.006718 |
| | 3 end /clone = IMAGE-2710628 /clone_end = 3′ | | |
| | /gb = AW014557 /gi = 5863314 /ug = Hs.112420 /len = 618′ | | |
| 90203_at | Cluster Incl. AI819204:wj32f08.x1 Homo sapiens cDNA, | 3.345450186 | 0.000782 |
| | 3 end /clone = IMAGE-2404551 /clone_end = 3′ | | |
| | /gb = AI819204 /gi = 5438283 /ug = Hs.132743 /len = 514′ | | |
| 89795_at | Cluster Incl. AL040892:DKFZp434I1715_s1 Homo sapiens cDNA, | 3.343086565 | 0.01438 |
| | 3 end /clone = DKFZp434I1715 /clone end = 3′ | | |
| | /gb = AL040892 /gi = 5409837 /ug = Hs.114173 /len = 717′ | | |
| 86866_r_a | Cluster Incl. AI765629:wi82e01.x1 Homo sapiens cDNA, | 3.315297451 | 0.010622 |
| | 3 end /clone = IMAGE-2399832 /clone_end = 3′ | | |
| | /gb = AI765629 /gi = 5232138 /ug = Hs.207278 /len = 332′ | | |
| 87205_at | Cluster Incl. AA419233:zv35f05.s1 Homo sapiens cDNA, | 3.312326275 | 0.004096 |
| | 3 end /clone = IMAGE-755649 /clone_end = 3′ | | |
| | /gb = AA419233 /gi = 2078997 /ug = Hs.215682 /len = 423′ | | |
| 78393_at | Cluster Incl. AA725820:ai25b05.s1 Homo sapiens cDNA, | 3.311882393 | 0.021412 |
| | 3 end /clone = 1343793 /clone_end = 3′ | | |
| | /gb = AA725820 /gi = 2743527 /ug = Hs.123426 /len = 472′ | | |
| 74179_at | Cluster Incl. AI889959:wm65f08.x1 Homo sapiens cDNA, | 3.305411403 | 0.004734 |
| | 3 end /clone = IMAGE-2440839 /clone_end = 3′ | | |
| | /gb = AI889959 /gi = 5595123 /ug = Hs.127797 /len = 479′ | | |
| 89306_at | Cluster Incl. AI934965:wd17a03.x1 Homo sapiens cDNA, | 3.300123522 | 0.020207 |
| | 3 end /clone = IMAGE-2328364 /clone_end = 3′ | | |
| | /gb = AI934965 /gi = 5673835 /ug = Hs.181261 /len = 588′ | | |
| 69031_at | Cluster Incl. AI686521:tu34g02.x1 Homo sapiens cDNA, | 3.296015126 | 0.011834 |
| | 3 end /clone = IMAGE-2252978 /clone_end = 3′ | | |
| | /gb = AI686521 /gi = 4897815 /ug = Hs.194118 /len = 597′ | | |
| 88302_at | Cluster Incl. AI082708:ox59f01.s1 Homo sapiens cDNA, | 3.287284047 | 0.009528 |
| | 3 end /clone = IMAGE-1660633 /clone_end = 3′ | | |
| | /gb = AI082708 /gi = 3419500 /ug = Hs.31588 /len = 369′ | | |
| 78861_f_a | Cluster Incl. H18887:yn52d11.s1 Homo sapiens cDNA, | 3.283264496 | 0.000041 |
| | 3 end /clone = IMAGE-172053 /clone end = 3′ | | |
| | /gb = H18887 /gi = 885127 /ug = Hs.181836 /len = 401′ | | |
| 81733_at | Cluster Incl. AI632972:tx55h08.x1 Homo sapiens cDNA, | 3.270101441 | 0.001223 |
| | 3 end /clone = IMAGE-2273535 /clone_end = 3′ | | |
| | /gb = AI632972 /gi = 4684302 /ug = Hs.123370 /len = 562′ | | |
| 90603_at | Cluster Incl. AI916544:wa26h03.x1 Homo sapiens cDNA, | 3.268418769 | 0.013059 |
| | 3 end /clone = IMAGE-2299253 /clone_end = 3′ | | |
| | /gb = AI916544 /gi = 5636399 /ug = Hs.158549 /len = 475′ | | |
| 71228_at | Cluster Incl. AI919493:tp22a03.x1 Homo sapiens cDNA, | 3.264815022 | 0.016554 |
| | 3 end /clone = IMAGE-2188492 /clone_end = 3′ | | |
| | /gb = AI919493 /gi = 5639348 /ug = Hs.212925 /len = 320′ | | |
| 68060_at | Cluster Incl. AI681180:tx44h02.x1 Homo sapiens cDNA, | 3.258903714 | 0.003186 |
| | 3 end /clone = IMAGE-2272467 /clone_end = 3′ | | |
| | /gb = AI681180 /gi = 4891362 /ug = Hs.189394 /len = 489′ | | |
| 81731_at | Cluster Incl. AA811371:6b82b10.s1 Homo sapiens cDNA | 3.254465131 | 0.008956 |
| | /clone = IMAGE-1337851 /gb = AA811371 | | |
| | /gi = 2880982 /ug = Hs.123362 /len = 482 | | |
| 80538_s_{—} | Cluster Incl. AW020375:df08h01.y1 Homo sapiens cDNA, | 3.238426465 | 0.000033 |
| | 5 end /clone = IMAGE-2483185 /clone_end = 5′ | | |
| | /gb = AW020375 /gi = 5873905 /ug = Hs.238653 /len = 339′ | | |
| 83130_at | Cluster Incl. AI683864:tw54a08.x1 Homo sapiens cDNA, | 3.237963905 | 0.002982 |
| | 3 end /clone = IMAGE-2263478 /clone_end = 3′ | | |
| | /gb = AI683864 /gi = 4894046 /ug = Hs.149264 /len = 489′ | | |
| 86750_at | Cluster Incl. AI888991:wj16b04.x1 Homo sapiens cDNA, | 3.22255218 | 0.002743 |
| | 3 end /clone = IMAGE-2402959 /clone_end = 3′ | | |
| | /gb = AI888991 /gi = 5594155 /ug = Hs.204044 /len = 528′ | | |
| 82094_i_a | Cluster Incl. AI810266:wb86h07.x1 Homo sapiens cDNA, | 3.218521352 | 0.031896 |
| | 3 end /clone = IMAGE-2312605 /clone_end = 3′ | | |
| | /gb = AI810266 /gi = 5396832 /ug = Hs.130853 /len = 553′ | | |
| 80080_at | Cluster Incl. AI916889:wb46g08.x1 Homo sapiens cDNA, | 3.213809716 | 0.003436 |
| | 3 end /clone = IMAGE-2308766 /clone_end = 3′ | | |
| | /gb = AI916889 /gi = 5636744 /ug = Hs.213436 /len = 480′ | | |
| 76779_at | Cluster Incl. AW014285:UI-H-BI0-aak-h-03-0-UI.s1 Homo sapiens cDNA, | 3.210119895 | 0.012957 |
| | 3 end /clone = IMAGE-2709748 /clone_end = 3′ | | |
| | /gb = AW014285 /gi = 5863042 /ug = Hs.133925 /len = 493′ | | |
| 88103_s_{—} | Cluster Incl. AW007018:ws49b10.x1 Homo sapiens cDNA, | 3.190608857 | 0.030944 |
| | 3 end /clone = IMAGE-2500507 /clone_end = 3′ | | |
| | /gb = AW007018 /gi = 5855796 /ug = Hs.239125 /len = 524′ | | |
| 88452_at | Cluster Incl. AI625821:ty65b01.x1 Homo sapiens cDNA, | 3.188760476 | 0.004402 |
| | 3 end /clone = IMAGE-2283913 /clone_end = 3′ | | |
| | /gb = AI625821 /gi = 4650752 /ug = Hs.101320 /len = 647′ | | |
| 78788_at | Cluster Incl. AI674088:wd18a08.x1 Homo sapiens cDNA, | 3.185705139 | 0.013029 |
| | 3 end /clone = IMAGE-2328470 /clone_end = 3′ | | |
| | /gb = AI674088 /gi = 4874568 /ug = Hs.8122 /len = 576′ | | |
| 75722_at | Cluster Incl. AA766775:oa35d08.s1 Homo sapiens cDNA | 3.176732451 | 0.004027 |
| | /clone = IMAGE-1306959 /gb = AA766775 | | |
| | /gi = 2818013 /ug = Hs.163195 /len = 440 | | |
| 85325_at | Cluster Incl. W89075:zh73a10.s1 Homo sapiens cDNA, | 3.174084701 | 0.001733 |
| | 3 end /clone = IMAGE-417690 /clone_end = 3′ | | |
| | /gb = W89075 /gi = 1404168 /ug = Hs.186182 /len = 456′ | | |
| 72349_at | Cluster Incl. D29047:HUMNK041 Homo sapiens cDNA | 3.169517307 | 0.000389 |
| | /clone = 041 /gb = D29047 /gi = 598980 | | |
| | /ug = Hs.224812 /len = 418 | | |
| 85939_at | Cluster Incl. AI694139:wd89c05.x1 Homo sapiens cDNA, | 3.161612049 | 0.02562 |
| | 3 end /clone = IMAGE-2338760 /clone_end = 3′ | | |
| | /gb = AI694139 /gi = 4971479 /ug = Hs.192855 /len = 330′ | | |
| 79188_r_a | Cluster Incl. T72642:yd19d02.s1 Homo sapiens cDNA, | 3.154189137 | 0.009489 |
| | 3 end /clone = IMAGE-108675 /clone_end = 3′ | | |
| | /gb = T72642 /gi = 689317 /ug = Hs.191118 /len = 428′ | | |
| 87790_at | Cluster Incl. AW015585:UI-H-BI0p-aau-h-09-0-UI.s1 Homo sapiens cDNA, | 3.153789914 | 0.000844 |
| | 3 end /clone = IMAGE-2710888 /clone_end = 3′ | | |
| | /gb = AW015585 /gi = 5864342 /ug = Hs.234252 /len = 630′ | | |
| 89603_at | Cluster Incl. R77227:yi72c10.s1 Homo sapiens cDNA, | 3.137562053 | 0.004856 |
| | 3 end /clone = IMAGE-144786 /clone_end = 3′ | | |
| | /gb = R77227 /gi = 851859 /ug = Hs.237156 /len = 449′ | | |
| 84981_r_a | Cluster Incl. T54146:ya92h02.s1 Homo sapiens cDNA, | 3.123046617 | 0.031758 |
| | 3 end /clone = IMAGE-69171 /clone_end = 3′ | | |
| | /gb = T54146 /gi = 656007 /ug = Hs.179847 /len = 559′ | | |
| 81355_at | Cluster Incl. AA946617:oq38e04.s1 Homo sapiens cDNA, | 3.109445352 | 0.008631 |
| | 3 end /clone = IMAGE-1588638 /clone_end = 3′ | | |
| | /gb = AA946617 /gi = 3110012 /ug = Hs.119183 /len = 525′ | | |
| 87837_at | Cluster Incl. AI656113:tt38c07.x1 Homo sapiens cDNA, | 3.097465077 | 0.0051 |
| | 3 end /clone = IMAGE-2243052 /clone_end = 3′ | | |
| | /gb = AI656113 /gi = 4740092 /ug = Hs,235408 /len = 436′ | | |
| 91875_s_{—} | Cluster Incl. AI053741:qi69h07.x1 Homo sapiens cDNA, | 3.095993734 | 0.017489 |
| | 3 end /clone = IMAGE-1861789 /clone_end = 3′ | | |
| | /gb = AI053741 /gi = 3321528 /ug = Hs.133294 /len = 337′ | | |
| 83569_at | Cluster Incl. AI823960:wj21d05.x1 Homo sapiens cDNA, | 3.088550292 | 0.044324 |
| | 3 end /clone = IMAGE-2403465 /clone_end = 3′ | | |
| | /gb = AI823960 /gi = 5444631 /ug = Hs.155718 /len = 420′ | | |
| 83331_at | Cluster Incl. AA568924:nm23b06.s1 Homo sapiens cDNA, | 3.075127644 | 0.007888 |
| | 3 end /clone = IMAGE-1060979 /clone_end = 3′ | | |
| | /gb = AA568924 /gi = 2341978 /ug = Hs.152484 /len = 475′ | | |
| 84009_at | Cluster Incl. AA218643:zq14c10.s1 Homo sapiens cDNA, | 3.073579917 | 0.000394 |
| | 3 end /clone = IMAGE-629682 /clone_end = 3′ | | |
| | /gb = AA218643 /gi = 1832735 /ug = Hs.161690 /len = 460′ | | |
| 86916_at | Cluster Incl. R24723:yg43c04.r1 Homo sapiens cDNA, | 3.069508621 | 0.001131 |
| | 5 end /clone = IMAGE-35336 /clone_end = 5′ | | |
| | /gb = R24723 /gi = 779611 /ug = Hs.208543 /len = 430′ | | |
| 84893_at | Cluster Incl. AI446168:tj07h07.x1 Homo sapiens cDNA, | 3.066866421 | 0.023278 |
| | 3 end /clone = IMAGE-2140861 /clone_end = 3′ | | |
| | /gb = AI446168 /gi = 4293320 /ug = Hs.176708 /len = 435′ | | |
| 84612_at | Cluster Incl. AI864428:wl53a09.x1 Homo sapiens cDNA, | 3.065443135 | 0.005335 |
| | 3 end /clone = IMAGE-2428600 /clone_end = 3′ | | |
| | /gb = AI864428 /gi = 5528535 /ug = Hs.170880 /len = 343′ | | |
| 73780_at | Cluster Incl. AA838748:ak03c10.s1 Homo sapiens cDNA, | 3.06404637 | 0.009987 |
| | 3 end /clone = IMAGE-1404882 /clone_end = 3′ | | |
| | /gb = AA838748 /gi = 2914860 /ug = Hs.123910 /len = 543′ | | |
| 75705_at | Cluster Incl. AI634652:wa07e10.x1 Homo sapiens cDNA, | 3.058453349 | 0.001904 |
| | 3 end /clone = IMAGE-2297418 /clone_end = 3′ | | |
| | /gb = AI634652 /gi = 4685982 /ug = Hs.160795 /len = 563′ | | |
| 70150_at | Cluster Incl. AI791593:oj57h03.y5 Homo sapiens cDNA, | 3.050814176 | 0.000397 |
| | 5 end /clone = IMAGE-1502453 /clone_end = 5′ | | |
| | /gb = AI791593 /gi = 5339309 /ug = Hs.203472 /len = 472′ | | |
| 72125_at | Cluster Incl. N73802:yz80f05.s1 Homo sapiens cDNA, | 3.037955969 | 0.009677 |
| | 3 end /clone = IMAGE-289377 /clone_end = 3′ | | |
| | /gb = N73802 /gi = 1231087 /ug = Hs.222824 /len = 385′ | | |
| 75212_at | Cluster Incl. AI365208:qx97f11.x1 Homo sapiens cDNA, | 3.027135566 | 0.003503 |
| | 3 end /clone = IMAGE-2010477 /clone_end = 3′ | | |
| | /gb = AI365208 /gi = 4124897 /ug = Hs.138480 /len = 291′ | | |
| 91678_at | Cluster Incl. AI814761:wk65d07.x1 Homo sapiens cDNA, | 3.012896674 | 0.018287 |
| | 3 end /clone = IMAGE-2420269 /clone_end = 3′ | | |
| | /gb = AI814761 /gi = 5425976 /ug = Hs.9204 /len = 497′ | | |
| 90016_at | Cluster Incl. AI961177:wq59b09.x1 Homo sapiens cDNA, | 3.00787812 | 0.013132 |
| | 3 end /clone = IMAGE-2475545 /clone_end = 3′ | | |
| | /gb = AI961177 /gi = 5753890 /ug = Hs.124832 /len = 835′ | | |
| 73002_at | Cluster Incl. AI052526:oz27f09.x1 Homo sapiens cDNA, | 2.999958702 | 0.009676 |
| | 3 end /clone = IMAGE-1676585 /clone_end = 3′ | | |
| | /gb = AI052526 /gi = 3308517 /ug = Hs.233871 /len = 290′ | | |
| 90757_at | Cluster Incl. AI985612:wr75d05.x1 Homo sapiens cDNA, | 0.329081864 | 0.008916 |
| | 3 end /clone = IMAGE-2493513 /clone_end = 3′ | | |
| | /gb = AI985612 /gi = 5812889 /ug = Hs.184484 /len = 486′ | | |
| 78336_at | Cluster Incl. AI434477:ti37d01.x1 Homo sapiens cDNA, | 0.326191217 | 0.0046 |
| | 3 end /clone = IMAGE-2132641 /clone_end = 3′ | | |
| | /gb = AI434477 /gi = 4296452 /ug = Hs.210531 /len = 421′ | | |
| 73721_at | Cluster Incl. AA813527:ai67f11.s1 Homo sapiens cDNA, | 0.325630713 | 0.0109 |
| | 3 end /clone = 1375917 /clone_end = 3′ | | |
| | /gb = AA813527 /gi = 2882212 /ug = Hs.122814 /len = 459′ | | |
| 72371_at | Cluster Incl. AI168188:oo09g11.x1 Homo sapiens cDNA, | 0.324150837 | 0.000589 |
| | 3 end /clone = IMAGE-1565732 /clone_end = 3′ | | |
| | /gb = AI168188 /gi = 3701358 /ug = Hs.225023 /len = 448′ | | |
| 71418_at | Cluster Incl. AI093188:qa98b05.x1 Homo sapiens cDNA, | 0.323684024 | 0.003636 |
| | 3 end /clone = IMAGE-1694769 /clone_end = 3′ | | |
| | /gb = AI093188 /gi = 3432164 /ug = Hs.215319 /len = 471′ | | |
| 86567_at | Cluster Incl. R19892:yg38f12.r1 Homo sapiens cDNA, | 0.320952495 | 0.00589 |
| | 5 end /clone = IMAGE-34798 /clone_end = 5′ | | |
| | /gb = R19892 /gi = 774526 /ug = Hs.201458 /len = 503′ | | |
| AFFX-HS | X00351 Human mRNA for beta-actin (_5, _M, _3 represent transcript | 0.320408458 | 0.004505 |
| | regions 5 prime, Middle, and 3 prime respectively) | | |
| 72290_r_a | Cluster Incl. AA814901:oa75g08.s1 Homo sapiens cDNA | 0.320177197 | 0.042106 |
| | /clone = IMAGE-1318142 /gb = AA814901 | | |
| | /gi = 2884497 /ug = Hs.224495 /len = 459 | | |
| 87950_at | Cluster Incl. AA313781:EST185644 Homo sapiens cDNA, | 0.320113508 | 0.001602 |
| | 5 end /clone = ATCC-109963 /clone_end = 5′ | | |
| | /gb = AA313781 /gi = 1966110 /ug = Hs.236903 /len = 599′ | | |
| 91014_at | Cluster Incl. N23781:yx35e09.r1 Homo sapiens cDNA, | 0.31964593 | 0.028338 |
| | 5 end /clone = IMAGE-263752 /clone_end = 5′ | | |
| | /gb = N23781 /gi = 1137931 /ug = Hs.226614 /len = 592′ | | |
| 70650_at | Cluster Incl. AA779712:af43h05.s1 Homo sapiens cDNA, | 0.318766299 | 0.010363 |
| | 3 end /clone = 1034457 /clone_end = 3′ | | |
| | /gb = AA779712 /gi = 2839043 /ug = Hs.208718 /len = 606′ | | |
| 69829_at | Cluster Incl. AI684559:wa84a03.x1 Homo sapiens cDNA, | 0.315917401 | 0.020149 |
| | 3 end /clone = IMAGE-2302828 /clone_end = 3′ | | |
| | /gb = AI684559 /gi = 4895853 /ug = Hs.201637 /len = 507′ | | |
| 91462_at | Cluster Incl. W26201:22c1 Homo sapiens cDNA | 0.315659043 | 0.00959 |
| | /gb = W26201 /gi = 1306612 /ug = Hs.183793 /len = 470 | | |
| 84412_at | Cluster Incl. AI525044:promrna-5.C09.r Homo sapiens cDNA, | 0.313783504 | 0.009654 |
| | 5 end /clone_end = 5′ /gb = AI525044 | | |
| | /gi = 4439179 /ug = Hs.168007 /len = 639′ | | |
| 78228_s_{—} | Cluster Incl. AI561042:tq29e02.x1 Homo sapiens cDNA, | 0.312957775 | 0.008401 |
| | 3 end /clone = IMAGE-2210234 /clone_end = 3′ | | |
| | /gb = AI561042 /gi = 4511383 /ug = Hs.239771 /len = 635′ | | |
| 67280_at | Cluster Incl. AI243125:qh26h01.x1 Homo sapiens cDNA, | 0.312853457 | 0.03165 |
| | 3 end /clone = IMAGE-1845841 /clone_end = 3′ | | |
| | /gb = AI243125 /gi = 3838522 /ug = Hs.182947 /len = 388′ | | |
| 72558_at | Cluster Incl. AI858718:wl41f12.x1 Homo sapiens cDNA, | 0.312511549 | 0.014896 |
| | 3 end /clone = IMAGE-2427503 /clone_end = 3′ | | |
| | /gb = AI858718 /gi = 5512334 /ug = Hs.226562 /len = 654′ | | |
| 76043_at | Cluster Incl. AW015534:UI-H-BI0p-aau-b-12-0-UI.s1 Homo sapiens cDNA, | 0.312460844 | 0.007489 |
| | 3 end /clone = IMAGE-2710606 /clone_end = 3′ | | |
| | /gb = AW015534 /gi = 5864281 /ug = Hs.234248 /len = 519′ | | |
| 84991_at | Cluster Incl. AI732539:ni01f09.x5 Homo sapiens cDNA, | 0.31169073 | 0.040979 |
| | 3 end /clone = IMAGE-966761 /clone_end = 3′ | | |
| | /gb = AI732539 /gi = 5053652 /ug = Hs.180142 /len = 508′ | | |
| 71283_at | Cluster Incl. R35259:yg61b10.r1 Homo sapiens cDNA, | 0.311634623 | 0.000087 |
| | 5 end /clone = IMAGE-37315 /clone_end = 5′ | | |
| | /gb = R35259 /gi = 792160 /ug = Hs.213548 /len = 513′ | | |
| 79909_i_a | Cluster Incl. AI808615:wf56f01.x1 Homo sapiens cDNA, | 0.310115615 | 0.000765 |
| | 3 end /clone = IMAGE-2359609 /clone_end = 3′ | | |
| | /gb = AI808615 /gi = 5395181 /ug = Hs.202625 /len = 443′ | | |
| 84081_at | Cluster Incl. Al420234:te98b01.x1 Homo sapiens cDNA, | 0.309511353 | 0.000025 |
| | 3 end /clone = IMAGE-2094697 /clone_end = 3′ | | |
| | /gb = AI420234 /gi = 4266165 /ug = Hs.163645 /len = 501′ | | |
| 83406_at | Cluster Incl. AI935292:wp16e07.x1 Homo sapiens cDNA, | 0.307974308 | 0.006092 |
| | 3 end /clone = IMAGE-2465028 /clone_end = 3′ | | |
| | /gb = AI935292 /gi = 5674162 /ug = Hs.153408 /len = 573′ | | |
| 68268_at | Cluster Incl. AA702143:zi85h05.s1 Homo sapiens cDNA, | 0.30729455 | 0.027087 |
| | 3 end /clone = 447609 /clone_end = 3′ | | |
| | /gb = AA702143 /gi = 2705256 /ug = Hs.190365 /len = 447′ | | |
| 84950_at | Cluster Incl. AI681868:tx50a12.x1 Homo sapiens cDNA, | 0.304600093 | 0.000743 |
| | 3 end /clone = IMAGE-2272990 /clone_end = 3′ | | |
| | /gb = AI681868 /gi = 4892050 /ug = Hs.178784 /len = 562′ | | |
| 71416_at | Cluster Incl. AI023259:ov64g12.s1 Homo sapiens cDNA, | 0.303909365 | 0.000025 |
| | 3 end /clone = IMAGE-1642150 /clone_end = 3′ | | |
| | /gb = AI023259 /gi = 3238500 /ug = Hs.215260 /len = 501′ | | |
| 79484_r_a | Cluster Incl. N73382:EST55b03 Homo sapiens cDNA | 0.303863976 | 0.033101 |
| | /clone = 55b03 /gb = N73382 /gi = 1230490 /ug = Hs.193146 | | |
| | /len = 398 | | |
| 76752_at | Cluster Incl. AI653380:wb45d09.x1 Homo sapiens cDNA, | 0.30383599 | 0.00007 |
| | 3 end /clone = IMAGE-2308625 /clone_end = 3′ | | |
| | /gb = AI653380 /gi = 4737359 /ug = Hs.133081 /len = 517′ | | |
| 88480_at | Cluster Incl. AI076929:ov20f07.x1 Homo sapiens cDNA, | 0.303580242 | 0.04562 |
| | 3 end /clone = IMAGE-1637893 /clone_end = 3′ | | |
| | /gb = AI076929 /gi = 3404758 /ug = Hs.105887 /len = 589′ | | |
| 76056_at | Cluster Incl. AA161405:zo72g08.r1 Homo sapiens cDNA, | 0.301518123 | 0.016888 |
| | 5 end /clone = IMAGE-592478 /clone_end = 5′ | | |
| | /gb = AA161405 /gi = 1735835 /ug = Hs.237871 /len = 666′ | | |
| 84827_at | Cluster Incl. H45983:yo13b04.s1 Homo sapiens cDNA, | 0.299353312 | 0.004482 |
| | 3 end /clone = IMAGE-177775 /clone_end = 3′ | | |
| | /gb = H45983 /gi = 922035 /ug = Hs.174198 /len = 485′ | | |
| 91207_at | Cluster Incl. AA923142:on18e11.s1 Homo sapiens cDNA, | 0.294579992 | 0.002012 |
| | 3 end /clone = IMAGE-1557068 /clone_end = 3′ | | |
| | /gb = AA923142 /gi = 3070451 /ug = Hs.24884 /len = 653′ | | |
| 81631_at | Cluster Incl. AW007764:wt68h01.x1 Homo sapiens cDNA, | 0.294066245 | 0.024164 |
| | 3 end /clone = IMAGE-2512657 /clone_end = 3′ | | |
| | /gb = AW007764 /gi = 5856542 /ug = Hs.121915 /len = 516′ | | |
| 90059_at | Cluster Incl. AI921788:wn65c05.x1 Homo sapiens cDNA, | 0.292038446 | 0.000325 |
| | 3 end /clone = IMAGE-2450312 /clone_end = 3′ | | |
| | /gb = AI921788 /gi = 5657752 /ug = Hs.126082 /len = 550′ | | |
| 71426_f_a | Cluster Incl. AI277946:qm51b03.x1 Homo sapiens cDNA, | 0.291075799 | 0.005808 |
| | 3 end /clone = IMAGE-1892237 /clone_end = 3′ | | |
| | /gb = AI277946 /gi = 3900214 /ug = Hs.215571 /len = 334′ | | |
| 81951_at | Cluster Incl. AI640180:wa30a12.x1 Homo sapiens cDNA, | 0.291050583 | 0.003823 |
| | 3 end /clone = IMAGE-2299582 /clone_end = 3′ | | |
| | /gb = AI640180 /gi = 4703289 /ug = Hs.126855 /len = 463′ | | |
| 70677_at | Cluster Incl. AI783611:tz99c01.x1 Homo sapiens cDNA, | 0.290005448 | 0.027407 |
| | 3 end /clone = IMAGE-2296704 /clone_end = 3′ | | |
| | /gb = AI783611 /gi = 5325420 /ug = Hs.208907 /len = 325′ | | |
| 79507_r_a | Cluster Incl. AA180065:zp40h07.s1 Homo sapiens cDNA, | 0.289433499 | 0.01687 |
| | 3 end /clone = IMAGE-611965 /clone_end = 3′ | | |
| | /gb = AA180065 /gi = 1761331 /ug = Hs.193579 /len = 438′ | | |
| 86556_at | Cluster Incl. AI769511:wh57h04.x1 Homo sapiens cDNA, | 0.288562177 | 0.00028 |
| | 3 end /clone = IMAGE-2384887 /clone_end = 3′ | | |
| | /gb = AI769511 /gi = 5236020 /ug = Hs.201259 /len = 550′ | | |
| 75652_at | Cluster Incl. AI983437:wt49b04.x1 Homo sapiens cDNA, | 0.28652751 | 0.006637 |
| | 3 end /clone = IMAGE-2510767 /clone_end = 3′ | | |
| | /gb = AI983437 /gi = 5810656 /ug = Hs.155145 /len = 504′ | | |
| 84975_r_a | Cluster Incl. AA649608:ns46b02.s1 Homo sapiens cDNA | 0.28641313 | 0.000038 |
| | /clone = IMAGE-1186635 /gb = AA649608 /gi = 2576936 | | |
| | /ug = Hs.179821 /len = 316 | | |
| 80632_at | Cluster Incl. AA846471:aj56d07.s1 Homo sapiens cDNA, | 0.286244603 | 0.007418 |
| | 3 end /clone = IMAGE-1394317 /clone_end = 3′ | | |
| | /gb = AA846471 /gi = 2932611 /ug = Hs.239354 /len = 643′ | | |
| 70813_at | Cluster Incl. AI797429:we54c10.x1 Homo sapiens cDNA, | 0.285905069 | 0.001632 |
| | 3 end /clone = IMAGE-2344914 /clone_end = 3′ | | |
| | /gb = AI797429 /gi = 5362901 /ug = Hs.209518 /len = 357′ | | |
| 76199_at | Cluster Incl. AA057583:zf62e12.s1 Homo sapiens cDNA, | 0.285315234 | 0.000117 |
| | 3 end /clone = IMAGE-381550 /clone_end = 3′ | | |
| | /gb = AA057583 /gi = 1550223 /ug = Hs.118553 /len = 524′ | | |
| 72405_at | Cluster Incl. AI948717:wq25a02.x1 Homo sapiens cDNA, | 0.28501066 | 0.003409 |
| | 3 end /clone = IMAGE-2472266 /clone_end = 3′ | | |
| | /gb = AI948717 /gi = 5741027 /ug = Hs.225155 /len = 505′ | | |
| 74580_at | Cluster Incl. AA417643:zv04a08.r1 Homo sapiens cDNA, | 0.284080797 | 0.006142 |
| | 5 end /clone = IMAGE-752630 /clone_end = 5′ | | |
| | /gb = AA417643 /gi = 2079462 /ug = Hs.130546 /len = 490′ | | |
| 77399_at | Cluster Incl. AI361798:qz24f08.x1 Homo sapiens cDNA, | 0.282876221 | 0.009253 |
| | 3 end /clone = IMAGE-2027847 /clone_end = 3′ | | |
| | /gb = AI361798 /gi = 4113419 /ug = Hs.164675 /len = 541′ | | |
| 78543_at | Cluster Incl. AA877572:nr05g06.s1 Homo sapiens cDNA, | 0.282804511 | 0.002194 |
| | 3 end /clone = IMAGE-1160986 /clone_end = 3′ | | |
| | /gb = AA877572 /gi = 2986537 /ug = Hs.155512 /len = 429′ | | |
| 69157_at | Cluster Incl. AI651803:wb55f04.x1 Homo sapiens cDNA, | 0.277835487 | 0.001605 |
| | 3 end /clone = IMAGE-2309599 /clone_end = 3′ | | |
| | /gb = AI651803 /gi = 4735794 /ug = Hs.195264 /len = 359′ | | |
| 86353_at | Cluster Incl. AI767724:wh39a07.x1 Homo sapiens cDNA, | 0.276458086 | 0.000703 |
| | 3 end /clone = IMAGE-2383092 /clone_end = 3′ | | |
| | /gb = AI767724 /gi = 5234233 /ug = Hs.197287 /len = 556′ | | |
| 89837_r_a | Cluster Incl. T89638:ye11d12.s1 Homo sapiens cDNA, | 0.275506295 | 0.007145 |
| | 3 end /clone = IMAGE-117431 /clone_end = 3′ | | |
| | /gb = T89638 /gi = 718151 /ug = Hs.116792 /len = 517′ | | |
| 86050_at | Cluster Incl. AA213912:zn57h11.s1 Homo sapiens cDNA, | 0.274761317 | 0.000129 |
| | 3 end /clone = IMAGE-562341 /clone_end = 3′ | | |
| | /gb = AA213912 /gi = 1812714 /ug = Hs.193564 /len = 544′ | | |
| 91748_at | Cluster Incl. W68223:zd35c12.r1 Homo sapiens cDNA, | 0.273530639 | 0.043603 |
| | 5 end /clone = IMAGE-342646 /clone_end = 5′ | | |
| | /gb = W68223 /gi = 1377161 /ug = Hs.238901 /len = 609′ | | |
| 86004_at | Cluster Incl. AA767895:oa40a11.s1 Homo sapiens cDNA | 0.273401061 | 0.000134 |
| | /clone = IMAGE-1307420 /gb = AA767895 /gi = 2818910 | | |
| | /ug = Hs.193247 /len = 538 | | |
| 87972_s_{—} | Cluster Incl. AW023444:df54h10.y1 Homo sapiens cDNA, | 0.271780784 | 0.000549 |
| | 5 end /clone = IMAGE-2487403 /clone_end = 5′ | | |
| | /gb = AW023444 /gi = 5876974 /ug = Hs.237396 /len = 465′ | | |
| 82088_at | Cluster Incl. H24953:yl39f08.s1 Homo sapiens cDNA, | 0.271229201 | 0.006574 |
| | 3 end /clone = IMAGE-160647 /clone_end = 3′ | | |
| | /gb = H24953 /gi = 893852 /ug = Hs.130815 /len = 529′ | | |
| 86204_at | Cluster Incl. AI827476:wf29g07.x1 Homo sapiens cDNA, | 0.269758658 | 0.019109 |
| | 3 end /clone = IMAGE-2357052 /clone_end = 3′ | | |
| | /gb = AI827476 /gi = 5448147 /ug = Hs.194421 /len = 520′ | | |
| 90088_at | Cluster Incl. AI807902:wf52b01.x1 Homo sapiens cDNA, | 0.269431153 | 0.001195 |
| | 3 end /clone = IMAGE-2359177 /clone_end = 3′ | | |
| | /gb = AI807902 /gi = 5394468 /ug = Hs.127301 /len = 554′ | | |
| 73728_at | Cluster Incl. AI073865:oo12a05.x1 Homo sapiens cDNA, | 0.269254487 | 0.004875 |
| | 3 end /clone = IMAGE-1565936 /clone_end = 3′ | | |
| | /gb = AI073865 /gi = 3400509 /ug = Hs.122821 /len = 458′ | | |
| 89656_at | Cluster Incl. R53734:yi02g05.r1 Homo sapiens cDNA, | 0.268646481 | 0.005615 |
| | 5 end /clone = IMAGE-138104 /clone_end = 5′ | | |
| | /gb = R53734 /gi = 815636 /ug = Hs.25978 /len = 430′ | | |
| 71466_at | Cluster Incl. AI453103:tj61f03.x1 Homo sapiens cDNA, | 0.267307121 | 0.034897 |
| | 3 end /clone = IMAGE-2146013 /clone_end = 3′ | | |
| | /gb = AI453103 /gi = 4308016 /ug = Hs.216699 /len = 481′ | | |
| 81596_at | Cluster Incl. AI694593:wd88f10.x1 Homo sapiens cDNA, | 0.266846366 | 0.009889 |
| | 3 end /clone = IMAGE-2338699 /clone_end = 3′ | | |
| | /gb = AI694593 /gi = 4971933 /ug = Hs.121574 /len = 538′ | | |
| 87152_at | Cluster Incl. AA554814:ni34c04.s1 Homo sapiens cDNA, | 0.265915547 | 0.017712 |
| | 3 end /clone = IMAGE-978726 /clone_end = 3′ | | |
| | /gb = AA554814 /gi = 2325353 /ug = Hs.213551 /len = 443′ | | |
| 83897_at | Cluster Incl. AI458439:tj82c11.x1 Homo sapiens cDNA, | 0.26411577 | 0.000037 |
| | 3 end /clone = IMAGE-2148020 /clone_end = 3′ | | |
| | /gb = AI458439 /gi = 4311018 /ug = Hs.159115 /len = 557′ | | |
| 77613_at | Cluster Incl. R54310:yg74a09.r1 Homo sapiens cDNA, | 0.262617018 | 0.014534 |
| | 5 end /clone = IMAGE-38941 /clone_end = 5′ | | |
| | /gb = R54310 /gi = 816212 /ug = Hs.18685 /len = 522′ | | |
| 81862_at | Cluster Incl. AI138884:qd99c07.x1 Homo sapiens cDNA, | 0.262322708 | 0.048252 |
| | 3 end /clone = IMAGE-1737612 /clone_end = 3′ | | |
| | /gb = AI138884 /gi = 3644856 /ug = Hs.125490 /len = 482′ | | |
| 87927_at | Cluster Incl. AW003850:ws61b04.x1 Homo sapiens cDNA, | 0.26115592 | 0.002756 |
| | 3 end /clone = IMAGE-2501647 /clone_end = 3′ | | |
| | /gb = AW003850 /gi = 5850766 /ug = Hs.236664 /len = 562′ | | |
| 86211_at | Cluster Incl. AI621034:ts76b11.x1 Homo sapiens cDNA, | 0.261152746 | 0.033787 |
| | 3 end /clone = IMAGE-2237181 /clone_end = 3′ | | |
| | /gb = AI621034 /gi = 4630160 /ug = Hs.194449 /len = 556′ | | |
| 88019_f_a | Cluster Incl. AI968388:wu02e09.x1 Homo sapiens cDNA, | 0.259572265 | 0.049172 |
| | 3 end /clone = IMAGE-2515816 /clone_end = 3′ | | |
| | /gb = AI968388 /gi = 5765206 /ug = Hs.238114 /len = 301′ | | |
| AFFX-HU | M33197 Human glyceraldehyde-3-phosphate dehydrogenase (GAPDH) mRNA, | 0.257980182 | 0.015423 |
| | complete cds (_5, _M, _3 represent transcript regions | | |
| | 5 prime, Middle, and 3 prime respectively) | | |
| 77773_at | Cluster Incl. AA593528:nn28a06.s1 Homo sapiens cDNA, | 0.2562359 | 0.028242 |
| | 3 end /clone = IMAGE-1085170 /clone_end = 3′ | | |
| | /gb = AA593528 /gi = 2409290 /ug = Hs.198976 /len = 433′ | | |
| 85360_at | Cluster Incl. AA255965:zs28g07.s1 Homo sapiens cDNA, | 0.255474175 | 0.006366 |
| | 3 end /clone = IMAGE-686556 /clone_end = 3′ | | |
| | /gb = AA255965 /gi = 1891523 /ug = Hs.186853 /len = 406′ | | |
| 76212_at | Cluster Incl. W26941:16f10 Homo sapiens cDNA | 0.255231274 | 0.000598 |
| | /gb = W26941 /gi = 1306169 /ug = Hs.118727 /len = 547 | | |
| 90585_at | Cluster Incl. AI368415:qy08b11.x1 Homo sapiens cDNA, | 0.25397395 | 0.006918 |
| | 3 end /clone = IMAGE-2011389 /clone_end = 3′ | | |
| | /gb = AI368415 /gi = 4147168 /ug = Hs.155074 /len = 759′ | | |
| 67405_at | Cluster Incl. AI610167:tp13h07.x1 Homo sapiens cDNA, | 0.253224559 | 0.005829 |
| | 3 end /clone = IMAGE-2187709 /clone_end = 3′ | | |
| | /gb = AI610167 /gi = 4619334 /ug = Hs.185056 /len = 567′ | | |
| 86842_at | Cluster Incl. W06950:za91a12.r1 Homo sapiens cDNA, | 0.252673195 | 0.001281 |
| | 5 end /clone = IMAGE-299902 /clone_end = 5′ | | |
| | /gb = W06950 /gi = 1280952 /ug = Hs.206454 /len = 523′ | | |
| 82083_at | Cluster Incl. AA903403:ok62c08.s1 Homo sapiens cDNA, | 0.252499158 | 0.002692 |
| | 3 end /clone = IMAGE-1518542 /clone_end = 3′ | | |
| | /gb = AA903403 /gi = 3038526 /ug = Hs.130761 /len = 551′ | | |
| 67461_at | Cluster Incl. AA702220:zi84e01.s1 Homo sapiens cDNA, | 0.252109936 | 0.002038 |
| | 3 end /clone = 447480 /clone_end = 3′ | | |
| | /gb = AA702220 /gi = 2705333 /ug = Hs.185783 /len = 462′ | | |
| 80797_at | Cluster Incl. AL044128:DKFZp434N0628_s1 Homo sapiens cDNA, | 0.251370696 | 0.000508 |
| | 3 end /clone = DKFZp434N0628 /clone end = 3′ | | |
| | /gb = AL044128 /gi = 5432354 /ug = Hs.94195 /len = 983′ | | |
| 81053_at | Cluster Incl. AI273624:ql56c06.x1 Homo sapiens cDNA, | 0.249890723 | 0.000955 |
| | 3 end /clone = IMAGE-1876330 /clone_end = 3′ | | |
| | /gb = AI273624 /gi = 3895892 /ug = Hs.115192 /len = 414′ | | |
| 77218_at | Cluster Incl. AA634799:ab28b06.r1 Homo sapiens cDNA, | 0.249121821 | 0.000134 |
| | 5 end /clone = IMAGE-842099 /clone_end = 5′ | | |
| | /gb = AA634799 /gi = 2558013 /ug = Hs.151888 /len = 538′ | | |
| 79663_at | Cluster Incl. AI566193:tq69f02.x1 Homo sapiens cDNA, | 0.249088172 | 0.035959 |
| | 3 end /clone = IMAGE-2214075 /clone_end = 3′ | | |
| | /gb = AI566193 /gi = 4524645 /ug = Hs.196927 /len = 393′ | | |
| 85962_at | Cluster Incl. AI923659:wn59b05.x1 Homo sapiens cDNA, | 0.247682275 | 0.00136 |
| | 3 end /clone = IMAGE-2449713 /clone_end = 3′ | | |
| | /gb = AI923659 /gi = 5659623 /ug = Hs.192972 /len = 577′ | | |
| 83951_r_a | Cluster Incl. AA812024:ob39g08.s1 Homo sapiens cDNA | 0.243142897 | 0.009508 |
| | /clone = IMAGE-1333790 /gb = AA812024 /gi = 2881635 | | |
| | /ug = Hs.159669 /len = 410 | | |
| 78463_at | Cluster Incl. AI160540:qc87a04.x1 Homo sapiens cDNA, | 0.242819085 | 0.017392 |
| | 3 end /clone = IMAGE-1721166 /clone_end = 3′ | | |
| | /gb = AI160540 /gi = 3693920 /ug = Hs.13781 /len = 579′ | | |
| 84535_at | Cluster Incl. N50065:yz10h03.s1 Homo sapiens cDNA, | 0.242621323 | 0.040681 |
| | 3 end /clone = IMAGE-282677 /clone_end = 3′ | | |
| | /gb = N50065 /gi = 1191231 /ug = Hs.169732 /len = 550′ | | |
| 91147_at | Cluster Incl. AI929144:au65f04.y1 Homo sapiens cDNA | 0.241886973 | 0.000589 |
| | /clone = IMAGE /gb = AI929144 /gi = 5665108 | | |
| | /ug = Hs.239175 /len = 724 | | |
| 80851_at | Cluster Incl. AI733027:oj14a06.x5 Homo sapiens cDNA, | 0.241842162 | 0.000183 |
| | 3 end /clone = IMAGE-1492114 /clone_end = 3′ | | |
| | /gb = AI733027 /gi = 5054140 /ug = Hs.105206 /len = 590′ | | |
| 91750_at | Cluster Incl. AI921883:wp07f05.x1 Homo sapiens cDNA, | 0.234701355 | 0.000625 |
| | 3 end /clone = IMAGE-2464161 /clone_end = 3′ | | |
| | /gb = AI921883 /gi = 5657847 /ug = Hs.23921 /len = 582′ | | |
| 74161_at | Cluster Incl. AA960997:oo51f06.s1 Homo sapiens cDNA, | 0.234459062 | 0.005177 |
| | 3 end /clone = IMAGE-1569731 /clone_end = 3′ | | |
| | /gb = AA960997 /gi = 3127551 /ug = Hs.127765 /len = 434′ | | |
| 90373_r_a | Cluster Incl. N54525:yv37d07.s1 Homo sapiens cDNA, | 0.2338597 | 0 |
| | 3 end /clone = IMAGE-244909 /clone_end = 3′ | | |
| | /gb = N54525 /gi = 1195845 /ug = Hs.141278 /len = 495′ | | |
| 86687_i_a | Cluster Incl. AI885491:wm24f11.x1 Homo sapiens cDNA, | 0.233577442 | 0.000091 |
| | 3 end /clone = IMAGE-2436909 /clone_end = 3′ | | |
| | /gb = AI885491 /gi = 5590655 /ug = Hs.203196 /len = 464′ | | |
| 76769_at | Cluster Incl. AI758223:ty66b04.x1 Homo sapiens cDNA, | 0.233395219 | 0.000097 |
| | 3 end /clone = IMAGE-2284015 /clone_end = 3′ | | |
| | /gb = AI758223 /gi = 5151946 /ug = Hs.133471 /len = 535′ | | |
| 73026_s_{—} | Cluster Incl. AI420118:tf05b01.x1 Homo sapiens cDNA, | 0.22622915 | 0.035572 |
| | 3 end /clone = IMAGE-2095273 /clone_end = 3′ | | |
| | /gb = AI420118 /gi = 4266049 /ug = Hs.234008 /len = 429′ | | |
| 91887_f_a | Cluster Incl. AI860139:wh39f08.x1 Homo sapiens cDNA, | 0.225862338 | 0.001895 |
| | 3 end /clone = IMAGE-2383143 /clone_end = 3′ | | |
| | /gb = AI860139 /gi = 5513755 /ug = Hs.134556 /len = 528′ | | |
| 81686_at | Cluster Incl. AA807273:oc33e01.s1 Homo sapiens cDNA | 0.221895364 | 0.030677 |
| | /clone = IMAGE-1351512 /gb = AA807273 /gi = 2876849 | | |
| | /ug = Hs.122832 /len = 469 | | |
| 78622_r_a | Cluster Incl. W26589:33d9 Homo sapiens cDNA | 0.221208606 | 0.003353 |
| | /gb = W26589 /gi = 1307432 /ug = Hs.22954 /len = 594 | | |
| 89844_at | Cluster Incl. AI806507:wf08h01.x1 Homo sapiens cDNA, | 0.219504698 | 0.001214 |
| | 3 end /clone = IMAGE-2350033 /clone_end = 3′ | | |
| | /gb = AI806507 /gi = 5393073 /ug = Hs.117772 /len = 565′ | | |
| 76942_i_a | Cluster Incl. AI821447:yp24d10.x5 Homo sapiens cDNA, | 0.218832459 | 0.00729 |
| | 3 end /clone = IMAGE-188371 /clone_end = 3′ | | |
| | /gb = AI821447 /gi = 5440526 /ug = Hs.141120 /len = 542′ | | |
| 82865_at | Cluster Incl. AI829717:wf09f05.x1 Homo sapiens cDNA, | 0.218261577 | 0.006778 |
| | 3 end /clone = IMAGE-2350113 /clone_end = 3′ | | |
| | /gb = AI829717 /gi = 5450388 /ug = Hs.146016 /len = 541′ | | |
| 90629_at | Cluster Incl. X84721:HSEST222 Homo sapiens cDNA | 0.21759462 | 0.018709 |
| | /clone = MEC-222 /gb = X84721 /gi = 673398 | | |
| | /ug = Hs.164866 /len = 558 | | |
| 78209_at | Cluster Incl. T79705:yd71e10.r1 Homo sapiens cDNA, | 0.217378721 | 0.0002 |
| | 5 end /clone = IMAGE-113706 /clone_end = 5′ | | |
| | /gb = T79705 /gi = 698214 /ug = Hs.239664 /len = 453′ | | |
| 89338_at | Cluster Incl. AA102335:zl91b05.s1 Homo sapiens cDNA, | 0.216876929 | 0.011804 |
| | 3 end /clone = IMAGE-511953 /clone_end = 3′ | | |
| | /gb = AA102335 /gi = 1647042 /ug = Hs.183620 /len = 540′ | | |
| 87935_r_a | Cluster Incl. AI817659:td15b09.x1 Homo sapiens cDNA, | 0.216095926 | 0.001085 |
| | 3 end /clone = IMAGE-2075705 /clone_end = 3′ | | |
| | /gb = AI817659 /gi = 5436738 /ug = Hs.236720 /len = 457′ | | |
| 90111_at | Cluster Incl. AI417537:tg79c03.x1 Homo sapiens cDNA, | 0.214818394 | 0.03032 |
| | 3 end /clone = IMAGE-2114980 /clone end = 3′ | | |
| | /gb = AI417537 /gi = 4261041 /ug = Hs.127808 /len = 512′ | | |
| 88754_at | Cluster Incl. AA775833:ad17c09.s1 Homo sapiens cDNA, | 0.210857155 | 0.040755 |
| | 3 end /clone = 878512 /clone_end = 3′ | | |
| | /gb = AA775833 /gi = 2835167 /ug = Hs.122655 /len = 501′ | | |
| 71736_at | Cluster Incl. AA937952:oc08c08.s1 Homo sapiens cDNA, | 0.206013142 | 0.000046 |
| | 3 end /clone = IMAGE-1340270 /clone_end = 3′ | | |
| | /gb = AA937952 /gi = 3096063 /ug = Hs.221237 /len = 373′ | | |
| 79489_at | Cluster Incl. AI620433:tu47b05.x1 Homo sapiens cDNA, | 0.205729323 | 0.001955 |
| | 3 end /clone = IMAGE-2254161 /clone_end = 3′ | | |
| | /gb = AI620433 /gi = 4629559 /ug = Hs.193201 /len = 486′ | | |
| 89360_at | Cluster Incl. AA630327:ac08g11.s1 Homo sapiens cDNA, | 0.20325397 | 0.003 |
| | 3 end /clone = IMAGE-855908 /clone_end = 3′ | | |
| | /gb = AA630327 /gi = 2552938 /ug = Hs.185158 /len = 637′ | | |
| 91460_at | Cluster Incl. AI342616:qt33e02.x1 Homo sapiens cDNA, | 0.200209939 | 0.037457 |
| | 3 end /clone = IMAGE-1949786 /clone_end = 3′ | | |
| | /gb = AI342616 /gi = 4079543 /ug = Hs.183793 /len = 471′ | | |
| 76759_r_a | Cluster Incl. AI224653:qw97g08.x1 Homo sapiens cDNA, | 0.196540489 | 0.000067 |
| | 3 end /clone = IMAGE-1999070 /clone_end = 3′ | | |
| | /gb = AI224653 /gi = 3807366 /ug = Hs.133286 /len = 448′ | | |
| 84240_at | Cluster Incl. W93868:zd97a07.r1 Homo sapiens cDNA, | 0.196285806 | 0.003331 |
| | 5 end /clone = IMAGE-357396 /clone_end = 5′ | | |
| | /gb = W93868 /gi = 1423010 /ug = Hs.166241 /len = 426′ | | |
| 71069_at | Cluster Incl. AI832201:td14b10.x1 Homo sapiens cDNA, | 0.195317324 | 0.002561 |
| | 3 end /clone = IMAGE-2075611 /clone_end = 3′ | | |
| | /gb = AI832201 /gi = 5452872 /ug = Hs.211469 /len = 475′ | | |
| 85168_at | Cluster Incl. AI653441:tq94b09.x1 Homo sapiens cDNA, | 0.193174439 | 0.000276 |
| | 3 end /clone = IMAGE-2216441 /clone_end = 3′ | | |
| | /gb = AI653441 /gi = 4737420 /ug = Hs.183409 /len = 448′ | | |
| 73285_i_a | Cluster Incl. AI971748:wr07f08.x1 Homo sapiens cDNA, | 0.185052334 | 0.002302 |
| | 3 end /clone = IMAGE-2480871 /clone end = 3′ | | |
| | /gb = AI971748 /gi = 5768574 /ug = Hs.236704 /len = 841′ | | |
| 91306_s_{—} | Cluster Incl. AA613715:nq25b01.s1 Homo sapiens cDNA, | 0.184479141 | 0.000085 |
| | 3 end /clone = IMAGE-1144873 /clone_end = 3′ | | |
| | /gb = AA613715 /gi = 2463685 /ug = Hs.81795 /len = 607′ | | |
| 91309_r_a | Cluster Incl. AA613715:nq25b01.s1 Homo sapiens cDNA, | 0.180034385 | 0.000184 |
| | 3 end /clone = IMAGE-1144873 /clone_end = 3′ | | |
| | /gb = AA613715 /gi = 2463685 /ug = Hs.81795 /len = 607′ | | |
| 77736_at | Cluster Incl. AA604618:no84b05.s1 Homo sapiens cDNA, | 0.178791804 | 0.000087 |
| | 3 end /clone = IMAGE-1113489 /clone_end = 3′ | | |
| | /gb = AA604618 /gi = 2445482 /ug = Hs.194090 /len = 437′ | | |
| 67440_r_a | Cluster Incl. AA419260:zv35c03.s1 Homo sapiens cDNA, | 0.176702997 | 0.015013 |
| | 3 end /clone = IMAGE-755620 /clone_end = 3′ | | |
| | /gb = AA419260 /gi = 2078973 /ug = Hs.185665 /len = 456′ | | |
| 82862_at | Cluster Incl. AI817698:wk25b08.x1 Homo sapiens cDNA, | 0.176441557 | 0.036843 |
| | 3 end /clone = IMAGE-2413335 /clone_end = 3′ | | |
| | /gb = AI817698 /gi = 5436777 /ug = Hs.145994 /len = 548′ | | |
| 72186_at | Cluster Incl. AI580176:tk17g08.x1 Homo sapiens cDNA, | 0.175060418 | 0.005973 |
| | 3 end /clone = IMAGE-2151326 /clone_end = 3′ | | |
| | /gb = AI580176 /gi = 4564552 /ug = Hs.223394 /len = 513′ | | |
| 87011_at | Cluster Incl. AI040273:ox92d10.x1 Homo sapiens cDNA, | 0.174753613 | 0.016883 |
| | 3 end /clone = IMAGE-1663795 /clone_end = 3′ | | |
| | /gb = AI040273 /gi = 3279467 /ug = Hs.210508 /len = 450′ | | |
| 67117_at | Cluster Incl. AA026238:zj99f11.s1 Homo sapiens cDNA, | 0.174410782 | 0.003724 |
| | 3 end /clone = IMAGE-469197 /clone_end = 3′ | | |
| | /gb = AA026238 /gi = 1492777 /ug = Hs.181272 /len = 395′ | | |
| 72418_r_a | Cluster Incl. AI990292:ws30h05.x1 Homo sapiens cDNA, | 0.172944529 | 0.001836 |
| | 3 end /clone = IMAGE-2498745 /clone_end = 3′ | | |
| | /gb = AI990292 /gi = 5837173 /ug = Hs.225457 /len = 445′ | | |
| 76618_at | Cluster Incl. AI806805:wf15e07.x1 Homo sapiens cDNA, | 0.171672809 | 0.004788 |
| | 3 end /clone = IMAGE-2350692 /clone_end = 3′ | | |
| | /gb = AI806805 /gi = 5393371 /ug = Hs.129965 /len = 487′ | | |
| 74321_at | Cluster Incl. AI702482:tz94e07.x1 Homo sapiens cDNA, | 0.165834292 | 0.003435 |
| | 3 end /clone = IMAGE-2296260 /clone_end = 3′ | | |
| | /gb = AI702482 /gi = 4990382 /ug = Hs.128672 /len = 494′ | | |
| 71946_at | Cluster Incl. AI005278:ou07g04.x1 Homo sapiens cDNA, | 0.165484982 | 0.002113 |
| | 3 end /clone = IMAGE-1625622 /clone_end = 3′ | | |
| | /gb = AI005278 /gi = 3214788 /ug = Hs.222140 /len = 481′ | | |
| 91356_at | Cluster Incl. AI392846:tg10d02.x1 Homo sapiens cDNA, | 0.164854129 | 0.005954 |
| | 3 end /clone = IMAGE-2108355 /clone_end = 3′ | | |
| | /gb = AI392846 /gi = 4222393 /ug = Hs.95744 /len = 542′ | | |
| 85092_g_{—} | Cluster Incl. AI554809:tp73f01.x1 Homo sapiens cDNA, | 0.164014819 | 0.000531 |
| | 3 end /clone = IMAGE-2204953 /clone_end = 3′ | | |
| | /gb = AI554809 /gi = 4487172 /ug = Hs.182339 /len = 1035′ | | |
| 91414_at | Cluster Incl. N72573:za46c03.s1 Homo sapiens cDNA, | 0.16120887 | 0.005273 |
| | 3 end /clone = IMAGE-295588 /clone_end = 3′ | | |
| | /gb = N72573 /gi = 1229677 /ug = Hs.118183 /len = 482′ | | |
| 86418_at | Cluster Incl. AI978581:wq72d08.x1 Homo sapiens cDNA, | 0.160027369 | 0.000057 |
| | 3 end /clone = IMAGE-2476815 /clone_end = 3′ | | |
| | /gb = AI978581 /gi = 5803611 /ug = Hs.198694 /len = 475′ | | |
| 86370_at | Cluster Incl. AW003775:ws16h04.x1 Homo sapiens cDNA, | 0.159738807 | 0.015431 |
| | 3 end /clone = IMAGE-2497399 /clone_end = 3′ | | |
| | /gb = AW003775 /gi = 5850691 /ug = Hs.197737 /len = 647′ | | |
| 83047_at | Cluster Incl. AI627358:ty75d11.x1 Homo sapiens cDNA, | 0.158131021 | 0.016115 |
| | 3 end /clone = IMAGE-2284917 /clone_end = 3′ | | |
| | /gb = AI627358 /gi = 4664158 /ug = Hs.148367 /len = 552′ | | |
| 89805_at | Cluster Incl. AI568633:tn41f11.x1 Homo sapiens cDNA, | 0.157868321 | 0.000963 |
| | 3 end /clone = IMAGE-2170221 /clone_end = 3′ | | |
| | /gb = AI568633 /gi = 4532007 /ug = Hs.114670 /len = 481′ | | |
| 68787_at | Cluster Incl. AA682328:zj98d05.s1 Homo sapiens cDNA, | 0.157814866 | 0.016057 |
| | 3 end /clone = IMAGE-462921 /clone_end = 3′ | | |
| | /gb = AA682328 /gi = 2669645 /ug = Hs.193084 /len = 484′ | | |
| 75096_at | Cluster Incl. AA769588:nz42b06.s1 Homo sapiens cDNA | 0.156801675 | 0.003643 |
| | /clone = IMAGE-1290419 /gb = AA769588 /gi = 2820826 | | |
| | /ug = Hs.135723 /len = 607 | | |
| 86085_r_a | Cluster Incl. AA419311:zv35c03.r1 Homo sapiens cDNA, | 0.154848601 | 0.002758 |
| | 5 end /clone = IMAGE-755620 /clone_end = 5′ | | |
| | /gb = AA419311 /gi = 2079024 /ug = Hs.193745 /len = 690′ | | |
| 77356_at | Cluster Incl. AL110434:DKFZp434N1031_r1 Homo sapiens cDNA, | 0.153135161 | 0.002875 |
| | 5 end /clone = DKFZp434N1031 /clone end = 5′ | | |
| | /gb = AL110434 /gi = 5866042 /ug = Hs.162685 /len = 638′ | | |
| 86396_at | Cluster Incl. AW001450:wu31f11.x1 Homo sapiens cDNA, | 0.153122052 | 0.002676 |
| | 3 end /clone = IMAGE-990784 /clone_end = 3′ | | |
| | /gb = AW001450 /gi = 5848366 /ug = Hs.198312 /len = 517′ | | |
| 73425_at | Cluster Incl. AI971458:wq86e05.x1 Homo sapiens cDNA, | 0.152644343 | 0.005367 |
| | 3 end /clone = IMAGE-2478944 /clone_end = 3′ | | |
| | /gb = AI971458 /gi = 5768284 /ug = Hs.239145 /len = 513′ | | |
| 67222_at | Cluster Incl. AI219734:qg88c02.x1 Homo sapiens cDNA, | 0.147483257 | 0.000055 |
| | 3 end /clone = IMAGE-1842242 /clone end = 3′ | | |
| | /gb = AI219734 /gi = 3801937 /ug = Hs.182221 /len = 443′ | | |
| 81926_at | Cluster Incl. AI685069:wc67b06.x1 Homo sapiens cDNA, | 0.143799679 | 0.001664 |
| | 3 end /clone = IMAGE-2323667 /clone_end = 3′ | | |
| | /gb = AI685069 /gi = 4896374 /ug = Hs.126383 /len = 504′ | | |
| 79554_at | Cluster Incl. H97871:yw05a04.s1 Homo sapiens cDNA, | 0.141155538 | 0.000118 |
| | 3 end /clone = IMAGE-251310 /clone_end = 3′ | | |
| | /gb = H97871 /gi = 1118756 /ug = Hs.193907 /len = 445′ | | |
| 70209_at | Cluster Incl. AI761629:wg66g02.x1 Homo sapiens cDNA, | 0.140186121 | 0.000424 |
| | 3 end /clone = IMAGE-2370098 /clone_end = 3′ | | |
| | /gb = AI761629 /gi = 5177296 /ug = Hs.203696 /len = 535′ | | |
| 80602_at | Cluster Incl. AW003595:wx34a07.x1 Homo sapiens cDNA, | 0.131039201 | 0.004556 |
| | 3 end /clone = IMAGE-2545524 /clone_end = 3′ | | |
| | /gb = AW003595 /gi = 5850511 /ug = Hs.239177 /len = 586′ | | |
| 91072_at | Cluster Incl. R78708:yi74a09.r1 Homo sapiens cDNA, | 0.126447658 | 0.000068 |
| | 5 end /clone = IMAGE-144952 /clone_end = 5′ | | |
| | /gb = R78708 /gi = 854989 /ug = Hs.237163 /len = 588′ | | |
| 91826_at | Cluster Incl. AI219073:qg16e08.x1 Homo sapiens cDNA, | 0.123573477 | 0.02356 |
| | 3 end /clone = IMAGE-1759718 /clone_end = 3′ | | |
| | /gb = AI219073 /gi = 3801276 /ug = Hs.126062 /len = 555′ | | |
| 88725_at | Cluster Incl. AA622392:no45c05.s1 Homo sapiens cDNA, | 0.12192783 | 0.007314 |
| | 3 end /clone = IMAGE-1103624 /clone_end = 3′ | | |
| | /gb = AA622392 /gi = 2526268 /ug = Hs.122244 /len = 503′ | | |
| 77982_at | Cluster Incl. AI820925:zu53f08.y5 Homo sapiens cDNA, | 0.120125995 | 0.000268 |
| | 5 end /clone = IMAGE-741735 /clone_end = 5′ | | |
| | /gb = AI820925 /gi = 5440004 /ug = Hs.227048 /len = 600′ | | |
| 78295_r_a | Cluster Incl. AI733324:op02a10.x5 Homo sapiens cDNA, | 0.11926614 | 0.009 |
| | 3 end /clone = IMAGE-1574490 /clone_end = 3′ | | |
| | /gb = AI733324 /gi = 5054437 /ug = Hs.57138 /len = 500′ | | |
| 84128_at | Cluster Incl. AI434862:ti13c03.x1 Homo sapiens cDNA, | 0.11733946 | 0.001254 |
| | 3 end /clone = IMAGE-2130340 /clone_end = 3′ | | |
| | /gb = AI434862 /gi = 4299148 /ug = Hs.164224 /len = 391′ | | |
| 76068_at | Cluster Incl. AI819863:wj45h05.x1 Homo sapiens cDNA, | 0.109228797 | 0.001154 |
| | 3 end /clone = IMAGE-2405817 /clone_end = 3′ | | |
| | /gb = AI819863 /gi = 5438942 /ug = Hs.106243 /len = 612′ | | |
| 76847_at | Cluster Incl. AI951161:wx64c08.x1 Homo sapiens cDNA, | 0.106139272 | 0.000562 |
| | 3 end /clone = IMAGE-2548430 /clone_end = 3′ | | |
| | /gb = AI951161 /gi = 5743471 /ug = Hs.135184 /len = 451′ | | |
| 86083_i_a | Cluster Incl. AA419311:zv35c03.r1 Homo sapiens cDNA, | 0.105672634 | 0.00005 |
| | 5 end /clone = IMAGE-755620 /clone end = 5′ | | |
| | /gb = AA419311 /gi = 2079024 /ug = Hs.193745 /len = 690′ | | |
| 89807_at | Cluster Incl. AI418405:tg36e10.x1 Homo sapiens cDNA, | 0.105567733 | 0.002877 |
| | 3 end /clone = IMAGE-2110890 /clone_end = 3′ | | |
| | /gb = AI418405 /gi = 4264336 /ug = Hs.115173 /len = 472′ | | |
| 69815_at | Cluster Incl. AI684761:wa85h04.x1 Homo sapiens cDNA, | 0.105063837 | 0.002168 |
| | 3 end /clone = IMAGE-2302999 /clone end = 3′ | | |
| | /gb = AI684761 /gi = 4896055 /ug = Hs.201552 /len = 678′ | | |
| 79447_at | Cluster Incl. AI452552:tj62h11.x1 Homo sapiens cDNA, | 0.102930746 | 0 |
| | 3 end /clone = IMAGE-2146149 /clone_end = 3′ | | |
| | /gb = AI452552 /gi = 4286151 /ug = Hs.192825 /len = 398′ | | |
| 74723_at | Cluster Incl. AI375142:tc09h05.x1 Homo sapiens cDNA, | 0.10188118 | 0.000018 |
| | 3 end /clone = IMAGE-2063385 /clone_end = 3′ | | |
| | /gb = AI375142 /gi = 4175132 /ug = Hs.132127 /len = 458′ | | |
| 87275_at | Cluster Incl. AA190398:zp86g11.s1 Homo sapiens cDNA, | 0.098256541 | 0.000886 |
| | 3 end /clone = IMAGE-627140 /clone_end = 3′ | | |
| | /gb = AA190398 /gi = 1779348 /ug = Hs.220905 /len = 570′ | | |
| 81445_at | Cluster Incl. AA830533:oc52c05.s1 Homo sapiens cDNA | 0.095034843 | 0.000324 |
| | /clone = IMAGE-1353320 /gb = AA830533 /gi = 2903632 | | |
| | /ug = Hs.120219 /len = 426 | | |
| 85093_at | Cluster Incl. AI991109:wu38c03.x1 Homo sapiens cDNA, | 0.090173646 | 0.001181 |
| | 3 end /clone = IMAGE-991031 /clone_end = 3′ | | |
| | /gb = AI991109 /gi = 5838012 /ug = Hs.182339 /len = 832′ | | |
| 80411_g_{—} | Cluster Incl. AA961504:op44f07.s1 Homo sapiens cDNA, | 0.082703596 | 0.000614 |
| | 3 end /clone = IMAGE-1579717 /clone_end = 3′ | | |
| | /gb = AA961504 /gi = 3133668 /ug = Hs.234808 /len = 473′ | | |
| 86688_f_a | Cluster Incl. AI885491:wm24f11.x1 Homo sapiens cDNA, | 0.080705969 | 0.000529 |
| | 3 end /clone = IMAGE-2436909 /clone_end = 3′ | | |
| | /gb = AI885491 /gi = 5590655 /ug = Hs.203196 /len = 464′ | | |
| 83638_at | Cluster Incl. AI570023:tr91b11.x1 Homo sapiens cDNA, | 0.076248907 | 0.001755 |
| | 3 end /clone = IMAGE-2226429 /clone_end = 3′ | | |
| | /gb = AI570023 /gi = 4533397 /ug = Hs.156457 /len = 401′ | | |
| 84121_at | Cluster Incl. AI480137:tm33f01.x1 Homo sapiens cDNA, | 0.070707403 | 0.000394 |
| | 3 end /clone = IMAGE-2159929 /clone_end = 3′ | | |
| | /gb = AI480137 /gi = 4373305 /ug = Hs.164198 /len = 558′ | | |
| 72187_g_{—} | Cluster Incl. AI580176:tk17g08.x1 Homo sapiens cDNA, | 0.07033885 | 0.000099 |
| | 3 end /clone = IMAGE-2151326 /clone_end = 3′ | | |
| | /gb = AI580176 /gi = 4564552 /ug = Hs.223394 /len = 513′ | | |
| 74335_at | Cluster Incl. AI950844:wx55h06.x1 Homo sapiens cDNA, | 0.062942854 | 0.000823 |
| | 3 end /clone = IMAGE-2547611 /clone_end = 3′ | | |
| | /gb = AI950844 /gi = 5743154 /ug = Hs.128738 /len = 426′ | | |
| 74168_at | Cluster Incl. AI859619:wm14d07.x1 Homo sapiens cDNA, | 0.062714223 | 0.000097 |
| | 3 end /clone = IMAGE-2435917 /clone_end = 3′ | | |
| | /gb = AI859619 /gi = 5513235 /ug = Hs.127780 /len = 525′ | | |
| 75414_at | Cluster Incl. AA897501:aj62a04.s1 Homo sapiens cDNA, | 0.061379361 | 0 |
| | 3 end /clone = IMAGE-1394862 /clone_end = 3′ | | |
| | /gb = AA897501 /gi = 3034121 /ug = Hs.143529 /len = 504′ | | |
| 81956_at | Cluster Incl. AI459244:tk11d02.x1 Homo sapiens cDNA, | 0.060318825 | 0.000092 |
| | 3 end /clone = IMAGE-2150691 /clone_end = 3′ | | |
| | /gb = AI459244 /gi = 4311823 /ug = Hs.126897 /len = 489′ | | |
| 80408_at | Cluster Incl. AA961504:op44f07.s1 Homo sapiens cDNA, | 0.058236213 | 0.002633 |
| | 3 end /clone = IMAGE-1579717 /clone_end = 3′ | | |
| | /gb = AA961504 /gi = 3133668 /ug = Hs.234808 /len = 473′ | | |
| 91978_r_a | Cluster Incl. AI457596:tj63b09.x1 Homo sapiens cDNA, | 0.057105024 | 0 |
| | 3 end /clone = IMAGE-2146169 /clone_end = 3′ | | |
| | /gb = AI457596 /gi = 4310465 /ug = Hs.204169 /len = 513′ | | |
| 88237_s_{—} | Cluster Incl. AA490688:aa45b06.r1 Homo sapiens cDNA, | 0.056521395 | 0.000735 |
| | 5 end /clone = IMAGE-823859 /clone_end = 5′ | | |
| | /gb = AA490688 /gi = 2219861 /ug = Hs.239723 /len = 561′ | | |
| 83425_at | Cluster Incl. AI739630:wi37d03.x1 Homo sapiens cDNA, | 0.050662272 | 0 |
| | 3 end /clone = IMAGE-2392421 /clone_end = 3′ | | |
| | /gb = AI739630 /gi = 5101611 /ug = Hs.153590 /len = 461′ | | |
| 89468_at | Cluster Incl. AA614254:np09h02.s1 Homo sapiens cDNA | 0.048326422 | 0.000573 |
| | /clone = IMAGE-1115859 /gb = AA614254 /gi = 2466388 | | |
| | /ug = Hs.200539 /len = 468 | | |
| 70495_at | Cluster Incl. AI453095:tj52e10.x1 Homo sapiens cDNA, | 0.047278322 | 0.000031 |
| | 3 end /clone = IMAGE-2145162 /clone_end = 3′ | | |
| | /gb = AI453095 /gi = 4307387 /ug = Hs.207393 /len = 555′ | | |
| 67146_i_a | Cluster Incl. AI349119:ta51g03.x2 Homo sapiens cDNA, | 0.04516733 | 0 |
| | 3 end /clone = IMAGE-2047636 /clone_end = 3′ | | |
| | /gb = AI349119 /gi = 4086325 /ug = Hs.181625 /len = 114′ | | |
| 82818_at | Cluster Incl. AI733800:qk36c08.x5 Homo sapiens cDNA, | 0.042193449 | 0.000056 |
| | 3 end /clone = IMAGE-1871054 /clone_end = 3′ | | |
| | /gb = AI733800 /gi = 5054913 /ug = Hs.145582 /len = 489′ | | |
| 76345_r_a | Cluster Incl. AA843931:ai90g08.s1 Homo sapiens cDNA, | 0.037828358 | 0.000112 |
| | 3 end /clone = IMAGE-1388126 /clone_end = 3′ | | |
| | /gb = AA843931 /gi = 2930382 /ug = Hs.124221 /len = 493′ | | |
| 78159_s_{—} | Cluster Incl. AI582193:tq63e12.x1 Homo sapiens cDNA, | 0.028462315 | 0.000001 |
| | 3 end /clone = IMAGE-2213518 /clone_end = 3′ | | |
| | /gb = AI582193 /gi = 4568090 /ug = Hs.239207 /len = 461′ | | |
| 75060_at | Cluster Incl. AI814274:wj71a06.x1 Homo sapiens cDNA, | 0.008079595 | 0.000572 |
| | 3 end /clone = IMAGE-2408242 /clone_end = 3′ | | |
| | /gb = AI814274 /gi = 5425489 /ug = Hs.135188 /len = 499′ | | |

[0142] TABLE 7
Genes present in the U95_A cluster which are not in the Fold Change list (>1 over-expressed
in Barrett's-asssociated esophageal denocarcinoma (BA), <1 under-expressed in BA)

| Affy ID | Gene Name | Fold Change | P-value |
|---|---|---|---|
| 760_at | Y09216/FEATURE=/DEFINITION=HSDYRK2 H.sapiens mRNA for protein kinase, Dyrk2 | 1.776710327 | 0.029598 |
| 39260_at | Cluster Incl U59185:Human putative monocarboxylate transporter (MCT) mRNA, complete cds | 1.853453277 | 0.020819 |
| | /cds=(182,1645)/gb=U59185/gi=2463627/ug=Hs.23590/len=2529 | | |
| 35219_at | Cluster Incl AL050202:Homo sapiens mRNA; cDNA DKFZp586E2023 (from clone DKFZp586E2023) | 1.960259397 | 0.00553 |
| | /cds=UNKNOWN/gb=AL050202/gi=4884441/ug=Hs.29005/len=1169 | | |
| 34778_at | Cluster Incl AA418080:zv97h07.s1 Homo sapiens cDNA, 3 end/clone=IMAGE-767773/clone_end=3“ | 1.974272775 | 0.015166 |
| | /gb=AA418080/gi=2079881/ug=Hs.3972/len=543” | | |
| 37147_at | Cluster Incl AF020044:Homo sapiens lymphocyte secreted C-type lectin precursor, mRNA, complete cds | 2.009944208 | 0.007262 |
| | /cds=(179,1150)/gb=AF020044/gi=2828595/ug=Hs.105927/len=1391 | | |
| 41405_at | Cluster Incl AF026692:Homo sapiens frizzled related protein frpHE mRNA, complete cds/cds=(257,1297) | 2.176388814 | 0.011092 |
| | /gb=AF026692/gi=2920803/ug=Hs.105700/len=2840 | | |
| 38637_at | Cluster Incl L16895:Human lysyl oxidase (LOX) gene, exon 7/cds=(0,6)/gb=L16895/gi=292923 | 2.180657934 | 0.034442 |
| | /ug=Hs.102267/len=2052 | | |
| 1114_at | M22490/FEATURE=/DEFINITION=HUMBMP2B Human bone morphogenetic protein-2B (BMP-2B) mRNA | 2.23232076 | 0.013214 |
| 671_at | J03040/FEATURE=/DEFINITION=HUMSPARC Human SPARC/osteonectin mRNA, complete cds | 2.271250535 | 0.007548 |
| 652_g_at | L07493/FEATURE=/DEFINITION=HUM14RPA Homo sapiens replication protein A 14 kDa subunit (RPA) | 2.271349484 | 0.001554 |
| | mRNA, complete cds | | |
| 41169_at | Cluster Incl X74039:H.sapiens mRNA for urokinase plasminogen activator receptor/cds=(46,891) | 2.278539606 | 0.023709 |
| | /gb=X74039/gi=456192/ug=Hs.179657/len=1070 | | |
| 39710_at | Cluster Incl U30521:Human P311 HUM (3.1) mRNA, complete cds/cds=(202,408)/gb=U30521/gi=963091 | 2.338829553 | 0.004316 |
| | /ug=Hs.142827/len=2036 | | |
| 38466_at | Cluster Incl X82153:H.sapiens mRNA for cathepsin O/cds=(129,1118)/gb=X82153/gi=562756 | 2.362505408 | 0.002649 |
| | /ug=Hs.83942/len=1669 | | |
| 36007_at | Cluster Incl AL050137:Homo sapiens mRNA; cDNA DKFZp586L151 (from clone DKFZp586L151) | 2.433041892 | 0.013328 |
| | /cds=(0,1300)/gb=AL050137/gi=4884149/ug=Hs.43658/len=1810 | | |
| 41870_at | Cluster Incl AF030428:Homo sapiens lung type-I cell membrane-associated protein hT1a-2 (hT1a-2) mRNA, | 2.540477039 | 0.017889 |
| | complete cds/cds=(180,668)/gb=AF030428/gi=4103968/ug=Hs.135150/len=865 | | |
| 39271_at | Cluster Incl AA461365:zx70e07.r1 Homo sapiens cDNA, 5 end/clone=IMAGE-796836/clone_end=5“ | 2.588708014 | 0.020462 |
| | /gb=AA461365/gi=2186485/ug=Hs.237742/len=591” | | |
| 37678_at | Cluster Incl U23070:Human putative transmembrane protein (nma) mRNA, complete cds/cds=(372,1154) | 2.591572193 | 0.005203 |
| | /gb=U23070/gi=1262172/ug=Hs.78776/len=1521 | | |
| 37906_at | Cluster Incl Z37976:H.sapiens mRNA for latent transforming growth factor-beta binding protein (LTBP-2) | 2.599655226 | 0.001094 |
| | /cds=(388,5853)/gb=Z37976/gi=1272663/ug=Hs.83337/len=7000 | | |
| 40681_at | Cluster Incl AB008375:Homo sapiens mRNA for osteoblast specific cysteine-rich protein, complete cds | 2.647250803 | 0.006876 |
| | /cds=(378,1589)/gb=AB008375/gi=2570151/ug=Hs.82582/len=2375 | | |
| 34862_at | Cluster Incl AA005018:zh96a09.r1 Homo sapiens cDNA, 5 end/clone=IMAGE-429112/clone end=5“ | 2.87530968 | 0.002292 |
| | /gb=AA005018/gi=1448859/ug=Hs.4963/len=637” | | |
| 38112_g_ | Cluster Incl X15998:H.sapiens mRNA for the chondroitin sulphate proteoglycan versican, V1 splice-variant; | 2.907786251 | 0.015823 |
| | precursor peptide/cds=(266,7495)/gb=X15998/gi=37662/ug=Hs.81800/len=8224 | | |
| 32617_at | Cluster Incl W74442:zd75e09.s1 Homo sapiens cDNA, 3 end/clone=IMAGE-346504/clone_end=3“ | 1.863661777 | 0.014302 |
| | /gb=W74442/gi=1384777/ug=Hs.80961/len=580” | | |
| 35479_at | Cluster Incl AJ242015:Homo sapiens mRNA for eMDC II protein/cds=(47,2374)/gb=AJ242015/gi=4757043 | 2.399523898 | 0.010738 |
| | /ug=Hs.174030/len=3056 | | |
| 33168_at | Cluster Incl H24861:y142e11.r1 Homo sapiens cDNA, 5 end/clone=IMAGE-160940/clone_end=5“ | 2.450031618 | 0.000099 |
| | /gb=H24861/gi=893760/ug=Hs.90145/len=517” | | |
| 37821_at | Cluster Incl AF041260:Homo sapiens AIBC1 (AIBC1) mRNA, complete cds/cds=(117,1871)/gb=AF041260 | 2.641191847 | 0.03309 |
| | /gi=3335398/ug=Hs.129057/len=2813 | | |
| 34830_at | Cluster Incl W25986:17e7 Homo sapiens cDNA/gb=W25986/gi=1306253/ug=Hs.4750/len=769 | 2.743466262 | 0.000057 |
| 35724_at | Cluster Incl Y07867:H.sapiens mRNA for Pirin, isolate 1/cds=(204,1076)/gb=Y07867/gi=1907075 | 0.390677117 | 0.000031 |
| | /ug=Hs.38842/len=1277 | | |
| 1779_s_at | M16750/FEATURE=/DEFINITION=HUMPIM1 Human pim-1 oncogene mRNA, complete cds | 0.361169226 | 0.000229 |
| 37533_r_a | Cluster Incl D86980:Human mRNA for KIAA0227 gene, partial cds/cds=(0,1011)/gb=D86980/gi=1504033 | 0.358908632 | 0.000665 |
| | /ug=Hs.79170/len=5217 | | |
| 38553_r_a | Cluster Incl A1984786:wr85c06.x1 Homo sapiens cDNA, 3 end/clone=IMAGE-2494474/clone_end=3“ | 0.354417702 | 0.000137 |
| | /gb=Al984786/gi=5812063/ug=Hs.175941/len=814” | | |
| 38349_at | Cluster Incl AF038564:Homo sapiens atrophin-1 interacting protein 4 (AIP4) mRNA, partial cds/cds=(0,2219) | 0.351660122 | 0.000684 |
| | /gb=AF038564/gi=2708328/ug=Hs.98074/len=2358 | | |
| 37596_at | Cluster Incl U09117:Human phospholipase c delta 1 mRNA, complete cds/cds=(94,2364)/gb=U09117 | 0.351047496 | 0.001325 |
| | /gi=483919/ug=Hs.80776/len=2627 | | |
| 34931_at | Cluster Incl AB023157:Homo sapiens mRNA for KIAA0940 protein, complete cds/cds=(89,2143) | 0.350176398 | 0.000066 |
| | /gb=AB023157/gi=4589523/ug=Hs.131945/len=5715 | | |
| 36116_at | Cluster Incl AJ000414:Homo sapiens mRNA for Cdc42-interacting protein 4 (CIP4)/cds=(39,1676) | 0.346256072 | 0.00077 |
| | /gb=AJ000414/gi=2274965/ug=Hs.73999/len=2001 | | |
| 37217_at | Cluster Incl AI208485:qg36f11.x1 Homo sapiens cDNA, 3 end/clone=IMAGE-1837293/clone_end=3“ | 0.337140887 | 0.000001 |
| | /gb=AI208485/gi=3770427/ug=Hs.77253/len=537” | | |

[0143] TABLE 8
Genes identified by heirarchical clustering of
the full Human Genome U95 set showing fold change between
normal and diseased sample sets.

| | FOLD | |
|---|---|---|
| ACCESSION | CHANGE | NAME |
| AI199897 | −22.0 | EST |
| W69365 | −8.2 | EST |
| AI081571 | −8.9 | EST |
| AI962905 | −9.6 | CGI-119 PROTEIN |
| AI885390 | −8.6 | EST |
| X94323 | −11.2 | SPECIFIC GRANULE PROTEIN |
| M62982 | −11.4 | ARACHIDONATE 12-LIPOXYGENASE |
| X87159 | −6.5 | SODIUM CHANNEL (SCNNIB) |
| M32402 | −9.7 | PLACENTA PROTEIN 11 |
| AI739630 | −19.7 | EST |
| AW025309 | −40.5 | EST |
| AB001325 | −20.2 | AQUAPORIN 3 |
| AI582193 | −35.1 | EST |
| AB002134 | −12.1 | AIRWAY TRYPSIN-LIKE PROTEASE |
| AL050220 | −17.6 | KALLIKREIN 13 |
| AI971202 | −12.2 | EST |
| AI669212 | −14.3 | EST |
| AI916261 | −9.2 | EST |
| M24902 | −1.0 | ACID PHOSPHATASE PROSTATE |
| U83115 | −8.1 | AIM1 (ABSENT IN MELANOMA) |
| Y09538 | −17.3 | ZINC FINGER PROTEIN 185 |
| AI142832 | −15.4 | EST |
| Y16961 | −12.6 | TUMOR PROTEIN P63 |
| AA130221 | −22.4 | EST |
| AA781220 | −19.0 | PAIRED BOX GENE 9 (PAX9) |
| AI282714 | −77.6 | DESCI PROTEIN |
| M98477 | −22.2 | TRANSGLUTAMINASE 1 |
| AI540870 | −27.6 | EST |
| AF045941 | −24.5 | SCIELLIN |
| R37637 | −44.5 | EST |
| AA743820 | −49.5 | EST |
| AI623978 | −03.1 | EST |
| AI859619 | −15.9 | EST |
| AJ223693 | −10.5 | GPI-ANCHORED HOMOLOG |
| AI378979 | −37.1 | KATANIN P60 SUBUNIT A1 |
| S66896 | −14.2 | SCCAI |
| W68630 | −28.5 | EST |
| AA401397 | −16.4 | KATANIN 13 |
| AA010777 | −35.7 | GALECTIN 7 |
| L10386 | −25.1 | TRANSGLUTAMINASE 3 |
| AI814274 | −123.8 | EST |
| X76342 | −20.7 | ALCOHOL DEHYDROGENASE 7 |
| AI692575 | −46.0 | EST |
| T71258 | −23.9 | ? |
| AI265958 | −58.2 | EST |
| M13903 | −15.7 | INVOLUCRIN |
| M60047 | −20.7 | HBP17 |
| X99977 | −35.3 | ARS GENE, COMPONENT B |
| AI369347 | −7.9 | EST |
| A1052020 | −7.4 | EST |
| AI818579 | 2.5 | EST |
| AI557210 | 4.7 | EST |
| AI754693 | 4.1 | EST |
| AB029000 | 8.3 | MRNA FOR KIAA1077 PROTEIN |
| U09278 | 7.9 | FIBROBLAST ACTIVATION PROTEIN, |
| | | ALPHA |
| AA044844 | 3.4 | SOLUTE CARRIER FAMILY 11, |
| | | MEMBER 3 |
| J04162 | 3.1 | Fc FRAGMENT OF IgC, LOW AFFINITY |
| | | IIIA |
| AA147884 | 5.0 | EST |
| AA584310 | 13.2 | CGI-101 PROTEIN |
| D21254 | 3.8 | CADHERIN-11 |
| D21255 | 3.9 | CADHERIN-11 |
| X82153 | 2.4 | CATHEPSIN K |
| AA127736 | 3.6 | COLLAGEN, TYPE V, ALPHA 2 |
| AW007442 | 6.4 | BIGLYCAN |
| Z37976 | 2.6 | LATENT TGFB BINDING PROTEIN 2 |
| AI686894 | 3.5 | EST |
| AA007367 | 6.6 | EST |
| AF052124 | 9.5 | SPPI (OSTEOPONTIN) |
| AA088177 | 4.3 | EST |
| J04765 | 5.4 | SPPI (OSTEOPONTIN) |
| AA447232 | 4.3 | CATHEPSIN B |
| X15998 | 4.3 | CHONDROITIN SULFATE |
| | | PROTEOGLYCAN 2 |
| AA426499 | 3.8 | CHONDROITIN SULFATE |
| | | PROTEOGLYCAN 2 |
| X15998 | 2.9 | CHONDROITIN SULFATE |
| | | PROTEOGLYCAN 2 |
| AA704137 | 5.4 | THY-1 CELL SURFACE ANTIGEN |
| AI740961 | 5.7 | EST |
| AI864014 | 17.2 | SPPI (OSTEOPONTIN) |
| D13666 | 5.0 | OSTEOBLAST SPECIFIC FACTOR 2 |
| AL050137 | 3.1 | EST |
| AI970896 | 3.1 | EST |
| AF020044 | 2.0 | STEM CELL GROWTH FACTOR |
| AI333224 | 3.0 | EST |
| AI091277 | 3.9 | EST |
| W74476 | 4.7 | EST |
| AA056278 | 5.3 | EHM2 GENE |
| AA877900 | 20.3 | HYPOTHETICAL PROTEIN FLJ20063 |
| AI799626 | 10.2 | EST |
| M35252 | 33.9 | TRANSMEMBRANE, 4, SUPERFAMILY |
| | | MEMBER 3 |
| AI961220 | 30.1 | SERINE PROTEASE INHIBITOR |
| | | (SPINK1) |
| AI148745 | 9.6 | EST |
| AI982768 | 5.7 | EST |
| H30385 | 4.8 | EST |
| AB023171 | 10.6 | MRNA FOR KIAA0954 PROTEIN |
| AW007803 | 7.4 | EST |
| AA458524 | 7.5 | EST |
| AI301060 | 9.0 | EST |
| AI859849 | 16.2 | EST |
| AA156240 | 5.9 | SERINE PROTEASE, UMBLICAL |
| | | ENDOTHELIUM |
| AI691066 | 15.8 | EST |
| AB006781 | 20.9 | GALECTIN 4 |
| AA535447 | 18.6 | EST |
| AI125252 | 15.9 | EST |
| AI308063 | 126.9 | EST |
| U73167 | 4.3 | COSMID CLONE |
| N30008 | 3.8 | EST |
| AI392817 | 5.6 | HEPATOCYTE NUCLEAR FACTOR 3 |
| | | GAMMA |
| AB018335 | 5.2 | MRNA FOR KIAA0792 PROTEIN |
| AF065388 | 5.3 | TETRASPAN-1 |

The application's sequence listing, which the Patent Office published only in electronic form, follows.

SEQUENCE LISTING (1588 sequences)

SEQ ID NO: 1 - DNA, 473 bp, Homo sapiens
  Genbank Accession No. AA001232
  unsure (1)..(473): n = a or c or g or t
ttcccagcccatttccaactctacttgaactagctgcntttttttcagctttgcccagcagccctggtgagtgcaggcaaagaaggcagcggctcnttgcctcagaagcccgaggacttcccagccagtccagggctcgctctcctgcccgcagctcgtgggcctgggtctgcagcgctttcagtggtctctgatgtctttgtccacctgcccactagggtctggccagatggggcccgtagccaanggccaatggacagacatggcttccaccccctcccangggacctgagctccagggaaggcaagcagcctttttcctcacagacaccccttctgttgaagaccaggtgataagcggggacgggangcacggacccctcaagtctgctcatcatttgcattgttgtgcatgaatttgcgttggangggttcatgangctctgccccaagtcctncccaaggttgtangg

SEQ ID NO: 2 - DNA, 566 bp, Homo sapiens
  Genbank Accession No. AA001552
tgtcgtagagctttttattttgcatctggagtgtatttggacacgtgggctgggtggggtaacaggataatgagcagtttgggaaagaggcaggctccaagcaggctggttcactcacttggcagtcactgggcggctattcttgtgcctggatgtgttacaatgcaggggacacagtggtgagcaaggctgctccaagccctggctgggatgggggatgcacagacaggctgatcagggctgggatggtggacacgcatcctctttaccctgatcactggttagaaatactgcactgtggccgggctcagtcggctcacacctgtaatcccagcactttgggaggccgaggcgggttggattactcaaggtcaggagttcgagaccagcctggccaacatggcaaagccccgtctctactaaaaatacaaaaaattagccaggcatggtggtgcatgcctgtaatcccagttacttgggggggctgaggcaggagaatcacttgaacctgggaagtggaggctggagtgagctgagatcacgccaccgcactccagcttggacga

SEQ ID NO: 3 - DNA, 665 bp, Homo sapiens
  Genbank Accession No. AA004208
  unsure (1)..(665): n = a or c or g or t
aacagtagacgggctaaggtttatttacttacttaacatttaaaaataattcatttgcttcaacaacatggcagacaatcaagagtactattgaaacataattcagagagggtcaggacaggaaagatcacaacctcattcctgaggtggaatgaaagatctaagccaggcctccatcctaggccaggctcctccattaagcagagacaaccaaaagataagaaagcctcggcctcatccccatcaggagatagcctgaactgctcacaaataagaaacaacttgaccagactgaggactggttcctgatgagtcaataggaaagtcagttggttctctcttcagtaggtgacttagcacccttcttggagaacatagagtagtagtctggacctggaggctaaggcccacatccaacaaaggttacctttctttttcagtaacgctttgttccttttttcaacagccagaaacctgaaatccagaggaagtcatttaaaaaaaccccttctggctgcaacctgaaagcatctcccaagcnagactggggggtagagatgatggctcccacttcggtnggcctcttcttcgatagggggagcagccagagaagaagctggtttttgntggccagagccggtttcttttcttccngggagcctggt

SEQ ID NO: 4 - DNA, 415 bp, Homo sapiens
  Genbank Accession No. AA004528
  unsure (1)..(415): n = a or c or g or t
acaggtagtcagtgtgtgtgtgtatggagacagagtctcaccatgctgcccaggctaaaaatggattcatatatttaatactacccaacttggagagacagagggctaagaggtttttttaacttagtactttaccagttagaagatcagaggggattcctgtaggcattgagaggaggaatctgttttcttatactttatgtaaaaangttcacctggggcagtggtgcacatgatggatcacttgagctcacgggttcaagaccagccatgggaggcatagcaaaaccccatctatgcagttcactcatccagtgtggatcaaaggaagactgagttagatttgcccggttcctgtaatcccagatactcaggaggctgaggcaggagaatcgcttgaacccaggaggcagnt

SEQ ID NO: 5 - DNA, 637 bp, Homo sapiens
  Genbank Accession No. AA005018
  unsure (1)..(637): n = a or c or g or t
gtaatttgangaaaactaagaaatgtatcaaatctgaaacctgtcccgctcattggtccaaaattgaagagaaggtggccaatttcttattgtcgggaactcaaaggttattccattccttttatgggatctgatgtgtctgttgtaaggaggactcaacgttacttgtatgaaaatttagaggaatcaccagttcagtatgctgcgtatgtaactgtgggaggcatcacctctgttattaagctgatgtttgcaggacttttctttttgttctttgtgaggtttggaattggaaggcaacttctcataaaattcccatggttcttctcctttggctatttttcaaaacaaggcccaacacaaaaacagattgatgctgcctcatttcacgctggacattctttgggtcaaggatacagccaaggcactggtacagataagaacaaaccaaatatcaaaatttgtnctcaggtgaaaaggaccagaggctggctatgtggctacccccatagctatggttcaggcagccatgactcttctaagtgatgcttctcatctggcctaagcgggcggggtcttcacacctggagcagctttttccaaacaaagttgattgacagactcaacaacacggtan

SEQ ID NO: 6 - DNA, 593 bp, Homo sapiens
  Genbank Accession No. AA005023
  unsure (1)..(593): n = a or c or g or t
ggaataccattgtgtttattgatcaagcctggcttcgagtgtgacagagccattcttggttctccttggaagtaacaagaacactgggtaacatgtgaagtgcatggagactcacctgaatcccaccaaagtagtagctggacccagtagcctagcttattgtcttggcagtgcccctacccagtaccattagacctggctttgtcccttacataggacagactgggcttctccactcccgccaggctggccctacctccacctgtccttggaagctagtatgtaagtaagggaggagtcatcaagtttataagatgggtaggctgaggattgaggcaggaggggacttaatggctgagtccctggcttgttccagagccctggcccttgagcccctggactggtcagtgcatggacactctcccctcccagctcgggcggaagacttttcctgacttagctgctccatacacacaatctataaatatgtatttgctttaaaaattaaataaattagatcttgggccagcctgaggtcatctggccagccatggagtcctgtganatggacattgtcatgtgtcatatataga

SEQ ID NO: 7 - DNA, 690 bp, Homo sapiens
  Genbank Accession No. AA005361
  unsure (1)..(690): n = a or c or g or t
catacaactcatttataatttattttcacacaactcactatgttacaaaactgtacacctgcccccaaagttggataacccaaagtcacattccttggaaagagaagaatcaacactgggccgctttttcaagagcagtctcttctggattgggcccaacaaggctagaccagaatgtggagtacaggaatggccattcttcaagtccgaggggtcaggttcttagcctggtgcttccagtcgttacaggaggggtgtctctgtttggaaagccagcaccagcacccagaacacaggagtccagagagacaggcaggcactnttggccaccatctggctgtggtgggaatgcccacggcgaagggagccgcagttcagtggagatgtgcctgtccaggacagggacctggagttgcgggactatgtcactctcctccaggcggacccacagatcgctgaattgccggagtcgcagcctncgctgtgaccgcctccgcttcttccggaanctctgttcggcctcactgggcgtgtcggcacttccaggccgggacacaaggggaagcagcttgantgcctgaggatacggcttctggtgccggncttccanggtaaggacttttgangcaanatggtggacanattgggccntttggaggtttttaccctncctttgtggatgggtcgnaa

SEQ ID NO: 8 - DNA, 462 bp, Homo sapiens
  Genbank Accession No. AA007367
  unsure (1)..(462): n = a or c or g or t
acttgacaaaattttactttagcccttgcatctccctgccaggctgccggacagctcccccgacacccaacccaggaggcagcctgatcccaccttgtgctttggtaggggacatccctcacccctctctcccaggagaccagggccaacgtaccttgagagtctgtaaacctacgccaggactggggttaacaccccagcccaccagctgagtctgccaggacacggggctctgggaagctctgaacccctcccatgccccagatcctgtgccacccacacccacaccactcaggactctggaaggaggtgagcggggaccataccaagancccagaggtgcctgttggagagcagggcttgcttggggggaagacaatgaagcagccaaggatccctctcgaggggctctgtctctggctgtgcttctccagcccaagctgcccctctccccgggggcag

SEQ ID NO: 9 - DNA, 467 bp, Homo sapiens
  Genbank Accession No. AA009571
  unsure (1)..(467): n = a or c or g or t
ngngnacataacacgctgctcagcctggaagggcagagagagagccacggagtagnggacccttggatgatagtgcttcccaaagaccaccccgacacagccaacacagaaagaaagggaaaagattccagagacgttccagcataaggccatgcagggcggcntggagctcgtgggcaggggctgccgacctctgagctgggtgtgctgggagccagggatcactgggtgccggccacagaggaaggtccctgaggacacagtaccgaagtctgatcccagaggaggaaggaaggtgggccggggagaaggtctgagtgcagggatggtccaggaggaggactggaagctgcaggatggctgcagggggccgtggaccctcctgggcctgaagctcactccttccccgcctcctacaggggcaggggaagccagggctgcgagttctgtctgtggactctcaatga

SEQ ID NO: 10 - DNA, 511 bp, Homo sapiens
  Genbank Accession No. AA009593
  unsure (1)..(511): n = a or c or g or t
tacacacactgtttgaaggtactttattaagatcaaagatttttcattacatttatttataaatccttcctagtcaaaataaaataataaaaatctgtatctttagaaagaacatagttttgtaagtctgagaaggttatgtttgtcagtttcaaattattacagtttagatacattcaatcattacacaataccaggaaggtcagccttaaagataccaagaacttccatattggtcagtaaaataagggtaaaaaattaaattttactttcacctttttatgtttgattgactacagtcaataatagggagtaccagaatttacctttttgggtcttgattttttaaatatatggaatttttaaaaagtgaacggtncctccttcctccttaccataagtgggctccaaccttangggaagctgggcttcctggaagggaaggaagtgcnaattccnccctggcngggagaaaggaggccggggggaagaaaggtnccgaattccgggg

SEQ ID NO: 11 - DNA, 436 bp, Homo sapiens
  Genbank Accession No. AA010008
  unsure (1)..(436): n = a or c or g or t
acttattagtgctttatgttacatgaaattaagtgcaaaaatacttaaataatgctgtgtgccaggcacactctcaatggtttgactcactgtactctgcacaatcacccattttccagtgaaggaaatggaggcaccaagggtaaagtagccagcacaagtcagacctcatggcggggccaaggcattctggctccaaaatcccgaatcaaaaagcagaaggtcaaaaaattaaaaacaaagaaacatcacacacggaaggaggatgaggccaaangattactccgagggattaaattctgagtttttctccggtttaccttctnacaactcctttttactggacccacgcctgacacactggacacatggcattccctgcccacagtggctcctgtggccgcctggntgtactgnacagtgcaacttcctcagg

SEQ ID NO: 12 - DNA, 521 bp, Homo sapiens
  Genbank Accession No. AA010777
  unsure (1)..(521): n = a or c or g or t
gccattgtccaacgtcccccacaagtcctcactgcccgagggatccgcctgngcacggtgctgagaattcgcggcttggttcctcccaatgccagcaggttccatgtaaacctgctgtgcggggaggagcagggctcgantgccgcgctgcatttcaacccccggctggacacgtcggaggtggtcttcaacagcaaggagcaaggctcctggggccgcgaggagcgggccgnngcgttcctttccagcgcgggcagcccttcgaggtgctcatcatcgcgtcagacgacggcttcaaggccgtggttggggacgcccagtaccaccacttccgccaccngcctgccgcttgncgcgcgtgcnttgngttggaggtgggcggggacgtgcagcttggacttccgtgagattctttcttgaagcaagaagcccaaggcgggncccggggcctttggcttgggcaaataaagcgttaagcccgcaaaaaaaaaaaaaaaaaaaaaaagattgcggccgcaagn

SEQ ID NO: 13 - DNA, 463 bp, Homo sapiens
  Genbank Accession No. AA013440
  unsure (1)..(463): n = a or c or g or t
ttcaaaaacaaaacaaaacaatttattttctatattcaaataggtagaagagcagattttgaatgttcccaacacaaagaaatgataactgaggaaatgaatccgctaatcaccctgatgtgatcattacacattgcatacatatattgaaatatcacctgtatcccgtaaattattacaattattatataaacatacaattattatacataaattaaaaataataaaagcaagaaagagttctttttggcatttcaaacagaattccccctcttttgctcgtgaatttgagaggcagtgttcgaatcacagcttggttagcgtgtgacctcaaggaatgttttgtttatctggggctgctcaaacaaaccatcccacaactttagtagccattaaatgggattggcccccaaactttagcgcctggtcgtggatttcntttgggaccagcgattctgggagn

SEQ ID NO: 14 - DNA, 647 bp, Homo sapiens
  Genbank Accession No. AA015613
  unsure (1)..(647): n = a or c or g or t
tttttttcagttctaagacatttcactttatttaaaagaagccaatatacaggatataaagggcatgatatttacaacagtacagtaaacaggttggtttccggtagatcagtagtctttccatgagtataaatcccccccttccctgtgatgctagacccagctggcagacaacagcaacggtggggcaggatcatggggtataaagtctccctgggtggggctaaaaatcaggtagatgcaaaaacatccacaaggggtcttgcagggaagggctttgctcatttctttgagggcttgggagggaagggtcttggtgagggatttgctcagaactaacacacagcccaccctgagcctggaaatcatccattcatagaaaattcccttccagagagaatctggctttacctgcacccacccagtcccctccagactccccactccaggagagagctcttctagagccagagcttggtgtctcaagggggaagaccctgtcctaggaaacccccagcacctgattcntcccccaggccctggggaacatagcaagatgcagccagcttgctgagtagcacnccggctggctatganatttagcattcatttgtcagtgctgacactggaccnaagccagtcaagaa

SEQ ID NO: 15 - DNA, 496 bp, Homo sapiens
  Genbank Accession No. AA018663
  unsure (1)..(496): n = a or c or g or t
gcgaccgaatctccgcacgcgtagggccgctcgcncgtgtgcgtgcgcaggttngcnancanggctgcagttgcgcacgaaggccttgccgcagtcgcgagnattgtagggcttctcgcccgagtgcaggcgctcgtgctggcgcantcaggagcagccgcggaaggtctttccgcactcggagcagccataggnccgctcgccggtgtgcgcgcgctggtgttgcaccaggcccgagcggccttgaaggccttttcgcacagtgggcacgcgtagggnttggcgctgctgtgagtgctgctggtgccggctcaggttcgagcgctggttgaaaggccttgcngcactcggggcacgcgtagggcttctcgccggtgtgcacgcgccnggttgctccacgaggttgcgagaacagcccgaagcctttggcgcagtcggcnaactccgtacggcttctccccggctcccgaccccgtccggaacttccgctcgctgt

SEQ ID NO: 16 - DNA, 626 bp, Homo sapiens
  Genbank Accession No. AA020743
  unsure (1)..(626): n = a or c or g or t
taacaaaaaaaccaaactttacttgcatttagccattaataaataatttacagtatgtacacgcggtgacactccacacaggtcgcagnacgtggacgcagtgaggggtccccacttccaagcagaacgtgagcaaacacaaccaaaataaagtgcttcactttttacttccaacatagggaccaactaaaaccagcangnngagggaggggccgggccannngcnccctcccacccgcccacacacggttctggcagagggagcaggacctcttgnngggatngggnananacacgttctgcagcctcctggccagtgtatganaggtccctggggaacagcagaggggctgccgatgggtgggtagggtgtggagctgtagggcttgctggcaggatcacccntccagggcctggctgcactttttgggagtgaagcctggctttgtgctgtgggcatagcagcacaggtgggactgttcttgggccctggaatgagcaccctgggctgaaatgaagccggnaaacngaaangtctctcctggctgtgtggccaaaggcntaaggaaaagatagaggttganacctgccangatctcanactgagatcctaaaccttgtctntc

SEQ ID NO: 17 - DNA, 474 bp, Homo sapiens
  Genbank Accession No. AA024984
  unsure (1)..(474): n = a or c or g or t
ttttttttttttttttttgattttctgtgtcagtctttatttggcaaacaaatttccttcccgataaggcagccgcgtgagaggagcgactgaatgcccagcacccaacctccaaaagcacctccagccagaagacaaagatcctagaggcccacctcctcttccgctgctttagtcttgcgcatggagggctgaccgcagttgcaaagctcgaaggtgttcctgagtcctcagagcagcagcagganctggaacaggaggcagtgagcctcctagccccgggtcatgggctggagggagcatnacaggaaggagggaccctgcagaccaaggctccaaggggctggattcttggctcccctgggggcaaggcaaggggctctggggcttgggccagctttggagtcacaggctttgctccatcccctagtgagtggcttgtcatcgccccttcaaaatggggctgtgattttt

SEQ ID NO: 18 - DNA, 395 bp, Homo sapiens
  Genbank Accession No. AA026238
aatagtacctattaccttctaatatactatactatttatttgtattgtttaatgtttattctctagtctcctcctggttggatgcaagctctgccaaggtgcggatctttattttgtttgctgacatgtcccaagagccgagaacaatgcctagcccatattaagtgtccaatgaatgtttgctgaataaatgaatgaagaagagtcccagacaagccagtggaatctttgtcatttttgttactatctcacagaggggtcatcatggcaacatcccaggatctgtggaaggaactttacgtgcctttggtagccctgagcacgagcaggtaacctggggtatcctactgagcatcctacaagcactccggttactgtgcttgtgtgctaatagc

SEQ ID NO: 19 - DNA, 588 bp, Homo sapiens
  Genbank Accession No. AA034289
  unsure (1)..(588): n = a or c or g or t
nttaataactactgatggtttgttcatgaaaaaaaatttttaaatcaaaagnntgtacttggccctgagttgaaaaaatttcaaaaatcaaaagtttgtacttggccctgagttgaaaaaaaaaattcacattctaagaataaacagaaaaatgttcttcttggaagtaaataacaaaagccatagtgttttcatttgtcttttcttcaggatacacggtagaagtcagagaatctttgatacttttatttggtgcaataatcaaggccatgcaacaacccaaaatcaagcattttggttcaagtcagggatgacatgagtggggacagaagctgtggcagtcattcaaataatctcatgggtcctgaggaanagacaggagttaacgtattaagtttctacttattatgcaggaactgtgttaaatattttacatangttttgantaatagctaacatttagctgagcaccaaatttgggccctgatttgtgctgggatctttcacagnttactggcttttaatcagcagtccttgtgagcnagggtatgatcattatccccatttntagattacngatgagattcg

SEQ ID NO: 20 - DNA, 470 bp, Homo sapiens
  Genbank Accession No. AA035736
  unsure (1)..(470): n = a or c or g or t
ggcatgnggtgcattctagctgttgaccagattgctaccgagtcccctcctccactgatgagctgcccacactgggaagcagcatgccctgactgttccaacaccacctgctatggggagtacctttggtcccctcacatttggccagagnatacaaaaaaccagagcagctggagagggagataattactattccttcccttcccatctcctttctagccacaagagtgtgggggttggagaagaaccattagaaagggaaattagtgggctggtgtatctggaaagagggaagacttgatcctcagccccgaggttggtgcagggcctcccctgtgtagactctacctgcactctgtgtttatatcctgtgccctaagtgggccaagcccaggtanattcctgctggccttggaactccaaggtttggctgacnagcagactggctccctgactcntcagcctcaaat

SEQ ID NO: 21 - DNA, 571 bp, Homo sapiens
  Genbank Accession No. AA036952
  unsure (1)..(571): n = a or c or g or t
agaacaaaatatatnggtatttattaaacacatgtgacataggttataatatcaaagtagagcatgcatgaacagatgattcattcgtttaacaaaaacaccaattgatactgagaacactaaattattaaatttccaagacatataaaattctctttaagttaaagtgagaaagaaaaaaaaatcacaagttgaataaatacagtgatttcagctggtccaatgaaagcataaggcacaaattaaaccaagggactagcgcatcagaatgaagcttgtctggcccacacaagtctctcagtgtggctcccacgaccctgcacagatgcttggggaccaagaggaaagagcacctgcaggccgggaaccctcccttccaggttcaagtttggctgggtgcccatgcttcttgtggacaggcctctctgtatcagagaaacgctgcctctaatacttttatgggtaaacaaaaccttcatgctctatcaaacaatcctgggcatgaataacatggaacttcaaattaatgtccttttccctcccaaccaaagtctagcaaataantacttgn

SEQ ID NO: 22 - DNA, 489 bp, Homo sapiens
  Genbank Accession No. AA037529
  unsure (1)..(489): n = a or c or g or t
attttttatatgaatctcagtagcacttttgttgtacattgtgttccaataagtatagtatggaacactttctcatttttagttcccataatatgccagtttttgctttcctagtgttctgtgagtattaggntttggcaatctgcttttgcatttcaatttctgttttacatgcaagaaaaacatggacactcttatgtggtgcttgtagctgtgtctccgtagagctcagtaaatagttctacagggtttagaggatgagaagcgattgtcaaattaggctgaattgtagaacacaaataatttaattcaaaataacttaccaattttatatacatgataaagtattcagacaactttctaaatgcataatagtaaaagattgtgaccagatattatggatattaataaagttaccagatactaaaatcaatgaatgtaatttgaattacttagaaattgtatattagagcccttatgagtaaaaac

SEQ ID NO: 23 - DNA, 645 bp, Homo sapiens
  Genbank Accession No. AA044844
  unsure (1)..(645): n = a or c or g or t
caagtatgaagactaaattttgataactaatattatccttattgatcctattgatcttaaggtatttacatgtatgtggaaaaacaaaacacttaactagaattctctaataaggtttatggtttagcttaaagagcacctttgtatttttattatcagatggggcaacatattgtatgaagcatatgtagcacttcacagcatggttatcatgtaagctgcaggtagaagcaaagctgtaaagtagatttatcacacaatgactgcatacagacttcaaatatgtcaatagtttggtcatagaacctagaagccaaaagccacacagaagggcaagaatcccaatttaactcatgttatcatcattagtgatctgtgttgtagaacatgagggtgtaagccttcagcctggcaagttacatgtagaaagcccacacttgtgaaggttttgttttacaaatcacttgatttaacacctcaggtagaatatttttatttttactgttttatacccagaagttatttccacattgtctccagcaagaatatnataaaagtatcccttccaatgccttgagaagatngaggaaaaaagtttggatatatttaaaaattgtttaaagcagttgcacatgctggaccaga

SEQ ID NO: 24 - DNA, 399 bp, Homo sapiens
  Genbank Accession No. AA045735
  unsure (1)..(399): n = a or c or g or t
gctattttaggtgaagttttagggtgacctgttacacatcaatgggtaatacagggagtacaaggaagacatggacagggaaggtggggtatccgctgggcctgaagaggaggatttccagaggctgcccaagagtccaaggccaggcctcaagaagtggagtctggatttcaactcaggctttcagggaggtcactttaggacgggtgacctcaacagacacactggtaggaccatcacctgcacctgtataaagcacagtacaactgctgaccttcacttcgctgtgatcgtgccaggctgtgtattcgaagcacttcatgtttactctcttttttttctttttttttctgagacagagctcngctctgtcgcccaggctggagttgcaatngcaca

SEQ ID NO: 25 - DNA, 434 bp, Homo sapiens
  Genbank Accession No. AA053401
  unsure (1)..(434): n = a or c or g or t
tttttttgagacagagtttcactcttgttgcccaggctggagtgcaacacagcggtctcggctcactgcaacctctgcctcccaggttcaagcaattctcctgccccagcccccaagtagctggggttataggtgcccaccaccacgcctggctaatccttgcacccttagcagagacagggtttctccctgttggccaggctggctcngagctcccgaccccaggtgatccgcctgccccggccttccaaagtgccaggattacaggcatgagccactgcatctggcccttcttcttaaacactgaggtcagggtgatctctagggacagcctgacacaaccaggatgatggagaaaatacacaccttggtggtggtatagaaagcctcgatcatctactagccaatgcttccagcccctctcccatcctttc

SEQ ID NO: 26 - DNA, 632 bp, Homo sapiens
  Genbank Accession No. AA056278
  unsure (1)..(632): n = a or c or g or t
ttaaaaagcaagaataatctttattccttggaaacacatttgtaaaaatgctatcaataagatgaaaagattcagaacacatttatttgtatgcagcacatacactgagcatcagaacgtctgctaaaatggaatacacctgtaaacaaatgccttagggagagtttataggtagtcagctccactgtgcaaggtatgcagctgataccttcttgctgaatagatttttgcagtagccaaaaaagatcagattttagtaataaaatatctcaaaggatgtcaaacattttttagagggcctaacatgggcaaaattacaattacatatacaaaaatggcacaagaatcaactgatttcacagaaatactaataaaacatttcaggtctattattaagagaaaaaaatgtttgactcagggcttgaaatgggggaaataaatattttggtacaagctttaacctaaaagacaccatattgatttctggttctaccaacagactagggcacaaccatctcatcctactctncagaatgctttggcacactncaggaaaccntatatgcnttcattgagccataatganttgatgcncgtgcttttaggtgagctgggnaaaccatccccatctg

SEQ ID NO: 27 - DNA, 496 bp, Homo sapiens
  Genbank Accession No. AA056755
  unsure (1)..(496): n = a or c or g or t
tttttttgagctttcagagtggttttatcattaaattaatatctaatcacataattcaaagatataaaaattggaatgtagaaggtggggcaagcccctccctcaggactggaggcggcacagggacagagccgcactgaagcgggtgagcgtgcgagaaacatacagccgagcagntgccccgaacactcagtccagggtggaagcatcgccccggcaccccccaacccccgagcccactgcgcacccacaggaagagtgcaggcttttcacatttcagagggtggggtggggtggggtggggcggggtgggcccctggcttttggggctgccctccagcagccctggaaggacacaggcggtgatggtgggagaaaggccccctctcccaggggaggcctccttgtcctgagcttgggctnaggtctctgttccagtaacagatgctggtttttgttttgtttttttttttaagacaaggtntcgcctcgtgcc

SEQ ID NO: 28 - DNA, 576 bp, Homo sapiens
  Genbank Accession No. AA057445
  unsure (1)..(576): n = a or c or g or t
tatgaaatatacatcttgattttataatcgtgtgtgctttattttttacacaaatggaatggaagtgttgaatatttacacttaacaggagtgtaagctgtgcagtgtctctgtaaactccagcctaggcaaggagtattcccacctccctcccatcctgtgctacagctcggtggagaaacatcctgtcagagagaagcacaaaactgtcatattgaaaggatctaacgggtacagcctggtgcactcagaagttaagaaacacttaggaaacacaaactcaaaaaggagagaagaaaagtctgccatcccattgggagtcaaccttgccacttggttgtctgtcctcatgagttgctagggagatactatactctttagatgatctttgtctaaattgtccgcctgtcttagctttgtcctcagctgttacaagaaactgcacagctgtaccagaaatgatttccaaagcacangtttcagtgaggaaggattttacagacttgagtgtgtgtgtgtggttcccaccacagtcattcctactccaatggnacgtgtggaccatgggatncaata

SEQ ID NO: 29 - DNA, 655 bp, Homo sapiens
  Genbank Accession No. AA057543
  unsure (1)..(655): n = a or c or g or t
ttttgagcagacaaatctttattcctgaggctaaaatatgcaccagttccctccctgtaccgcgccactgccagcctgactgcatgcaggccctgtcccagacctggagcgctgaacttggagtcccaggacctccttccctgagttgtgtgtgtgtacatggaggggactcctgggtagcacctggaggcggcctaggggtgaggggcttctcaagggtgccctgcactnccatgaggtgagtcttgggcaggatgtagcatgttcagagtctggtgaccgaaacagggctgtcggggacaggcctcgggtgttgggagggcaaaggtgacagcatcatggacagaggcaaagagatgcttcttggtgatgggatgcatcgaagaagtgcccagcctcaagctgggctgaccacagggctgtggcaggccgccatgtacacctccacctcaatctcccggaagtcatggaaatattcttcaggctcttgaggcacacagtgtccacaaaggagatggcacccaggtccangatgaggctgtggaantcttgctgaagcaagcccangcttttcagtgtggaccatctgggccttggagtttcttgancattgctgtgcncttccatctatctcctgagctcacntgcatnatct

SEQ ID NO: 30 - DNA, 524 bp, Homo sapiens
  Genbank Accession No. AA057583
  unsure (1)..(524): n = a or c or g or t
gtgtttttgtttgttttnntncccccaanntcttaggccatnnntncccccanagagagaaccgcaagtcatcgtgagggtggaaagaatcgatagtactaaatgtcctttgcctaggctgcaagaggcacaatttcctttttcaatggatgaaagtaaaacggcaaactacccccnntttggactttgttgacttttgtgaggaaaccatatgacagctttaatanccccnnttaaaattcagagcaggaaatgaggcaatcccgtacacaggccaagaaaaaaaccgtatcaaaatgtaaatatcaattccacattacagccagttaaagaacaatgggaagaccaagaaggagatggcagtgacagaagaaaggagaaggggaaataatgggcactaagaaagcagaaagagacatatttggagggagatggctaccgaaatctgggcttttcttagatcctctccaaggnaagttatcactggaaatacccaaggccctgattgtatgcactgtgctagg

SEQ ID NO: 31 - DNA, 572 bp, Homo sapiens
  Genbank Accession No. AA059458
  unsure (1)..(572): n = a or c or g or t
tgaaactcagtggctctatctaaccttactatctcctcactctttctctaagactaaactctaggctcttaaaaatctgcccacaccaatcttagaagctctgaaaagaatttgtctttaaatattttttaatagtaacatgtattttatggaccaaattgacattttcgactattttttccaaaaaagtcaggtgaatttcagcacactgagttgggaatttcttatcccagaagaccaaccaatttcatatttatttaagattgattccatactccgttttcaaggagaatccctgcagtctccttaaaggtagaacaaatactttctatttttttttcaccattgtgggattggactttaagaggtgactctaaaaaaacagagaacaaatatgtctcagttgtattaagcacggacccatattatcatattcacttaaaaaaatgatttcctgtgcaccttttggcactctcttttcaatgtgggaaaacttagtcaccctgaaacccacaaataaataaacttgtgatgtgggcagaggttggggtggcatgntgtgttaattaacc

SEQ ID NO: 32 - DNA, 637 bp, Homo sapiens
  Genbank Accession No. AA069788
  unsure (1)..(637): n = a or c or g or t
aaatttancattactcacctacaaacatatccaatgcaatgggatataaaggttttagtaatataatcctagcagagtttttatgattgtctcatggaaaaattaaattgtggaaatacggttctgatttgtggttcgagtcagttcaaggcaaattcctggtgactgctaagtacttttccagatcaaacattaggcccaattaattaacatttctaaatttacagtcacatgagtatttatgagcttcaaaaaagtgcgctcacttttactttccctgttaaagaacataaacgcatatgccactgattcctaaggaagatctctttgccagggtcttgggaagatttttgttcaaacagtactacccccctgccttctctgtatcccagggaatcgtggaattatgagtcactactaatagcagtgtgtcaaacccctccaagaatgttttgagacccactgggccttttgcactagaaatatataggcttcatggataaacaacagaacaaggattcagtccctcaccaactttttccactgactgcaanggtgaacctgtgtcctcattcacttagaattccccgatgctatccctgacacctgctaangccaggatgnccagggtgggaaa

SEQ ID NO: 33 - DNA, 630 bp, Homo sapiens
  Genbank Accession No. AA085711
  unsure (1)..(630): n = a or c or g or t
gaaatttgcctgggcttgagcaaactgtggggactcaatagatttggaggcctcctctcccttctgagaggcctgcctgcttcctgccctgatgaatccctaatttcagtacaaactgaggaacttgaaaaacatctgtgcactgggaccgcccctcacaggagggctgaaanagcacagctgagtcagcggcacattcagcaggcgttcagtggggaagcaggagacagaggcggcgctcacaggacccgctccaggcttgtcacagccacacatcacagcactttgggttttgccacaacagagcagctctgagctcaatccttgcacctcagaagtgcatttatgattaaaatcatgctcgacatgaagccctgttatgatgtgcagtttaaaaagagaaacgggtccaaatcagcaccaacagagccccccagggntcccaaagactcgccccagagacagcagaaggaccccatgtgcgcgctgatctgtaagaagggtggtggatgcagcagcagggggctgcgtccaaaggcagcaggtgggggctctcatagtgtgacctgggcaggcaatncctacccgggancctactgaaaatnggacagcacacatgagcaacagagg

SEQ ID NO: 34 - DNA, 633 bp, Homo sapiens
  Genbank Accession No. AA085776
  unsure (1)..(633): n = a or c or g or t
ggcttaaacaacaaaggtttatttcttgctcactacatatccattgtgggttggtggggtgggagtgggggattctgctcatcgcttaggaccccaggctggcagaggagggtttcaactggagagctgcttctatgtggcaacctggacccaggctctcaaagcttctgcccagaagtgaccctcggcggttctgctcatgctccactcgccggggcagccccgacctaacctcccagcaggcagcgcatcacatgttacaggtgcccaggagaggagaaactgcacctttgtcaacaaagacgaccacggaggggagactgctgatggagggtggtcaggagtaggggggcttgttcctgcctgcagttctcccctatctcccaggactgagctcgacacaggcacaggctgaggcctttggaaagctgggcttgggagcttctgtgacctggcaagctttgccttccttaaactttctcagcagatggtgaaatccaatttggaatgttcagccgggcccagtcattctaacctcattnaagccgtcaactgtgaaacaacaaggtcagggctgggttcanaaaccatcaggaaccaaagtgttgtttgttttttgttttggtttgtttg

SEQ ID NO: 35 - DNA, 518 bp, Homo sapiens
  Genbank Accession No. AA086045
  unsure (1)..(518): n = a or c or g or t
tggcaccgggagtagcttgaacaaatgcaggggtgtgggttggagtggcgtgtctctactaaaggctcctgggaagganttcaagagcctggttgggggtgctgcactccagcgcagaagccagggcttctgttgggagggagacagctagtcacctgggccctaacatggaggtaggagccaaggtgcctgtgcacccataaccccaacctccaaatgagcagaattgtggagagctcaaccactcaacaggcttgtggagaggctcacaccaggaagaaatgctacacagcagcacttgcagcctcccccacactccgtggctcccggtgggcccggctcanttcctccccttntgggtggtcaaaacattggcacttgctctcccaaaagttcagggggccaaggccaagttttcgaagagagaacgattggggaaaancttgntcaaacaaggttggctnaaagcctggaaccagctttaaaaaggaaggttcccaattaaccccccaaggaac

SEQ ID NO: 36 - DNA, 489 bp, Homo sapiens
  Genbank Accession No. AA088177
  unsure (1)..(489): n = a or c or g or t
ttttaagcagaaatgtacattttatttaaaaagcaatagcaaaggtgtgaagaacacaaacttctattggtaacagtttattaaatgctttatagtaaaatattgagcccactctattacaatacacagacttaatgttctaacaaagaaaactgcctcaattgagggaagtttgtgatgcaaatgcaaggtggaattttggggagcaacacaaacaaatgtatcctccttctgctcttccacaactgcaatactgatgttcagaaatgtttaggtattgggagaaacctttagaatttcctgagtattttattaaacaattcttacaattatgttaccttaaaggaaaacatgaaaattttctgatgaaaacatccattttaatatttattatcttcngtgactaagaaacacaatcctaaacaacatgtattataccgtaagaaagtctttggagttatcataagggctctccagcacanggtaaac

SEQ ID NO: 37 - DNA, 590 bp, Homo sapiens
  Genbank Accession No. AA088446
  unsure (1)..(590): n = a or c or g or t
ttaatattttaaaagcttattgaatcacaagcatttttttattttactgtaaaaacatcatctttatcagggaggggggaaagtacaaaattatgtccctgatatgattcaaccatgtaaaatgatgtacatttatgaacgacgactagaagtgaacatgaataactgaaaacaaacagtgtgatgcaagtgaatttttggagggtgagatggtcattatattgttcttcgagcaattaaatattttattttcttcccaaaacaatgtccacaagggggcagacagaagatgacaaataaaaccatttaataaaaacctcagctgaaaagctaataactccagaatgcaggttgaaagcaagcttaaaggtcatctaggctggggtcagtagctcacgcctgcaatcccaacaccctgggaggcccaggtgagaggaccgctcgagcccnggaggtaaaggccgcagcgagctatgaccgcgccactgcacaccagcctgtgccacaaagtaganttcgtcccaaaaaaaaaaaatcctcctagtcntctagtccatntccccccctggncaagaaggacngaggcccca

SEQ ID NO: 38 - DNA, 500 bp, Homo sapiens
  Genbank Accession No. AA100793
  unsure (1)..(500): n = a or c or g or t
tcttctgcagatctgaagtgtaactttttcgacgatctttccattttgcaaggtcatcctgccatttctgatcttgttcttttaattgtgattttattttctgcatctcctcgtaacgcagctgacgcaagttttgaacatcttctgcgctgacatcactcatggacttactccttgaaaatgttccatctgcttctgtataaaccgggcttgccaacttcttctgttatcctcatgtttgtctggctttttctttctcagaggtgctggtacataggatggctgtctacttttgttgggtaaaaaacgattgaagggtaacgcagtctttggctcaacagccgaaaatccttcgatacgacatatcatctttaatataatcctggcatcttgaatgtaaattccgaatctgtgtcactttcnaaaaccttcacgccccctctcaacgtgatatcagaggagcagcttggtcnaagacctcgagcccnaagagtccaagc

SEQ ID NO: 39 - DNA, 540 bp, Homo sapiens
  Genbank Accession No. AA102335
  unsure (1)..(540): n = a or c or g or t
agttttttttaagacagagtcttaaaaaaattgcccaggctctttttttaagagtcttaaaaaaactcttgcccaggctggagtgcagtggcngantcttggctcgctgcagcctccatctcccaagttcaagcaattctcctgccccagcctcccgagtagctgggattacaggcacgcaccaccatgccaagctaatttttgtatttttagtagagatggggtttcgccatgttggtcaggctggtctcgaactcctgacctcaagtgatccaccctcctcggccttgcaaagtgctgggattacaggcatgagccaccacgactgggcctgaaggggcttcttcatcttgggggagttggtggaccctgtctctgccccttacaaggagtgttgctgaggaaaccagagcaccgagcaaaggcacagggggaaaaggccaagnaatcgtattgacatcattccacacctggagaactgtattagngagtgcgtggaccacccaatcccctagcaagcgcttgaataggctggtctag

SEQ ID NO: 40 - DNA, 573 bp, Homo sapiens
  Genbank Accession No. AA102468
  unsure (1)..(573): n = a or c or g or t
tgcggaaaaaagatgtccctttaataaaacgttatcaacatatatcgtacacaaactacaatgtatcataattacttttttttcctctcttaattcagaaccagactacaaggtaagaaaaaacacagaaacagctacaatgttcccaataatccgcacaaagtcttttttcaggcagatgatatctcacataatatgatatacatggatcagaaagggagggagtaaaacaaagaccagctacaggggnngggaggaaggagaagggcatgtcaatgtacaaagaattcgggtgtcttccagggcaagacacaaaggtttccgtggggtgatgaggtgagtggggccatgagcaccctcccgggagggaaccaggctccactgtcggggcttgttggttttttgaaaagttaaaaaccaggacttgggggcccagcacgtctgttttgggttgtccggtgtncccccaaccccccaaaggttggtnccaaagtcttttccatccagttccccaggcnttttccggggccatttttggttcagtatnccctcttttggggaaaggggggaatt

SEQ ID NO: 41 - DNA, 588 bp, Homo sapiens
  Genbank Accession No. AA126704
  unsure (1)..(588): n = a or c or g or t
aaaaaaaaaacaatatatagtctttctgggatatcagcttctgcctaaattgtgagaggtggtgtttcaaaagacacacgcaccagtggccccggggagagctgcattccaggttcctgtcctacgtaggcccctacgggtgctggggacaccagtctcctccactcacttggcaggagtcaggactgtccacctcttcaactggcacaaggcccaagcagcatgggggccctgagtgaaatggagggtcccacactgcttccaggacaggactgtcgggggctctcctcacccctgactggcccacagcagcaggctgctcctggcgttggcagcagtcgtgatggggctgcagcagctggtgagtggagtcgtcgggcagtgtgtataagaaagagccctcgtccgggctagacttgggacccctcgtgatctggtgactttgggggtcatatccattgccaagatgggtctgcctcagcaggctgctggtgtcactctgctgctgaagctcgcctgggagttctgctgggcttatgccgggtagcccattgagccgngggaagccctattcagngattccattag

SEQ ID NO: 42 - DNA, 616 bp, Homo sapiens
  Genbank Accession No. AA127736
  unsure (1)..(616): n = a or c or g or t
ttctcattcaaatttaaagatatctttctcctcttgatcaatctatcaatattgatagaagtcacactagtatataccatttaatacatttacactttcttatttaagaagatattgaatgcaaaataattgacatatagaactttacaaacatatgtccaaggactctaaattgagactcttccacatgtacaatctcatcatcctgaagcctataatgaagaaaaagatctagaaactgagttgtggagctgactctaatcaaatgtgatgattggaattagaccatttggcctttgaactttcataggaaaaatgacccaacatttcttagcatgagctacctcatctctagaagctgggatggacttactattcttgtttatattttagatactgaaaggtgctatgcttctgttattattccaagactggagataggcagggctaaaaaggtattattatttttccttaatgatggtgctaaattcttcctataaaattccttaaaaataaagatggtttaatcactaccattgtgaaaacataactgttagacttnccgttctgaagaaagagcatcgttccatgctgttcangttcctcgtcaactgta

SEQ ID NO: 43 - DNA, 619 bp, Homo sapiens
  Genbank Accession No. AA127810
  unsure (1)..(619): n = a or c or g or t
ggaacgtttgggttttcctagctacatctggtaccttggctggcattatgggaatgaggttctaccactctggaaaattcatgcctgcaggtttaattgcaggtgccagtttgctgatggtcgccaaagttggagttagtatgttcaacagaccccattagcagaagtcatgttccagcttagactgatgaagaattaaaaatctgcatcttccactattttcaatatattaagagaaataagtgcagcatttttgcatctgacattttacctaaaaaaaaagacaccaaacttggcagagaggtggaaaatcagtcatgattacaaacctacagaggtggcgagtatgtaacacaagagcttaataagaccctcatagagcttgattcttgtatattgatgttgtcttttctttctgtatctgtaggtaaatctcaagggtaaaatgttaggtgtcagctttcagggctctgaaaccctattccctgctctgaggaacagtgtgaaaaaaagtcttttaggagatttacaatatctgttcttttgctcatcttagaccacagactgactttgaaattatgttaagtgaaatatccatgaaataaagttnctataataa

SEQ ID NO: 44 - DNA, 578 bp, Homo sapiens
  Genbank Accession No. AA127924
  unsure (1)..(578): n = a or c or g or t
gatacatctatacttctgaataatcataactgatactcaaagagatgccctgacaccctccaaggttctacaaggtgaccaaatcagagaggtcacctcatgcctagtattattttggggttagcatacattttataataattattttaaaactggcaatccattttgggactcaatgacagctctctctattaatcatattgttttattaactgaaatagtccactcagtcagtaggattaatgatcagagattatgacacaactaaaaccaaagctggggcaatgggctctcagaatggaaccacccattatgaactatccatctggaccaactctttaactttcttcctaaatatggagatcaccaaggcgtttcaatgcagcctgcacaattcatggggcagggtcctcagattaaagactttacatttatgtagnattcagtatcatttttcactaagcaaactctatttgctcactctcttctacatggtaattgtccaactttggttgactgctgagtcctcctgggagaattcccattctggccctggagnctctncctttangggggtt

SEQ ID NO: 45 - DNA, 595 bp, Homo sapiens
  Genbank Accession No. AA130221
  unsure (1)..(595): n = a or c or g or t
ataaattttgattgggtattaaaagtattagaaggtggttataattgcagagtattccatgaatagtacactgacacaggggttttactttgaggaccagtgtagtcaagggaaaacatgagttaaaaagaaaagcaggcgatattgcagtcttgattctgccacttacaggatagataacgcctgaactttaatgacaagatgatccaaccataaaggtgctctgtgcttcacagtgaatcttttccccatgcaggagtgtgctcccctacaaacgttaagactgatcatttcaaaaatctattagctatatcaaaagccttacattttaatataggttgaaccaaaatttcaattccagtaacttctattgtaaccattatttttgtgtatgtcttcaagaatgttcattggatttttgtttgtaatagtaaaataccggatacatttcacgtgtccttcagtattgatttggttgaatattgggtcataatggttgagaagctggacactagagccagaatgcttggatatgaatccggatctgtcactacttctgtgtgaccttgaaangctacttattcccccttagctt

SEQ ID NO: 46 - DNA, 539 bp, Homo sapiens
  Genbank Accession No. AA131041
tatgttttatcatatttaggttatttattaatgaaaatatatgacattttcaggaatacaaattttgcaccctgatgacctcaaatgcgtgcaacaagatgtttaatacagaaaataacacaaaaactgttgttacagtggttagaatttttaactttaaaaaaccatgaatttgtattgttttaattgcacaataaaataatgttgatatatacttaagcttaaattaattccaacaggcaaacattttccaacccagagtgtggctgatgctgggtcagctgactctattttggttcacaccaactttgatgtctaggctattcagcatctacctagaaaatctcaatcgttccaagcataccgtgaattttgtgatttctcagaagattttcggagttaaaagaagtgtttatatcacttaatatccaacatttctaaaggggggaaaacccaccatctattatcaatgacatttcccaagtccttgcaccaggcccttagtcaccaggttcccacgttttgttgccttcctaccg

SEQ ID NO: 47 - DNA, 563 bp, Homo sapiens
  Genbank Accession No. AA135720
  unsure (1)..(563): n = a or c or g or t
gctgtgaaacattattttattaactaattttattttattttttacaaaaataaacaatttaaccaacaagaagtacaaatgattctggatattcaaactcgaggaagggggaaagcctggttttggctgctttgaggctttcattgaaagcaaatgaggcagaaaggccccggcccacccccgccccaggtcctggctcaaaccacacctgctccctgaccccagtcttggctcatgctgaggtgtgcacctctgcccctgacccctgggctggcctgggagtgtcccctgtcgggaggtcagagatagcctccccaggtacagaatcacccacatcctggagcatcccccgccaagtctcctgtccagacctaagcttgagagaacactccacgatgggattgtccccacgnagcccccaccgnctgctgtggcatgtngcagcagcagcagcaggggctttagntaaattctaanactattgaaacanagtgatgngggctgccacggaaccgtcccagggagggggcacagcccanttgggangactaagcntgagttga

SEQ ID NO: 48 - DNA, 572 bp, Homo sapiens
  Genbank Accession No. AA142913
ttttttgacattgttctactgttttattgactcgttgcatttacaagttttgctaatgatacacagtctacacttactaataaattatactcacagtgtttttagtgatgtgactttgtttcaatattttataataaaagattataggagtaattacagacaatgatagaaaagtttgaggcatcgtgacaaaatagtgcaaaagcctaagttatccaaaagatgtagtgatcataattataaagactgtgtagtgtccctgggaaatgcttacaatgagataccaagcagtcaaaacggaatctaaccacgcacctgtacagtagttacaaaggtattacaaagcttgtctctgcatgaacacagtaaagaagtcacacatacacaaacgactacaatggtgttctggtattgcgactgtttgttttttcttctttaaatattattttgctttattgttgtaatgttatttttgtaataaataaattcagagagaacatcctactattagacaaggaaaatgccagaaatctgagatattttccctcttatggccgtattatattggttac

SEQ ID NO: 49 - DNA, 654 bp, Homo sapiens
  Genbank Accession No. AA142978
  unsure (1)..(654): n = a or c or g or t
tttttttttttttttttttttcccaagatgactatattttatagtttattatgaggtaactgcctccagacagataagcccctgcatgatgctgaaagtcagagcctgggggtgaatgccaccttatctttgtcctcctcagctggtctgcgtgtctctgctcagaacgctgtgtagtagtgctccattgtgctgacaatgtcactctggtcctccaggagctccagaacttgctgcagcacagcctcgctcaggcccgggcggatgtcaggcgagcacaggccaagatgtgcaggaagtgacagcccttctccatgtgatttggtttctggcagtcctgctgaatgatccggtggatctttctgtgcaggtctttgtcttctctggttacatagtataggttatcaaaaccatcatctttctggaaaacaagtccttttcctgcagcagttgtatagcattctaaatatacatgaattgcctggaagtggtgtcctcttaaaattcactggtcggagcaggcacgtgaatcacaggctgattggcaanggacagcaaagactccaccattccagctcctgnggtaaaagctngcactngttctccagaggaatcttggcttttaccagnaatcggaaanggggngtcaggcgc

SEQ ID NO: 50 - DNA, 620 bp, Homo sapiens
  Genbank Accession No. AA147881
  unsure (1)..(620): n = a or c or g or t
gcactgtgtaattcctttattttctgcatattagtgctttaccaacactacaaccataaagaacacaattccaagtactgtactttttagtttggggagatcacagtctacagactcatttacttatattaaacaagattaacctcattcaaaacttactgcagtttataaattcacataaatacagaaatggatgcaattaaacaacttcaggatcttatttttaaaattcttagataattttttctgcaggctataattacctgctccagtcaccaatggttattgttcaatttaactacatcaattataaacctcttatatccttaaagaaaattttaagtgaaaattacaatttcttaccaaaaggtttagggttttccaaatttcanatatttgcttccccctcnccccttccgtcaaacatttcaaataaactaaaaataaccacatctcacctgcaacattcataatagcaatcattgatgtataaattttaactatgcccccagttattttagacccaaaaaaatggcggccaccatctgtctcacagttgaaatctacttagatttacagagggntcagttcccnccagttaggcttaacctgngctgttg

SEQ ID NO: 51 - DNA, 652 bp, Homo sapiens
  Genbank Accession No. AA147884
  unsure (1)..(652): n = a or c or g or t
tgactttgctgatggtttattaccttaaggaaaagacttacacagagaaattgagcaatgaaaacccttcacattgagcaaacacattccacgctacacaaatcatgagaaaaatgagaactgttgtgaaacatgacagattgcccaagtgttatttttcctctattggaaaattctaagacgtttcctcatgtgtagtttttcagtcacaaaaatggcagtaggaatatttaaatattaaatcacagtttgaaaatagatacatacatacatatatatacacacacagagatacatagttgacttatgattcccagatatgcagggttatcattgtgactgcttggatcaagacaagtttgtaaaaagcagcgacatagttcaacataatagtcaggagctagattacttccctgtaattgctatgcacacacagtacaaggctagcgagattatagacaatctgtcttcgaatctactatcttgataattctgaatcttttcaagttaaaattgcagctattgtcagtaagcgcccctataaaggtcaggcctttgantgggggacgataactngcgtcaccaggagagaggcncggttcaacttccnggttccgtctggcngcggtcacagccggnaacctgggtcccg

SEQ ID NO: 52 - DNA, 575 bp, Homo sapiens
  Genbank Accession No. AA149250
  unsure (1)..(575): n = a or c or g or t
gcttttaacaatgatgatttattaaaagaaacaacccctcttccctgcctcccatatcccctgtagtctccatccacaggcttgctgttttcatccatcttcctagtcaaggaactccagacagtcacatcttggaagataggaactccaggaagggatgacgatcttagggaaagatgatccttaagataactcttcatctgtccttaccctgcaacacactcatggccacacccattgctgacacagtggtctccggggttgcagtcccagtcacctgtgcagagctcgacgcaggtacccaaaagccggtctcctgcagcctgaagctcttgtacctctaggcttgaagatgatgaggattcacaggaggaggaaggctgccaacttcatgttgctgttggaaggctttggaaaaacacagcagggctgagagcagctgaaatttataccttccanccgctgagctggnatgcnaggccaggggtgggactaggggactgcagacaccttaagncctggccagaaacttgacatttctngagattagcaccaccctgtgtaccctgggtctt

SEQ ID NO: 53 - DNA, 570 bp, Homo sapiens
  Genbank Accession No. AA149641
aaaaacaaagaaggacacatttattatttgttgtgcacctttagaaatggtccacaggtccactgcagtgcacaagctgctgcatgcacaccgcacgtgacaatccagtctgcctgactcccaggacagcctgtgtgatatgcaaaatgccattcccatgagggcgcatcatgtttcccaggagctctgaaggacacagatagagcttgtgctctaggctgcccccctgttcccgtgctggctccatgctggtgtccagaatgagccagttcacactccagtgccacgtggggggagaagtggctcccaaactcccctgctgacctccccccggcccctaggtgtaccttccaagtcagatgacagtcataggctaacatccccagctttgcctggaactcaggaaaggatacttacgggtagacagaaagattctgcagtgggcttggacttggccattgaagaccctgagaggacatcttgtccaccctctccaggctaggccctgtctgtgctgcctggagccagaagaaaaagattccagccttggaatctgcagggaggctcgtg

SEQ ID NO: 54 - DNA, 659 bp, Homo sapiens
  Genbank Accession No. AA149860
  unsure (1)..(659): n = a or c or g or t
cggctgagcgtgtggctgcaggagcttctgtgggagtacggtcatgagccttttgctgtactatgccctccctgccctgggcagctatgccatgctctccatcttcttcctgcgccggcctcatctgctgcacacgcccagggctcccaccttccgcatccgcctgggggcccaccgaggaggatctggagagctgctggagaacaccatggaggccatggagaactccatggcccagcgctcggacctcctggagctcgactgtcagctgacacgggacagagtggtggtggtgtcacatgatgagaacctgtgccgccagtcgggcctaaacagggatgtgggcagcctggacttcgaggacctgcccctctacaaggagaagctggaggtttacttctctccaggccactttgctcacgggtcagaccggcgcatggttcgtctggaggacctgttccagaggtttccaaggacacccatgagcgtagagatcaaagggaagaacgaagagctcatccgtgagatagcaggcttggtgagacgctatgaccgtaatgaaatcacatctgggctcggagaagagctcggtcatgaagaatgcaaggctgccaancccgagatgccctgttcttcacaataagccgaggattttggtg

SEQ ID NO: 55 - DNA, 645 bp, Homo sapiens
  Genbank Accession No. AA150501
  unsure (1)..(645): n = a or c or g or t
tcattgaaaataagtttaatgattattaagtttccaagctagattacagaagtctttttagcccatatcataaataaaatagttctgaatttttcgtatggaaaaatatactctgagttccaagcaaacaacttaagaaaatttttagaactaacacattcctatattgggaagagctcaaaagtctgttcttcctccccatccactgttgtttaattaatctcttaatatcataaagtccctcatgtgccaagtgtagacagtcatttttgaatcagggctcactttgttagcttttttgtcaattaaacctcttttctatntaaattaccgagtctcaagtatgtcttcatagcagtgtgaaaacagactaatacaggaatttgggtaccaggagtggggcattgctataaagatacttgaaagtgtggaagcaccttnggaactgggtaacgggtnagaggttggaagagtttggagggctcagaagaagacaggaagatgaaggaaagtttggngcttcctgggagacttgttgaatggttttaaccaaatgcngacagtgatgtggacgnttaagtcccactgggggggtcncagaaggagttgggggaccttnttgggacnggagttgccatagatcnt

SEQ ID NO: 56 - DNA, 668 bp, Homo sapiens
  Genbank Accession No. AA156240
  unsure (1)..(668): n = a or c or g or t
accacctgactcagacttctttgtcgttgttttatttaaaatgttattgtctctgattagaaaatacagtcatgagggctaaaaactgaaatgatgtgaaaaggcatccattaagcagtgttgccccaccaccctttccatcagtcttgtctcatggggatggggaaaatgaagacagaacgctttgccttgctttgcaatccctcctttgaaggccttctgtcccaggaagccaatgttcatttgatgtggaagagggacctgtgtttaaccagaagctgtcctccctcatccctttcccatggcttacacgcagaagggagaggagatgaccagaggagaaatcaggggaagaaaaggcaacaggggaggcaaagggaaaggagaggaatgcttaaaatatacagtgaaatttgagtaggattctctactcaaagacttctctgggaagtgtccagaattgaccacacaggtgctgacggtagaaagaacacagacccaaaaccctgatctagttgcattaactccattagccctgagttccctgtaaaatgaagactgtggagnaccactagaggattctgtgacttctcaactctaaaatttggactngacctcgtncgatnttggctcgaggcaaattccnatatggtcgattaatcgaacca

SEQ ID NO: 57 - DNA, 640 bp, Homo sapiens
  Genbank Accession No. AA156269
  unsure (1)..(640): n = a or c or g or t
ttttttttttttttttggaaataaacaagctttattttcagtttcaacaggtaaggcgatacctgcttcatcgtgtgcttttatgtaaatgccaaatagcaaaataacagctagaaaataaacagtttgtcagtttggagatcaagtactttatctatcttgagtgttatctgtcttggaatttagccaggcctaaaagtagcggaagtatcaggaaatgctatagagagccagtctccagctgcaggttggtgggcctggcactgaccagattggggtggctcaaagcactgagcgatgcaggcgccgtttctgcattgcctgcagcctcttctgcctctcggcaaagttgttcttcggggtctgcttcagtgcgggcaggatggcacgctccgccacaggtgggctcaggcatttcttggagaggctcttggtggagaccttggggaaatgcgtggcttcttggtccctgggaaagctagcttcctccggggctgcctggggctctggtcctttccaggagggacttgaggtgccgcantcttgggtcttcaagaagntggtatccaaactcccngatgacacttcnactgccaatgtggtggcttcncagggaaaaggcagatatnctcgtgccaat

SEQ ID NO: 58 - DNA, 427 bp, Homo sapiens
  Genbank Accession No. AA157506
ttttaaccatgttgctgatttattagcttacaaggaagctataggtgggtctaacagaatgaggaaggctggacattcagaaggggctcctcctgctggggaaagtacatgtcaaggccaatgggaaggttgcctagagaccaacatgtcattcattaactgggttaggctgaatgatcctcgacgcaaagggtatttctgattacacaagaaaaaagtaggggatgtaacaagtattgatcacttatggattggaccaggtgttttcaccttgcctcgttttcaggttgttcaggattgaatgtgttatcaaccttttttagagaggaaactaaaccccagagggatttgtcacttgcccaaagttgcccagatacccaaggtaaacgttcaatttcagctctgactgacttcaaccaatagctgt

SEQ ID NO: 59 - DNA, 614 bp, Homo sapiens
  Genbank Accession No. AA158234
  unsure (1)..(614): n = a or c or g or t
nggctgtgataggtttattcagaggaagcactagactctggggtagctcacatgggtaagaaagacttccaggagcaggcattgaagggttggcaccctgggtgagtgtccaaggtcagcgagagtcacttgtggaggggacggaagatgacctggctgatctggccagggatggtgtagaagaccaggaggaggaagacggtgagcagcaccagtagcagcagcaccagggtngcccagtaccggcncagatgaagaagacaaaggccttcagcgggttcacaaaccagttgaaggaagttttggggcggctgggtttctccagaaggctcttggctgcttccgccccttccccattggccgtttctcgggcttccttccacagtcaagcaagctcaaactcttgcctccaacnttgcccgtgaagaatgtacacattggcanccatgtctgtgaactcccangtctttttggccggccttcctcctcctctgctttcgcttcttcttgcaagcctgagcctcctgngcttccggtcaagtccttgctccttaagttnaataacggcaacagccctcaaggggggaagaaacagattgactcngccggcccat

SEQ ID NO: 60 - DNA, 580 bp, Homo sapiens
  Genbank Accession No. AA158249
  unsure (1)..(580): n = a or c or g or t
gtccaggcggctggacttaaactccaaggctcaagcaatcctgccccaccctcctgaatggctggtgttacaggcatgtgcactacactggctattgcagatatttgatcttaaaatgctggcacccgaaatcccgtaagtcacacagatcccgtgaatagcttggatttgtgctgcgggcctccatttgcagttcccaatttgggcattccaaacctggggagactggatgctggtgtcctcatctatccagacgggcgggtggatgtgccagatgctctcacctgctcagagaaggactcccaggacttgggccctaagactcaccgccagctcctgccccttgctgtccaggacacggctgctctcaggcactgtgtcatcctgattcagatggttctcgtgtgtggccagcaactcccagctctgctgcaggctcttctccaggcggttggcacatcaaccttctcctgggcaagtccagcagctgcaggangtgctcgtanttccggttggtgtcctccaccgggtcctcagnagggtgtggtgcantgcctgggaaggctggatgaagnttgcc

SEQ ID NO: 61 - DNA, 528 bp, Homo sapiens
  Genbank Accession No. AA160156
  unsure (1)..(528): n = a or c or g or t
gccttttaggtggaccgctctgtatgactctcatgcttcaaaactattttttattcaagtgacttacaatggccctaggaaacaagttctgttattatcccccattttaaaatgatgaaaatggacaaagcaaaagcaagcaacttaaccaataccccatggcctcacagcctttagaatagtcatattatataaatatggcaataacaatgcactgaaaatgtctccaaaacaaactctacattttaaaaaatgtataacaggaatctaaggaaggggtcttacttctctgattcagggagtgcgaaatcccttaaactcatatcagacctgtgatgaacaaactcacactaagttttaaaaactgcttaatttactttatcatgactagtaatatataagagttttgtatatactttattaaaaataactttggaaaactatttttgcctgatcagcaataaaactactgataaggataagctgggttatcaaatattccctagtggttaatcngggcnaataant

SEQ ID NO: 62 - DNA, 544 bp, Homo sapiens
  Genbank Accession No. AA160973
  unsure (1)..(544): n = a or c or g or t
tatagtataggtattcttaaaaaatttatttatagaaacagacatattcaaatgcaacactggacaaaaacaaagagaaaaagttggaatgccgatgacaacagagaatctcactttcactttccatttctctgaattagcaccattagttcagaaatcacagatgtaattataattgcttctaatatataanacaccttataaagatctgtaaactatctaatagcaaagttcttccaaaaacgcatttaaaaatcaatcagaatttaccatttgaaactgatgaaaatggtttaaaaatgaatccagttctacagcttgtcaaagggaatgagccataattagttttattgggaagaaagtgcctgaattcatcttctagcctccttctaaccaccaagcaggtacagcaaattgaatattactacagggaataagagtcntctaaaactgggtccttaggaaatattttcccaaacctataaaantactaaatgggcataccaaaatttcnggcatatacngccaatagnctacggcgggc

SEQ ID NO: 63 - DNA, 345 bp, Homo sapiens
  Genbank Accession No. AA161147
  unsure (1)..(345): n = a or c or g or t
gggctttcttttgtttaataagacgaaacagggtctccctctgtcgcccaggctggagtccagtggtgccatcatggctcacttcagcctcaacctcctgggcttgagcgatcctcctgcctcagcctcctgagtagctgggaccacaggtgcacacaaccacgcccagcggaagatgatgttctccaggtcgaaagggtactcgatgatgccggtggtgggcacgcggacccgnagcacgtcctgctgggtgggcaggtanccaaggntgggcgatgcggtcaacgtcgggtnagggtattactttggcagattcggaanagctnggtaactcgcgcntggggt

SEQ ID NO: 64 - DNA, 666 bp, Homo sapiens
  Genbank Accession No. AA161405
  unsure (1)..(666): n = a or c or g or t
acccagcggccgcagcgtgcgtcccgctcgagcgccagncncgcgcccgcncccccgatccgcttcccctttctccctcctcagttggccgagtcgtcncgcgcgcaccgcctccgcgcgcctatgagaatgaggtggtaacgggcccccggatgaccccgcgtcaccactgtgaggcctacagctctgccggggaggagnangaggatgaanangataagaacgtanctacatnaagctgngnancaagtcaacccaaangatatcatgaagtttccagggcctttggaaaaccagagattgtctttcctgttggaaaaggaatcactagggaagcacagatgtggaaagtgaatgtgcggaaaatggcttcaaatcagaatgtttctccatcccagagagatgaagtaattcaatngctggncaaactcnagtaccaattcaanctttacccagaaacatttgctctggtagcagtcttttggataggtttttagcaaccgtaaagctcatccaaatagttgagttgtttgcaatcantgtttttctagctgcaagantgttgaggaaatngagaattccntactaaggattgcaagagacanttcttggngtcccactgaatttggatgggggattnttgggnaattgatggggctcccccac

SEQ ID NO: 65 - DNA, 673 bp, Homo sapiens
  Genbank Accession No. AA166678
  unsure (1)..(673): n = a or c or g or t
gtggacttcttttaaacatttattaaaaaagcaaaatgtatgttcatctcaaatctaacagttaaaaatggtaaagcaatacaaacaatgtgttactagcagcatccagtcgttagaatctctcaccctgcttctcggtctgatctgtgcaagctcagtctcttctgagcctgcagctacctccatccctcatcgtagtgcaggccaaaccaaattttataaaattaacaatttaaggttaaataagcttaaataagggtgttaaatacaagacacttcatcaaagcttctgtacaaagataaacaaatctggcattgtacaagtggttccgctggctcacagcacacagggaagttctagtgagtaagcagattcactctcatttctttccagcagagaactatacaaaagtgaactaagagttgaagtgactactgaccactcggtgagccatttacaaggcatatgtatctttttttgtttttaatcagaacacgttaatattcaggcaccattgttcctgcaaataaataagtctnaaggtaacgcatctgaactagtgttaacacacagtgctttttttttttaatccccacaagctttccactatgaccagcnccttctatgcatggaatgngcgtgaataaatangtctccaaaatgggccttacc

SEQ ID NO: 66 - DNA, 710 bp, Homo sapiens
  Genbank Accession No. AA176945
  unsure (1)..(710): n = a or c or g or t
acnaggtggtcccgcgggccaggctggcagaggaggagctgctggcacagaggggttggtgagacaggatcaggagaccaggcaggcggagaaggaaaacatatcactgtgttcaagacctatatttccccatgggagcgagccatgggggttgacccccagcaaaaaatggaacttggcattgacctgctggcctatggggccaaagctgaacttcccaaatataagtccttcaacaggacggcaatgccctatggtggatatgagaaggcctccaaacgcatgaccttccagatgcccaagtttgacctggggcccttgctgagtgaacccctggtcctctacaaccaaaacctctccaacaggccttctttcaatcgaacccctattccctggctgagctctggggagcctgtagactacaacgtggatattggcatccccttggatggagaaacagaggagctgtgaggtgtttcctcctctgatttgcatcatttcccctctctggctccaatttggaganggaatgctgagcagatagccccattgttaatccagtatccctatggaatggaggaaaangagagatcaccttccatccttactccagtcccattcagcatcttctnaccantcagagntcctttaatgtcctatgacngtctttgattgtctcacataaancatactangaaganactcttttt

SEQ ID NO: 67 - DNA, 438 bp, Homo sapiens
  Genbank Accession No. AA180065
  unsure (1)..(438): n = a or c or g or t
ttttttttttttgcacatcctttggggggctttatttttgctaaaaagtagaattcacacaggcaaaaaaaaaaaaacacatgcaaaatatttttgtgcacacctttaacaggctacattccacttctgaaatgtttccaaaaacaaaacaaaaaatcccaangccagaatactgagttaaaaagttaacacattataaaagctaggttcctaacacaaacactgcagatataagctgcagatataagtcactccattgcaaaaagttgtgattataatttttttttttttttttttttgcaacggagtttcgctcctgttgcccaggctgggagtgcaatggcataaatctcgggctcactgggaacctccggcctccaggattcagggggatttccggnctaagcctncccaagtaggccnggaactaaanggggn

SEQ ID NO: 68 - DNA, 570 bp, Homo sapiens
  Genbank Accession No. AA190398
  unsure (1)..(570): n = a or c or g or t
ccatgtcagtctgagtagtggtcgatctggaccaaatcgtggtttgagagcttgctatcctggtgatgactgcagtctgggtaccagcacatgctgtggtgatgctggtttgtgttcccacctcactcacactcagccctggaatctcctctcctggctctgtttgagtggcagcgtcaatgggcctttctgctctggagctcgtccctgtggctgctgaagtagtctttcctcactaacaagtagangactcacaagtcatggggcntgcgctcttgccttggccctcttgcgggaatctctggggtcaangtccggccttcctgggaagtacttgacaagcctaagccagccgnattccgcagcaagggttgncccaagggtgaagctcccttggaactgtngggttttccggtttggtgaaggggatcaaaacttgtttggctggctcntggaaaatgaaaanaagaagttttngggcctaatngggcnttgganttgggaanaaagganttcggaaattcccgattcaaaagggttnaaccaanttggccaaaaagaatttccaag

SEQ ID NO: 69 - DNA, 585 bp, Homo sapiens
  Genbank Accession No. AA194980
  unsure (1)..(585): n = a or c or g or t
gttgaagcagtctgaattgactaaaacagtcacttggagtagttataaaccactttcctgttgaaagcagaacatgctgattcaactgttttgttcaatagcaatgatagattttgtttaagtcccctacactttcttatttctaaatgatcaagagtacacttcctggcagtgattaaggagtgtgtatctaacagaaaaaatatatataccctgtgaacccgaatatggaattcagattgtttctgccctcagtatcatacttaaaaaacaagcatacaaacaaacataagggaacaaacagcaaccataacaaaaacaaacctttaaaggtgggtttttgctgtgataaatgaatacggtactctgaaggagaaaaaagtttctcaaatgagcttaaactgcaagtgatttaaaaattagagaatataattcttaaagctattgaaagtttcaaccagaaaacctcaagtgaattttgtatgtaaatgaaatcttgaatgtaagttctgtgattccttaagcaaacaattagctgaaaacttggtattgttgtagtttatgtagnaagtgacctggcaccca

SEQ ID NO: 70 - DNA, 723 bp, Homo sapiens
  Genbank Accession No. AA195158
  unsure (1)..(723): n = a or c or g or t
ttcggcacaggatggaggagtatatgttggcctaccatctgaagctgtcaatatggtgtccagtcaaacaaagacggttcggaaaaattagaagaaaataacatcatgactcaagaatcaagagcttgctcattcagtttggaaggaatttggctccgtgggacgttgtaatgtgcacagacatttccaaggaaattctaaacagtcacccttcccttttgcattcccccaaatcttaagtgtatacataaaaccctgggtacatattgttgtggtaatagaagggaattggttaaacagtacacttgtttatggaactttctgtggccacctacgaaagacaagttaacaaactgtcatggaggctgttgttgcccagccagggncgctgcattttgacaacatttccaccctggccactcagcacatttcatggaggtcatgtcttttcactgatacttttttgatagtttttatataacaaaatccttattctatttataacttaagatgataaggcactataaattaatgacctaaaataatatatttgtctgttatcttttgctatttctacttcactttaatttttagccgtaaaattggtaaatggattcttacaactatctcnttccatttcctaccatttggttttcaatttcattaaatggtcagnatttcctttttanggacaaggngaatttccatggcaccatttaaaat

SEQ ID NO: 71 - DNA, 385 bp, Homo sapiens
  Genbank Accession No. AA195514
  unsure (1)..(385): n = a or c or g or t
ataatagcaagcatttattgaacgattactattacatgtattgaatcaagcaacactccaaggcagctgctatttactgaagaatacaagtgtattctttggtttgtggccctttcctctgtctttaggaagccaatagcatagcgtcttctgtctccaactctgctttcctctctgcttctgtcatcagggggctgcatcctgcttttctcttagaaggactcttgtgattacatcaagcctactctgataatccaggataatctcccaatctcaagagccttaatttaatcacatctacaaagtctcttttgccagnataataaaacatggacaggttccagggattagaatgtggacatcctggggggccattattcagcct

SEQ ID NO: 72 - DNA, 475 bp, Homo sapiens
  Genbank Accession No. AA195677
  unsure (1)..(475): n = a or c or g or t
ttaaagtacataaatttattatgatcctgtgctttgctcctggatagaagagaacttgagatgatggaaaatctcacagaagggtgaagggttccccagccagccttggggtggtgccgggttgatgttggccataggggtcatcaggagggttcagagtccctgggcccccatcagcacacgcatctcatgctgtccagaattctagaaggggacctgtgggcctcctcagggcagcggcagggtgggcctcagacaggtcacagaatgaagtgggcagttgagtgtgtgtttctctggcccccaaacaagccactcagcatcccagatctcaggtaacaccagcctctttctccaggcccacccagngaaggagaatccaggagtcatcgttcccctgatgttccattaggctgacactgcgacaaagcctgtcatccgaggtccgggctgagtcgcanttctggtttatcag

SEQ ID NO: 73 - DNA, 619 bp, Homo sapiens
  Genbank Accession No. AA195789
  unsure (1)..(619): n = a or c or g or t
gcacnccacngtccactgtcctctgcaggctgccccatggccgcctnggggaggagaagcttccccaggcagcagccaactttccacgtgctccccgcggcctcctgcctgcctggggaggaaaacctcatggcagggcggggctcagctccnagccagggggcattcactcagtgcctgctctgggctggaccccacccccgcaccccaaaggatcagatgtgacctgtcctccagggaccccaggctggcaggcagcagcctggccctacagcttggtaagtcctagggcagagggaagtggggcctcaggtcaggtgggcgtttgtcaggggggaagaagttggcagcccagacctgcagtaggaggggcaggaacaggggatactgcagatgggtgttcacaggggcaagaggccggaaactaggaaaagaagggaacctcatggaaggcagtttgtgaatatccgagaacttgaanttacnttcagatcattgtacaagggaatgttggcttcctccccgcaacngaatttgattcaaaatnccaagcggaattcgggccttgnaaagccagcttcgttttncccgaaaccagaagagttcccctgttaaganc

SEQ ID NO: 74 - DNA, 615 bp, Homo sapiens
  Genbank Accession No. AA195964
  unsure (1)..(615): n = a or c or g or t
ctcctcagatccatggtgggactgagctcttgtcagtcttcgatgctggtgaatctgtttctgttcctcaattagtctcttctctatacattctttggcaattctcaatgcctcttttaactttgtagggatcttaaactgtggtttttcagaagtggttagtaaaacatcgctgaataatggcatctgtaagagccgggagatggtaggcatgccatttttacaggcttcacaagacagcgtagactccaacacggccaccacagccatggacggggcaggagggaaggagtccacaggcaccgagtctggcggtcgtccataagtcatttcatacagtaagtggccaaagcagtggacatccacactttccaatgtattgattttcctgaattgtgaaaaataagatcggtagaaggaaggcaggcccaataaggaattctcaaggtccagcagccgacaagtgtncccatcgagcatcacattggangcgtgaagatgcccataanggaatnccttgtcatgaagaaacttcagtacctctaatatttgccgtccatatgtttttatngagctcaagtgatgtttcagacagaaaagtaactgtcaagaatt

SEQ ID NO: 75 - DNA, 511 bp, Homo sapiens
  Genbank Accession No. AA199881
  unsure (1)..(511): n = a or c or g or t
tattttttaaacagagtttattgtatttaatacattataaaatttgaaaaattgtaggaaagcagcagacttgaactggagcaattctaacaaggaataattctggccccttggcaaaactgatcagttttaaaacaaagtaaagttcacatctgtgaggtggacaaaaaagtgtgacttctgtacaaactacatttaaaatttcatgtctaacatctttgcaatgtgctcatgagggtttttctgaagtcctgcctggtccctgcctaaagaaagacgtggaacctccatatacaaacaaacttggattcaaggtgttttgtttgttttgnttttttaaaaaaaaagggaaaagaaagnccaaagggaaaaaaggaatatgggatggctgttggttggccatnggaaactggtaaggagactggtgtnctcaccactcctgggcctggnttatttggtccgaggccnccggangccccagggacacnttccgggcctttcanggcancca

SEQ ID NO: 76 - DNA, 889 bp, Homo sapiens
  Genbank Accession No. AA203147
  unsure (1)..(889): n = a or c or g or t
aggcgtgacaatcgtgcccagccttgttcttaattttgtatcatccagtcatcgctaatattacacgcaccttctcacttaatcctcacgacaagcctgtgaggcagatgctcattgttcccatcttgatgaaacttgagtctcagggaagtgaagtgacttgcccagggtcactcaggtagagttgagattcaaacccacatgtggctccaaagtctgcatctggatttgggggtgttttttggcatggcaccctcacctctctccctgcctgttttccccaaagtggaaaggaaggcctttcaaaccagagtgtctcactcccctctgacctccagaccagatggggcatgagcagccagctcagccaggctccctgtgtcctgggaggaagtgtccccatcccccatgccccttatggggagggagggcgtctgatgctctctctctgcctccccccccatcctgtcaggcacaggtgacgggggcagccatgcgagcccttctcctgctgctctgggagggcaagttcacattgagcaacctggtcctatgaaaatgatgccctggctttctgaggcttatctgatgctctgagttcatgtgccaacaaagctgancgtagggtggagaggcccggctgcatgtaatgtctacacttcctcctgtccacatcgtgtataattaggactaaataaaaaaaaagtctataggggagtatcctaggagtatagtgatgcgcgttaacggatgaactggtcgatatgttggacctttccaggaatgacgcgtcgctaacgtatgatccgtacgtcagttggtaggtatccagtntgtatcgtgctaaagcttgtttccatgcggcgacttcgttgtcactttcggatac

SEQ ID NO: 77 - DNA, 879 bp, Homo sapiens
  Genbank Accession No. AA203213
  unsure (1)..(879): n = a or c or g or t
agtacaggagcttgtgccgtggcccacagcccacagcccacagccatgggtgggacctgacggtgaagatgctggcgggcaacgaattccaggtgtccctgagcagctccatgtcggtgtcagagctgaaggcgcagatcacccagaagatcggcgtgcacgcgttccagcagcgtctggctgtccacccgagcggtgtggcgctgcaggacagggtcccccttgccagccagggcctgggccgagcagcacggtcctgctggtggtggacaaatgcgacgaacctctgaacatcctggtgaggaataacaagggccgcagcagcacctacgaggtgcggctgacgcagaccgtggcccacctgaagcagcaagtgagcgggctggagggtgtgcaggacgacctgttctggctgaccttcgaggggaagcccctggaggaccagctcccgcttggggagtacggcgtcaagcgcctgagcaccgtgttcatgaatctgcgcctgcgggaagcggcacagagcctgcgggcggactaagggcctccacagcatccgacaggatcagggcggaaataaggctgttgtaagagagaaaagagaaaaaaaagttcttgataacggcgaggctaatccgttgntaggtaatttacttgcatgccgctgtttaaatgtactggaactggcgtacaactatcgctgagaaccgttccgatggtatagaagccgccgtgcgtctaaatccatgatgcatgcgcctttgcgcttacgtgggagttgttcgggattacgcggtttttctttgaggccgaaaagcgttggtttcccaaaagggtgcctgattttgatagtcacaacttgtgtaaaaaatttggtttacc

SEQ ID NO: 78 - DNA, 576 bp, Homo sapiens
  Genbank Accession No. AA204719
  unsure (1)..(576): n = a or c or g or t
attttctagagtgatatatattttttgttctttttctttttttcttccaaaacaaacaattagagctctaggcccctcgccctccccacanccacccagaaccctcccatataatcgacaactgaaaacaagcgagacaatcacccccaaagaaatcacgaaacacaagcacaatttcacgacagccactgacaaagcaaaaaacttctactggaatgtccccttgcaggatcaggagaagcaggagcaagagtctacaaattgaaggggactgagaagtaggggagcagggggaggaacggaagcagagagtaagcttccatctgatgcttaggtgccatttgccccttcctttgcacgcgggactgtttcccagaagcgcgcgcacgaccagccacgcagatctgcatcaggcccatgaagcaggaggnaagccggccctgggnggtctnctttggcgctgggcnagagcgcaangccgggntctcngctggttcagaaccgacggattcgagaagccgnaaggttgcccnttgggcnttgtctccgtcanacaatntccgaaggcntggatcg

SEQ ID NO: 79 - DNA, 618 bp, Homo sapiens
  Genbank Accession No. AA205598
  unsure (1)..(618): n = a or c or g or t
ttttaaatttttaaataaattttttattacaatgacaggaagactctggatacaaacacatttgctaatataatcactccactggttacctaggcctagacgtacaaaaggacacccatatctcatcaggagaaagacaattttgagtttctgggtgtagtaccaagtggttatgatcaccacgtacgtgtcatatccagttaactgtgtggcaatttgctatttcaagtcctctcataacagaaattactgaaatatgtggaacaccagtcaatataaagaattcatttttaaacagactagtgaatttgtgtcataaacacacttgcgtatggatattaggagagcattgcttgaatatctctaaaactatttttaggaattaaaagctttcatagttaatggtatgatattggccttcagaattcatattgataaaagcaaaccttagtcatttaacaggaatgtttaaattttagagattctaacatgcgatgccgaaaaatcctaacatttccacttagtaatgtcaggggtgtgccagttccaatttcccatagcnagtacntccggaaaatatttatccgnggttccatatgggttcnttagnccggtnaa

SEQ ID NO: 80 - DNA, 528 bp, Homo sapiens
  Genbank Accession No. AA205873
  unsure (1)..(528): n = a or c or g or t
tttttttttttttttttttggggtcagacaagcaaccttgtatttctcagtcttggcttaccagtgctgctgactttgccgtgagcattttactcctcattctcccatcctggtcccctcagtatcctccctaaaaggtggaacagcactgagctgacctttccccccaaaccccaggcctcacttctgcctccgaagccctctgctgccccagtaagggacagtagggctgcacgctgcctctcagctgcctgcacaggtgtggccagagagcaggactggagggttccttctggtaccttcttgaagggctcccaatgccaagctcctttccttcccaccttcacatcactgaggatgagaagaggtgtggaatgagtggggatcagctggggcagcggggcccgagtggctgtgtcctgggtgacaccagagcactggaaccttgcactgtccaaggaaacccgaaagaggncctgcagccttgtccctacttccaagggtcttctcagagtggcctgggntcct

SEQ ID NO: 81 - DNA, 588 bp, Homo sapiens
  Genbank Accession No. AA210905
  unsure (1)..(588): n = a or c or g or t
ccatcactgcagctccaggcaccattggcctcagtgctcctcaaagcatcaagtatgcacttgccttggacagtctgtacttggtattccctctgccttgaatgttgttctcccagaaaaatgcatagttcactcttacatccttaaggtgtcactccactgttacctgagcaggtcgtccttgaatatatacatcagcattccctttcccccctgctttatgtatgtccatagcactcaccacgatctgactttactaagtatttattcatttactgtttgttttcccataccgaaatataaactttctaaggacagaaatttttgtgctttattgttgaatctccaatttgtagaaaaatgcctaccttatattaaacactcagtaaatgtttattgaacattaaaagtattactaatagaactttgggtttttgaaagaaataataactttaattataagacgtatatgatttttgcagttttacttagtggtgacattgggtttatgagaatcgtgtacattcaagtccaggaatattaatgggcancaaatggttgaaaaggaaataatccagtggcaaatgt

SEQ ID NO: 82 - DNA, 544 bp, Homo sapiens
  Genbank Accession No. AA213912
  unsure (1)..(544): n = a or c or g or t
tttttttgagatggagtctcactccatcgcccaggctggagtgcagtggcatgatctctgctcactgcaacctctgcttcctgggttcaagtgattcacttgcctcagcctcccaagtagctgggattacaggtgcccaccacacctggctaaatttnttgtattttcagtagagacaaggtttcaccatgttggccagggtggtctcaaactcctgacctcaagtgatccacccacctcagcctctcaaaatgctgggattacaggaattaagtaattttcatgcagcttcttctctccagagtgagttcattcatgtctttaaagtgaactggaacaaatgagagctttcccacatttattanatgggacagtttctcantagtgaaattngttcatgtcttcgaagtgaacggggatgactgtaagcttncccgcattgctgacattaanagggtttccctncgtgtgagttttttcatgaattctaaaggaactgggaancgtgaaggctttaccaaactccntcgggcggaatttcctg

SEQ ID NO: 83 - DNA, 569 bp, Homo sapiens
  Genbank Accession No. AA216639
  unsure (1)..(560): n = a or c or g or t
gtgtgagcaacatggctgtttatttcacctgggtgcaggcgggctgagtccgaaaagagagtcagcaaagggagataagggtggggccgttttataggatttgggtaggtaaaggaaaattacagtcaaagggggtttgttctctggcgggcaggagtggggggtcgcaaggtgctcagtgggggtgctttttgagccaggatgagccaggtaaaggactttcacaaggtaacctcatcacttaaagcaaggaccggccatttacacttcttttgtggtggaatgtcatcagttaaggcggggcagggcatattcacttcttttgtgattcttcagttcttcaggccatctgggcatatacctgcaagtcacaggggatgcgatggcttggcttgggctcagaggcctgacattcctgccttcttatattaataagaaaaataaaacaaaatggtgttgaagtgttggggcggcnaaaatttttggagggtgacatggagaganaatgggcgattttcccagggctgcttcaaccgggattagggtggcgtgganccaaaatgggaaaa

SEQ ID NO: 84 - DNA, 460 bp, Homo sapiens
  Genbank Accession No. AA218643
  unsure (1)..(460): n = a or c or g or t
gaaggatttgttgagtagcttcancacttcttcctttgtcatttttttctgtctgataagtcatgccatggacgttacccatttttatcccagaggcctcttacgttgacttgaaaagacggactatgtctttcagagatcttgtgggtatcacatcaatcttgacaaattttctaccctccaagtcatgatcctaagaacagcttgcctcccatttctccggtttgtgctattatgaaggccttattgtttcagccttcttcaatcttgagggttgttgtcactgtatgggtggttcagaaataagtaggtcctgttactatgaagggggtcacagcttttgttggcatagctaaactttgtggctcatggaacagtatgaatgcagaatgtagccttccccacttgtggactgccttgcatagctgccagaggctccagagaagacctcagggcnttg

SEQ ID NO: 85 - DNA, 492 bp, Homo sapiens
  Genbank Accession No. AA223148
  unsure (1)..(492): n = a or c or g or t
tttttctttctacaacaatgagaatatttattttttccagaaagtaaaaataacattttttctcttttgtaaaagtaccattacattccattttcttaaataacaaaaccctaaaaatatatattaaattgtatacagtgcgtcacacttcatcttatattttaaaatacatgatgtttctattttattctcaaagttgcatattaagagcatatttacaaataaagccttgtcatccaaagtcaaaatccctgctggaagctgagtttggatgtgggaaggtcttgacgtgcatgagacccacgatggcagctcccgtgcgggcggggaagggcctccagtctttgtgtctaangacccttcctttctgaagcagatttccctctgactttcctccacaccccacttctgcctccgtacccaactcagcaagacggaagcctgtgagatgtgcccaccaggggtctgcaggcagagggtgaagccctgtca

SEQ ID NO: 86 - DNA, 452 bp, Homo sapiens
  Genbank Accession No. AA224174
  unsure (1)..(452): n = a or c or g or t
gggactgggctgctggcgctgcggacnatgccagggcccagctgggtgcgaggctcgggcccttccgtgctgagccgcctgcaggacgcggccgtggtgcgcatggcttcctgagcacggcagaggaggagacgctgagccgagaactggagcccgagctgcgccgccgccgctacgaatacgatcactgggacgcggccatccacggcttccgagagacagagaagtcgcgctggtcagaagccagccgggccatccttgcagcgcgtgcaggcggccgctttttgggccccggcagacccttgctctcctccgtgcacgttgcttggaacttggaaaccccgcggttaacaatnaaagcccccacgttggacagcattaaagttnttgcgggggcaacattcgcccgggcttgtcttcttcttgtnttcccagcgttaatgcggcttggt

SEQ ID NO: 87 - DNA, 455 bp, Homo sapiens
  Genbank Accession No. AA224245
  unsure (1)..(455): n = a or c or g or t
ttttttttttttcctatgaagagacctgtttattactgataacacttcatttggctaaaaccacaagaaatccacacacaaatacataaagtgcaaattctcacaggcagtacttataatacaccctggtgtttttgtagggaaaaatgagaagatgttgacagaaactgttaaaacaagggcacaattttgaactactgctacacactttagtcagaaaaataattcattcttgactgcatatattttacctggcatattcaatgaggcatacaaagagtttattctagcctagaacaacaaggcctcaccatacatagaagcagagtcttgcttgagtggctcttgtaagatacatgatgaatcctaacagtgggacaaaaacataccaaataggatcaaatttgttgtgactcacttggaaggtagtgctactaggctcaaaatggncactt

SEQ ID NO: 88 - DNA, 420 bp, Homo sapiens
  Genbank Accession No. AA224344
  unsure (1)..(420): n = a or c or g or t
ttttttttttttttttttttttttttttttttaacgaaaagcaaacttctttattgtacacngtacagaatanaacgcagcttggcaggnngcatacggccctgcgcaggggaangtatttcaaatcngctggcaggttcaagcctttctgcnctgnagactttccacactctggaaaagaagcaaacaaacaaaccccaaagaacccccgnaaaaaacaaaaaccatccgggaggtgcatgagtccaatgggaatgcaaccgtgangccgctntcctatgcccagtgacagcacaggtccccgtaagttacagcnaggggaggggtagctcaagctacagaggnttattgtcatattgctaagacagcctaaatccnttaaaaaaaaaaaaaaaaaaaatcccaanccccggggtaagt

SEQ ID NO: 89 - DNA, 447 bp, Homo sapiens
  Genbank Accession No. AA224832
  unsure (1)..(438): n = a or c or g or t
agcaggccancatactactactaanttcgcggccngtcngactctgtcccgctgcgtgttctcctctcagatcggggactcctgcttctccttgccantaaatggaccccaactgctcctgctcgcctgttggctcctgtgcctgtgccggctcctgcaaatgcaaagagtgcaaatgcacctcctgcaagaagagctgctgctcctgctgccctgtgngtgctgccaagtgtgcccagggctgcatctgcaaagggacgtcagacaaagtgcagctgctgtgcctgattgccaggacagctgtgctnctcagatgtaaataagagcaacctatataaacctggatttttttttttttttttttttgtacaaccctgacccgtttggcaaatctttttttctatgaaatatgtgaatgggcaataaattcatctagactaaaaaaaa

SEQ ID NO: 90 - DNA, 316 bp, Homo sapiens
  Genbank Accession No. AA234670
cttcaatttccatctttaagaagaaactcaagggtcagagtcaacaagatgaccgcaatccccttgtgagtgactaaaaaccccactgtgcctaggacttgaggtccctgtttgagctcaaggctgccgtggtcaacctctcctgtggttcttctctgacagactcttcccctcctctccctctgcctcggcctcttcggggaaacctcctcctacagactaggaagaggcaccctgctgccagggcaggcagagctggagttcctcctgcttcatcgattgcacttaggagagagactcaaagccctgggggccg

SEQ ID NO: 91 - DNA, 399 bp, Homo sapiens
  Genbank Accession No. AA252082
tggtgaaaacattaacattctctactgcaaaattattttaaattcttgaaacgattatgttgtagtttacatgtttctagatcattggaaacccacatccaatgctagttttcaaaacgagttttttaaaaaaaagttaatagaggaatgcaagtccttaacaacagcaaagttcaaataagcatatagtaccttcactatattttactttattgttaattaactgcatttttaaaagtagagattggtcttctcttatgtatacttatatccctctaaatttaaatccatcttgccatgttttgtatttaacttgaagtgatctaattaatgagaaaaagaggtattttaaaattaaggtgcatccaaaagggaagcatgaggatacagagagatctg

SEQ ID NO: 92 - DNA, 406 bp, Homo sapiens
  Genbank Accession No. AA255965
gcgcgcgcactcacagcagcgagcaacaggaacctgcccaaaggcctgtcaactgcagaacaagcaattcagctgcagctcatcatgcatggcactgccccactgcacgagagccagggcacccaaacacacaacagggaaggagctcacaagcagagtgttgagcaacagaggtcagacataaaaggagatgctgtatgctatatcaagtgaaaacagagacaaaactcatctacagggttagaagccaggacaactttaccctcagaagggaggatactggctaacagaggggatgtgggtactgggaaggtcctgctcctgggtctgggcactgaggaaggatatccattggccacacactcaggatctgtatgtacacttgtctatacgcatgttacatgtc

SEQ ID NO: 93 - DNA, 445 bp, Homo sapiens
  Genbank Accession No. AA279019
tttaggacaaagcaaggagacagccacagaagagatgacactgtggtgaaattttccgagagaaaggagaagagctagtgtcacagagcaggagggtgttttaagaagaagaggcagatttgaaaggtgtcaggaaacttcaaatgaggtgagttcccagtaaaggccattaggtttgggatttaggactttgatggccgccctagagagaccaatggatgatgagttcacggtcctctttgactcaaagcccggtatacattcccattttattaaatactatggatattgtaatttcttacctcctggaatgcaaaaattgggctgcttttgtttttttcacactcagaaatattgctatcagatgaaaaagtgtagttgccagtttcttcccatattctccgataaacatattgcgttgtcagtggaccggtcaaagtcatag

SEQ ID NO: 94 - DNA, 454 bp, Homo sapiens
  Genbank Accession No. AA281967
  unsure (1)..(454): n = a or c or g or t
acataattttcagttaactttaaatacaagatacacatgtgttaaattattactaatctaccagattattgcttaacttgttgaatacctataatctctgctttttctgaaagctggcatttattaaacatgtggagttttcacatgttcctggcattatttataatttgaggtgtttcaccgacatcagagtaatacattgcttactctccactgatttgtacactggaaaaatgttgtttgctgcagtgtagtagctacatatcattctttagtcctttacatgcagaccaaagaaatgaaaactggctgggcantggtggcttatgccgtataatcccaacatgttggggaggctggaggttgggccggatcacttggagcccaggagttttgagaccagccctggccaacatggcgaaaccccgtttctactaaaaaataccaaaaatta

SEQ ID NO: 95 - DNA, 427 bp, Homo sapiens
  Genbank Accession No. AA282171
  unsure (1)..(427): n = a or c or g or t
tttttttttaaagataaacatacttcattttgacaagttcaatcagaaaattaaatgttccaaaatacataggtacctaatataatttcaagaaatataaaagcaatacccagagattcgagtgagacacagacaaacccataatctttgtcagaaatggaatttcacctgtcactcgctgatttaaccttcacttcttccctgacccacacccagaaccaggcaccctccagagctggcccatctcccctccagcccctgcctccctgcccggcaacaccccgggagctccagcangtctctggccgctccaagcgctctgagggcaccagcctgtcccactctggccatttcaatgccgctcggacagagcctggtgggttcgtaagccagtgcatacccccaccctgcacgtgctctcccgggt

SEQ ID NO: 96 - DNA, 546 bp, Homo sapiens
  Genbank Accession No. AA284232
ggggatcagtgtccacacttaaaagttgtatgtgtttaaaaaacaacaacagtaatgtgcaaggtgaaatgcttttggataaacgtaagcctattttctgacgtttcttaatgcaaactctttgccttaaatggtagaatatttagaaatttgcacaaaattaaaaaaataaacattgtcttggagggttaaaaaatagaaaggtgtatgtgtatagattcacatacacatatgtatatacaggctgacttgatctagaacattaaatccgccctgcaagttaaccccccattgcaatggttgccttaaggtgtttgctagttgtgtacatagtgtggttaatcattagctacactgcttcccacttgattagagcaatgggaagcatactgtggcctaccagcatctggaagtgtgtgctcgatctgtatgtgtgcagaggtggtgtggatgtgagcgtgcatgaaggaaaaaaagctgctactcccagtaggcccaacgctcaggtttaaacaactgacgagtgttactgtagggtgttttttt

SEQ ID NO: 97 - DNA, 547 bp, Homo sapiens
  Genbank Accession No. AA305101
  unsure (1)..(547): n = a or c or g or t
gaggagcaaagctgccttccaagtgcctgtntgtgcctgggagaacagagcaggagcgtcgtgcggtccaccgcgcagtgcatggcgattccaagcgctgaacaactcccctggacccttgggcctgcatctgactcccagctgcagagtcagaagctgagtccaggcaactgcttggccactcccgatcgctcctccctggacacccggttaccaaagtcagcaaagaagatgcggtaatcgccgcctgatctccacatggtgaacacaacactcccaccaacacctccttgactggtcggtcttcagcaccgggggtgggcaggcaggtgttctgtgttgacgagaattgcacaggctaaacacaaacacggaaccagagtgagaacacctcactcacggnagcccaggctgctccctaccaggtgacggagcgcgccggggctgtgggtgccaggggtgagtgtagggactcgtcatgagtggggatccccacgttcctgtcactgctgtcaaacagaaggtaaacagtcttatgaatgtattt

SEQ ID NO: 98 - DNA, 455 bp, Homo sapiens
  Genbank Accession No. AA312110
tgtacttcacctgtccgctcactggggccaccctgaggaaggaccagcgggacgcctgcatcaagaaggccattctcttgcacttctccaccgacccagtggccgcctccatcatgaagatctacacgttcaacaaagaccaggaccgggtgaagctgggtgtggacaccattgccaagtacctggacaacatccacctgcaccccgaggaggagaagtaccggaagatcaagctgcagaacaaggtgtttcaggagcgcattaactgcctggaagggacccacgagttttttgaggccattgggttccagaaggtgttgcttcccgcccaggatcaggaggaccccgaggagttctacgtgctgagcgagaccaccttggcccagccccagagcctggagaggcacaaggaacagctgctggctgcggagccgtgcgcggcaagcttggacagg

SEQ ID NO: 99 - DNA, 599 bp, Homo sapiens
  Genbank Accession No. AA313781
  unsure (1)..(599): n = a or c or g or t
gtcaagcgggcgctcccccatctccgccgctattaccactgaacccggaccccctgnccaggtccagggccagccgccatgacgaacgtgtactccttggatgggattctggtgtttggtttgctctttgtttgcacctgtgcctacttcaagaaagtacctcgtctcaaaacctggctgctatcagagaagaagggtgtttggggtgtgttttacaaagccgctgtgattggaaccaggctgcatgctgctgtggcaattgcttgtgttgtaatggccttttacgtcctgtttataaaatgaattccaaagcacccaagtcatcaactgccaaccaaggggacggggatgaagaacctgttggagacctgaacccagtgtaggagagttcagctgaaatcatcggtccccaggatgacaccacagcatctgcccctgctatatgtggggaaaactcatggtcacgnacattatttatgcttcaggggactacagaaagccagcttcctttgatctatgtgtaaatcagtccttggcagagtgcatataatgtccggataaattacaaccctcggtgataaggttacatacctccttca

SEQ ID NO: 100 - DNA, 574 bp, Homo sapiens
  Genbank Accession No. AA314825
  unsure (1)..(574): n = a or c or g or t
cgcctttggagcagagaggaggcaatggccaccatggagaacaaggtgatctgcgccctggtcctggtgtccatgctggccctcggcaccctggccgaggcccagacagagacgtgtacagtggccccccgtgaaagacagaattgtggttttcctggtgtcacgccctcccagtgtgcaaataagggctgctgtttcgacgacaccgttcgtggggtcccctggtgcttctatcctaataccatcgacgtccctccagaagaggagtgtgaattttagacacttctgcagggatctgcctgcatcctgacgcggtgccgtccccagcacggtgattagtcccagagctcggctgccacctccaccggacacctcagacacgcttctgcagctgtgcctcggctcacaacacagattgactgcttctgacttttgactactncaaaatttgggcttaaaaaattaaaaaggaggatcggatattaaaaaaannanaannnaaaaaaaacctcggaggggggggggncccggttancccaatttnggccctatnaggnngnncgnanttacaann

SEQ ID NO: 101 - DNA, 415 bp, Homo sapiens
  Genbank Accession No. AA351682
  unsure (1)..(415): n = a or c or g or t
caggggagatagtttattgtcgccagtagacccaaacaataagacaaattgcaaaagaaactcagtctgctcccaaaagcagatacatcccagcagtcgagtcacagagggccatctcagtttctntccccttccaaccaccccttccaacctctntatagcacacacaaccaagaaagtgcatatgtagttgggttttcccctccaagtgcacaaagcgcaagancattccaaaatttgcctttggtgantcaactcaaaacactgagaagttattacacctccccacacacacacagtgtaactttttggggtgggtgtggtgagatgtttgatatttgtatatataatatatctatacctagagagagagactttgtacagtgcatcagcaagctttcaataaaggtagacg

SEQ ID NO: 102 - DNA, 374 bp, Homo sapiens
  Genbank Accession No. AA367838
  unsure (1)..(374): n = a or c or g or t
gctcaatgcccggctggagaagaaactgaatgccaaaggtgtgcgcaccctctcccgctgccgctggaagaagttcttctgcttcgtttgagcagctatggctgcatagcaagtagtaggcaggaggccaaagacttctgagacctggggcacccgggcctttgcggcantactggcagggnctggccacctcataggactcagttcccttctgaacactcgggggacatgggnctctaactgnccactctggatatgcctgggtgagcctaggagggaaggctctgatttggatttntccagtcaaagctnacagaaaaaaacctggnactttgattttcatgggatggtcctaacaggggtcagtcacctcc

SEQ ID NO: 103 - DNA, 429 bp, Homo sapiens
  Genbank Accession No. AA397625
cctgcgggcgcgctgccagcccgagggcccgcgtccaggggtcccctgacatgtcacacttgcggactgaagctgcgacgtacggagaacccggccaggtcacggacggagcgtggactcgggttctctgggccccagccccactccgcccccagcgaatccaaggtcccctgtagggaagggccgtccacactccccatcccttactggctgcatccactgaagcccagacctgctgcctgcaggacctcacccaggcaccaggtcgtgcctggcgcctccttgatgccaggccctggggagacctgtggccacagaacccatgttctccctggagatggacaggaggcccctctcctacgcagaagctgtcgttttttcttcttaaacaccgtttgcccctccctccacccaccgagccatctctgc

SEQ ID NO: 104 - DNA, 467 bp, Homo sapiens
  Genbank Accession No. AA398628
tttttattttttttttatgttttcaggttgctttatttccaaaatttgctcttgggaatcaaaaaggaagggctgaggtggtatattacagcagagatggaaatgcagtgggagggagagtgagaccaccgaagaccaccccgcggcaggggaactggaggaggtggcctgggcggggctcctgctggatgagctgttggggaaaccacagctggcactgaaagcctgcctagcttcgccctacgtagctcctgggggcgacacctgacagccgtggaggcaggcagtgccgggaacaggctggaattggctggagcctcaaatgctgctccacgttctgccctttgccttggcttgctacccacagttgtcatcctgaattttccaacagggaattcctttcctgtgtttagatatgatgctgagccttctcagaactgtcctggtagacattctttcccgggcaa

SEQ ID NO: 105 - DNA, 553 bp, Homo sapiens
  Genbank Accession No. AA399630
  unsure (1)..(553): n = a or c or g or t
tttaaaggtcaccgggctttttattgcagttgaagcagactcggacgggatggtcccagccacgagaaggaacagcccggcggtcatgggagcactcatcacagaagccctgtccgcagcccggcagtggtgcttggagagcttgatgctgaactccttccggcagttgtggcagtggaggatttcgtggtcaggcacccagtacgcaggcctggcncgcgtcctttaccagacctagtggtatgtcaatggctgtcaccacggctcccagagtgttctgcacggcctcgcccaccttccgagcaatgagtgttccaccttcatcgtccacttgtgcctcggtaacagctaactggacgttcctggcttcgtagcagttgtcacagacccgcactggcgcagggccccagacccgctcaggcactggccgagtctttgatgaacagctgtcacagaagccctccccacaggctcggcagtgatgcttagtgtcgttatctttaaaggacgtcgcacacttgttgcagctcagaatctgggagttgggcctcca

SEQ ID NO: 106 - DNA, 543 bp, Homo sapiens
  Genbank Accession No. AA401302
tttttttttttcatgtttcatagttttattgagtctttttcagttttaactgtccatggtaagtacagttctagtgaccacaattatgaagctctgctcgtactaaaaatagcagatacaaagttggctgccatgccttacacacactaagacacacacacacacacacacacacacacacacacaaggttttgcatactcttacatgcaaacagtactatgctattataggaaatgtactttccttttattaaaaatacaattacacacaattagtctgggttttgttaagctaccactgatttagataaacctgagaaagctcaaaatatcaagtaacactgtttccatactgctcattcaatggcactatcactcaaaaagaaatctagttcaatcatctatattaaaatcacagataatataaaaataaacattttttgcaatagcactaaaacatactataattcaaattcacaaattttgatatgtaacatatattcaccttcatattaatttgtgattatgtgtataataccatgt

SEQ ID NO: 107 - DNA, 519 bp, Homo sapiens
  Genbank Accession No. AA401397
ttttttacatttctcaacttttattgtgggcccttcaaccatttttgctgctgggtttcatattttcggattgtttcacggatccacaggacgtatcttgagacacgggtgtagacaccaggccggtcaggttgcccacatgggaagtctccccaggagagaatgccatacagtgttctgttacagaccagggggcccccagagtcaccctcacaggagtctttgccaccctcttttgtgccggcacacaacatgttgtcagtgatctttcctgggtagacttgacgacactcctcatctgagcgaagttggatgttggcacaattgtagagttttggggtaattcactcagaccttccctcccatctctgcccctgtttccccagccactcctatggggcctcaggcacctgtgtgggtgcatacctgggggctggtggtggtgcccagccagacacccgacagtggtgccaggggttaggcggttgttgtgggaaaggggcagggtttggatgtagc

SEQ ID NO: 108 - DNA, 540 bp, Homo sapiens
  Genbank Accession No. AA402161
gtgagcggccgctcgaccccgtgacaccctgcccagacaccctgcttggactggggtggcctctgctacccaggggtctggcacaggggagggctggggctttctctgcctggtacacacggaaaggcggctgtgcggacgcagggtcaccgtgctccgggttttctgacagtcggtgtttcctgggcctttggagtggctgcgaggctgaacgccttgtggatccgctgtgtccagcccggctgagcatcgccagggctagctcatgctgctcttgtcagcctctggttctcctcgagtccttggggatgtggcagatgcagcgaccatcagacaacgtggaggccctcatgggagatggctgagggggccgggctgaggctgtgcacatgcagtctgcacgccactcttgggctctgctggcggagatccccttccttctgggtgcagactgcacatccggatgcagttttgatgtccatcttccaggagagagacggtctcgggtccagggagtggagggggctgcccctgccgtgc

SEQ ID NO: 109 - DNA, 557 bp, Homo sapiens
  Genbank Accession No. AA403227
atggatttaaaagttggatgacatccattgttggggccttgggggatatggtaaagcatgaaaactaaacagctaggagcctgtgaaatctgctactgtattttccaggacttcattccactccttggctaaaaaaatcttggaagtttcacagattatgatgtggacctgtcacctgtaaattgtctcaatctactcagacaagacactaaactgtctttggatactatagatgtcagtgcttatagcagctggaatttggctagtgacaatgtttaaagatgtaatactagttagtatctattgaagcttaaactttgctggtcaggttgtagctattgtaaaagtatttattgaagaagctcacagtccttcagttgtacagactgaaaaactttcatgaaagatcccacatactaatgtagattatatttattacaatgtatgatattaatgtgtcaaactggtgtattttacaaaatatataatgcatacataaataagagttgtatattacagtgcttttcaaatatcagtgtcttggaatatttaagtct

SEQ ID NO: 110 - DNA, 509 bp, Homo sapiens
  Genbank Accession No. AA406400
ttcggcagccggggaggtgtaccttgtcggcctgcctagagcccacacctggcggcggagggacgggcctggggagcgggctgaccacacgtaactgtcatgccagggtgtgaagacacagaacatcagttcaaacctcagaggaaagagaaggctctctagcatggagagcgtggcattactgggaggccctctgcgcacgaatgatcagaaaaggggcgttttgctggcagggacaagggccagaagaaaaagtctacagaaaaatgctaagagttagtgttcgtgcctctgacttcagttcccaaagaaaaaacaaacaaacaaacaaacaaaaaacacagaaatttgagggactcatctttgcccaatcttgttaatgccatttgatgggaaagaaaaaattcaaatgtgtctcagagtcaagggctgggcttcaaatgctgatagctctcagtctgtctgtctacacaccccaggtagcaaagtcttcatcaagcatcttcact

SEQ ID NO: 111 - DNA, 484 bp, Homo sapiens
  Genbank Accession No. AA410788
aaacatccgattttatttacaaagcattaaagcttcagcaagaagtacccaaggctaagtctcatcttgtacaaaactacagattttttttttttttttttttgagatggagtcttgctctgtcacccaggctggagtgcagtggcgcaatctcagctcactgcaacctctgcctcctggattcaagcaattctcctgcctcagcctcccgagtagctaggattacaggtgcccgccaccacgcccagctaatttttgtatttttagtagagacggggtttcaccatgttgaccaggctggtctcaaacacctgacctcagatgatccaccagcctcggcctccccaagtgctgggattacaggtgtgagccaccatgcccagcccagaatatttttaaaaacaaaattttgggggtggcagggcagggatgacaaaaaggaagaagagaatatacatatattgtacaaatcaaataattcaga

SEQ ID NO: 112 - DNA, 490 bp, Homo sapiens
  Genbank Accession No. AA417643
gcttctccctcggcactgcacttctgggttgggtcagacgtgcactacacatcccaactgtctgcaacagttttgggcgtattaaaagcacatgtttgaaattcacactctcaaccacctactgggcgcagtttgacaatctaggaaaagtggaacaaagaatgattttgaaagctccacccaaagacctaatatcaaaagagttggcatggtttggcttctgataaatgcactcaaagcttctgcagatagaaagaccagcagcgaaaaagctggccacacactgtcactcatcttcatacacacttggatccccgccagccagagagctacaagaacaaatggcctcagtgacctacactctcttttctcaaaaaatattccacaatttatgaaaaaagcatgctataaggaagatccatgtagacacgataaaatgattagattgggaaggtgtgttgataccttgtgtcactgagtacagatatta

SEQ ID NO: 113 - DNA, 585 bp, Homo sapiens
  Genbank Accession No. AA418063
gattcactgtcaatgctgggttgctcccgagccctagatgttcctggaagttggccccctttatgaaaaccacttcccacagccagtgggaactgccagaggaagatctggcgtctcatggctcccaggaaagtgctgtgccctatccccactgataccatctgattccccgatgcctgtgcctgttccacctggacggtggccccctcagcctggcagcctctggacagagaggaaggaaggattggaaaagtccccggagcacagcgacgtgtggaagatgccttacgtctgatcttgatgggggcactggcctggagcctgggcccacctgcttctggggggttggggagcaggccagatggaggtggtggtgccaggaagaaatggagcgatgactgactgtggggtgggcccaggatttccgcatcttggtgaagttgcccctgggaagggcagctgggggcagtggcgccagttcccttccatggtctcccggctggcaatgtggtgaagctgagtttctgtccaatgagcaggaagattctgagacatttcgcctgagatataagttgtactgcgtat

SEQ ID NO: 114 - DNA, 543 bp, Homo sapiens
  Genbank Accession No. AA418080
tacatgtatattatttattgttgattctatacaccaaatggattacaagcagcatccagcagaagacagaccccccaaccctgcccaccaggcgtcacactctacaaaaccctgagggcctagaaatctgtaaatgcatcgccaagcactggggctgatttgcagtaattctctaagcaaggcaaacatgatctagctttgaaggcagcatgaaggcagcgggttggtgagaacaatctctccttaagagaagaagaaacctggggcggaaggagttttccccggaagtggcttgcagcccaccctctctgaaccacagccatggcttccttcccaaggccactgctggcttcccaacaacgcagattcagttctgactgtgggatctgggggctgaatctttgagtggtttatagctaaaagctaggatacatctaacatctgtcgaccaactctgggtcccgagttatctctagctgtctgctctctgcaaacttcctgagtttggaagttctttcccaatagctctacatcagcatctga

SEQ ID NO: 115 - DNA, 543 bp, Homo sapiens
  Genbank Accession No. AA418402
ggactccatatgactttattttctggggtggaggagaaagcgagccacctcagctgcctcatcatgcaaaaggtagagattagaccccaggaaggacttcctttggcttagggcatccttctccctgcagtcaccagcagggggcgccacaggcagcctgtgggacccactatctgagaacggggttgtcacccaggagtgagtgaaggtctggccagcactgagggctctggggtgcagagaagttaggagatccatcaaagcagccagaccacctggtgtggaggcggcacacactctgccagtccggacacgggttagggagtggcatcacattccgccgagtcattgcctgcgaagactaacgtcacctctgatgtcagggctccaaggggcttcgttccagctccaggctccaggaaagggcgtcgcagggcccagaggttacacaacttcccccaagatcgctgtggaaatgactggcagagcagggattcaaacccaggtccctgtggtggcctctgcccagccgcctgcagggtc

SEQ ID NO: 116 - DNA, 423 bp, Homo sapiens
  Genbank Accession No. AA419233
tgtttttttttttttttttttttttttttttgtttttttttttttttaatgttctggaagaatcaggatagacattacctcaggtgaaggaaggcaggagatgggatggtaaaggaattcattggggaaaacaggttatcaatgttccagttcttgtgtcagattgctgactccacagatttttattatgttatgtaaaaataaatacacacagggccaggcatggtggctcacacctgtatcccagcactttgggaggctgtggtgggaaaatcgcttgagcccaggagttcaagaccagcctaggaaacatagtgagaacctgcctctacaaaaaaaatttttcgaaattagccagccatggtggcatgcatctgtagtcctaactacttgggaggctgaggcaggaggatcacttgggcc

SEQ ID NO: 117 - DNA, 456 bp, Homo sapiens
  Genbank Accession No. AA419260
aatgaataaagaggtttaattgactcacagtcccgcaagctatacaggaagcatggctgggaggcctcaggaaactgacaatcatggtggaaggtgaaggagaaggaggcatatcttacatggccggagaaagaggaagagagcagaaggggagggggaggggccacacactcaaaaaaccagatctcatgagaactcactcactatcatgagaacagtaagggagaaatccacccccatgatccaatcacctcccactgggcccctcctccaacactggggattacaagtctacctgagacttgggtggggacacagatccaattctacctgagatttgggtggggatacagatacaatccatatcaggggccacttccacggggacgggaagaagcagatgggagtagtcctgggcaggtgggctcatggctgtgtgtgcaccctcagttggct

SEQ ID NO: 118 - DNA, 690 bp, Homo sapiens
  Genbank Accession No. AA419311
cctggagctgaggacttgacctgctgcactgtatgccattccttggtgacaaaatgctgtatatttggttttgaaaaaatgaatgtgctgggtatacacagcagaaagggtactgtccactttttgtatatcagtgtggaaaatatttcccctagaagtagaaaaggctcatgtgctgatggataattttgagtcttctccattctctgtgaatgacccccttccccaggcatccccacctcctacctcgttcttagagcaagctaaagccaactgagggtgcacacacagccatgagcccacctgcccaggactactcccatctgcttcttcccgtccccgtggaagtggccctgatatggattgtatctgtatcccacccaaatctcaggtagaattggatctgtgtccccaccaagtctcaggtagacttgtaatccccagtgttggaggaggggccagtggaggtgattggatcatgggggtggatttctcccttactggtctcatgatagtgagtgagttctcagagatctgggtttttgagtgtgtggccatcccgtctcttttgcctcttctctttctcggcatgtagaatgctcatctcttcacttcaccagatgcaagtccgagctccagcaagttccgatagctcggatggagcaataaccctgaggataaaaaagaaaa

SEQ ID NO: 119 - DNA, 533 bp, Homo sapiens
  Genbank Accession No. AA420624
tcgacaacagttggaacagtaatcagtttgctaacatatttaaagtcttgaatgttgaagaactcatgtgatttacccttttcaactttttggaaaacgatttaatttattctaattagattaaccctattaatctatggattgggtatcaaaatgaatgccagtccagatgtgcctagacacgaaattggagctgaggactctcacgatatgcaagttcatccaacgtgaagataccataagctttttctctgaaccagagaaatgaaagtcagtttaagaggctgatagatcttggccctgttaaggcatccacttcacagttctgaaggctgagtcagccccactccacagttaggccaagaattagattttaaaacttcatctgtctgtcccagttaactgttaaataaggcctcatcctccactgaagagtatggattgaaggattgtgaactatgtttagtgtgattgtgaacttggtgcctaatgttccatgtctgaagtttgccccagtgctacacgttggagta

SEQ ID NO: 120 - DNA, 503 bp, Homo sapiens
  Genbank Accession No. AA422178
atctgccttctcaccatgaggcttctagtcctttccagcctgctctgtatcctgcttctctgcttctccatcttctccacagaggggaagaggcgtcctgccaaggcctggtcaggcaggagaaccaggctctgctgccaccgagtccctagccccaactcaacaaacctgaaaggacatcatgtgaggctctgtaaaccatgcaagcttgagccagagccccgcctttgggtggtgcctggggagtcccacaggtgtagcactcccaaagcaagactccagacagcggagaacctcatgcctggcacctgaggtacccagcagcctcctgtctcccctttcagccttcacagcagtgagctgcaatgttggagggcttcatctcgggctgcaaggaccctgggaaagttccagaactccacgtccttgtctcaattgtgccatcaactttcagagctatcatgagccaacctcaccccacagggcctcagtcgccaccatgt

SEQ ID NO: 121 - DNA, 454 bp, Homo sapiens
  Genbank Accession No. AA425714
  unsure (1)..(454): n = a or c or g or t
agtgttgatcagtttactagtatttttccaaacctgaagaatggtgaaagtttgtggtacagtgtggggaaaacagtaagtgtgggccccggggncggccggcgagcccccccgggcttgccggccccccgcaccaagagggggttggagtgtgtggtctctaaggcactgaatttcagtctgttctccatccatcagtggatatgtgagatgcaatgcaggggtgctggcctgtccctggtaatgagcgaggatatgagcaaagcagtgagtacagcctggaattccagctactcaggaggctgaggtacgagaatcacttgaacttgggaggctgaggtttcagtgagctgagatctggccactgcactccagcctgggcgacagagtgagactctgtctcaaaaaaaggattctacgactatgattccaagagtgtaaaattccaagatgt

SEQ ID NO: 122 - DNA, 553 bp, Homo sapiens
  Genbank Accession No. AA426499
cttttacaaaaggtgattgcccattctaagaaatgagcgaatatatagaaatagtgtgggcatttcttcctgttaggtggagtgtatgtgttgacatttctccccatctcttcccactctgttttctccccattatttgaataaagtgactgctgaagatgactttgaatccttatccacttaatttaatgtttaaagaaaaacctgtaatggaaagtaagactccttccctaatttcagtttagagcaacttgaagaagagtagacaaaaaataaaatgcacatagaaaaagagaaaaagggcacaaagggattggcccaatattgattcttttttataaaacctcctttggctaagaaggaatgactctagctacaataatacacagaatgtttaagcaggttcccttggttgttgcattaaatgtaatccacctttaggtattttagagcacagaacaacactgtgttgatctagtaggtttctatttttcctttctctttacaatgcacataatactttcctgtatttatatcataacgtgtatagtgt

SEQ ID NO: 123 - DNA, 525 bp, Homo sapiens
  Genbank Accession No. AA427578
ttttgatctgaggagttatgtattagggataagaaacagtaaacactcagtaaatagtggctattattattatatcatcatcattattaccctcaagttgctccaggagaactcctattcaacctccaaaaccccatgtggtttcacccatcctgcagagattgagctcaaaatcagagaattgtgattttgtgattatttgatgagttcccaaactggggtccttagatcagctgggccatccctgaggtctctcagcatccagctctgttattttcctgggcatgggtctcaggcccggcagtcccgctgaggagtgtgcagacgcaggcagtgtcaattcgaatccatcgccagcccacacgggcctgggcatcagcggtcaatgcccgcacataggactgcttggccttgcactcagataccccagtgcctcctgtcattccccggcagccccttcacctgcccccgggcactttctcagcggtataagcttgaaggggtttcaaagagtactgcggaggg

SEQ ID NO: 124 - DNA, 580 bp, Homo sapiens
  Genbank Accession No. AA447232
gatctgcctccccagcatgctccccgcaacatcaccgtggtggccgtggaaggttgccactcatttgtcattgtggactgggacaaagccaccccaggagatgtggtcacaggttacttggtttacagtgcatcctatgaagacttcatcaggaacaagtggtccactcaagcttcatcagtaactcacttgcccattgagaacctaaagcccaacacgaggtattattttaaagtgcaagcacaaaatcctcatggctacggacctatcagcccttcggtctcatttgtcaccgaatcagataatcctctgcttgttgtgaggcccccaggcggtgagcctatctggatcccattcgctttcaaacatgatcccagctacacggactgccatggacggcaatatgtgaagcgcacgtggtatcgaaagttcgtgggagttgttctttgtaattcactgaggtataaaatctacctcagtgacaacctgaaagatacattctacagcattggagacagctggggaagaggtgaagaccattgccaatttgtggattcacaccttgatggaagaacagggc

SEQ ID NO: 125 - DNA, 589 bp, Homo sapiens
  Genbank Accession No. AA447295
  unsure (1)..(580): n = a or c or g or t
tcgacccacgcgtccgattattaattagatggcaccagtttagctctgtgtaaacttcaatctactcccaagtgcatgtaattcttccaaaaatatgggggaaaaataccttacctgnagcttctgtgggatttacccacttgcttcttgtcttgttcacctgacatttggtttctgcttgttacagaaaagaagaggaaaggctcaaccaagagaaaaaggtctctgtttatttagaagacacagactaacaattttagatggtaaggttcacaaataggttgatttcttcttcagctttctgacatgtccagcccatctctaatgaggacncccagatcatcactttatggctgttaggtgtttcccatatgaaattagaggagctgggtcagggagacaaaagtctctattagtcttatggatagctcctccttgagtgtattttgtgcaaaagattaagaagctggactctactgccattaaagctgagagaatccnaaggttatttgtggctcggggttatatttattactactaccaactaataaatattcaacagtaaataaatctttttaaatccaaaaaa

SEQ ID NO: 126 - DNA, 407 bp, Homo sapiens
  Genbank Accession No. AA451798
gactcgcgatacgtctgctcccattttctctctcgaactgtctctttctcattcctttgactccgctggacttgccgcccccgtgacctggtgttgggtctcatcatcccaacagattcccattctaaagatgagggaaccaagaggtggaagttcatgccgtggaggaagtggtgaaggaggtggtgggacatgccaaggagactggagagaaagccattgctgaagccataaagaaagcccaggagtcaggggacaaaaagatgaaggaaatcaccgagacagtgaccaacacagtcacaaatgccatcacccatgcagcaaaaagtctggacaaacttggacagtgagtgcacctgctaccacggcccttccccagtctcaataaaaagccatgacatgtgtaa

SEQ ID NO: 127 - DNA, 559 bp, Homo sapiens
  Genbank Accession No. AA454184
  unsure (1)..(559): n = a or c or g or t
ttttttttttagataaacatatttttaatggaatacctttaaaaatgcaaatcaatgcacaaagaaaacgcccatgttgaacaaaatggtgacaattgtgccttctcttcaacaccaccccaccctccagaagtttccttcaagccgtaccttcaggtgaaggtcagcgcacactggccacccgggaccacattttccagaatcctttggcggtcccgcgatgctctcgtggtcagcagctctcattgggttgcagaggagaaacttgtccgtgtcactggggcatcttaacagtcggctcctaagcttggttgtgtgcgccgcaacnngtccgcgcacgcctgaggctgggatgccgcgctgcctcgccggcgatctgtctgagttttcttcctcctggggtttcttcctgctggtggaccctccgcgaatcccggcctccggagaccgtcctggtaaatgccctggccaggactggtctcagcccagattcagacgcacgatcacacagggctcctacttcgcccctcgtgccgaattcttggcctcgagggcaaat

SEQ ID NO: 128 - DNA, 470 bp, Homo sapiens
  Genbank Accession No. AA458524
attcctgtgcgcaatcgattccgcaatgacagcaccttactccttcctgcggcaggctcacccctgcctgtgggatgttgtgagaggaacatgagccagacaaagacttggctcagggctccgtggaacaagccaggatgcacggggagctgggggagccccagcctggggcagcccagcaggccgctgaacaaacaccccagaagccagcactgtggcagggtgctggggagatgcccctctgagccttcctcccccctcagacctgaatgcactccacagttgggggctgcccctgccactcccctggtaatgcataagaggggaggggaaggttccctggggcttgagctccctctgtggaggtgaggaggggagattccgttcacatccaggaggggcaaaatgactgatgtatttttatgtatctacacagagagtgcattttctctccagagatgctgtctggt

SEQ ID NO: 129 - DNA, 400 bp, Homo sapiens
  Genbank Accession No. AA461106
ttttgagatggaatctctgtcgcccaggctccatcaaaaaaaataataatataaataaataaataaaagaaaaaagactggcataagatacaaaaacaggtcaatgtgacatgaaagagagcccggaaacagaccacaggtggatacagacagcacagaggagctctgcagcgcctggagaacagttcccaggggaatactgctggaccaagcacatctgcaggagaagagaaaccaagctgaatccgatttcattaacaaaatcaacagttcatcacatttatcaacagagatgacttcatctagcaggaattttgtggaggaaatttctgtacaaaggtatacacgtgtaaatacacacacacacacacacacaccatcttctaaatgaagtcatttc

SEQ ID NO: 130 - DNA, 591 bp, Homo sapiens
  Genbank Accession No. AA461365
ggtcttctccaagctgaagggccgtggcggtcttctggggaggcagcgttcagggagattactatggagatctggctgctcgcctgggctatttccccagtagcattgtccgagagcacagaccctgaaacctggcaaagtcgatgtgaagacagacacttcctcttcaaattcctggtgattggcagtgcaggaactggcaaatcatgtctccttcatcagttcattgagaataagttcaaacaggactccaaccacacaatcggcgtggagtttggatcccgggtggtcaacgtgggtgggaagactgtgaagctacagatttgggacacggctggccaggagcggtttcggtcagtgacgcggagttattaccgaggggcggctggagcctgctggtgtacgacatcaccagccgggagacatacaactcactggctgcctggctgacggatgcccgcaccctggccagccccaacatcgtggtcatcctctgtggcaacaagaaggacctggaccctgagcgggaggtcactttcctggaggcctcccgctttgcccaggagaatgagctgatgttcctggagacca

SEQ ID NO: 131 - DNA, 588 bp, Homo sapiens
  Genbank Accession No. AA461376
acatcaagcctgccaacgtgttcatcacagccacgggcgtcgtgaagctcggtgaccttggtctgggccgcttcttcagctctgagaccaccgcagcccactccctagtgggacgccctactacatgtcaccggagaggatccatgagaacggctacaacttcaagtccgacatctggtccttgggctgtctgctgtacgagatggcagccctccagagccccttctatggagataagatgaatctcttctccctgtgccagaagatcgagcagtgtgactaccccccactccccggggagcactactccgagaagttacgagaactggtcagcatgtgcatctgccctgacccccaccagagacctgacatcggatacgtgcaccaggtggccaagcagatgcacatctggatgtccagcacctgagcgtggatgcaccgtgccttatcaaagccagcaccactttgccttacttgagtcgtcttctcttcgagtggccacctggtagcctagaacagctaagaccacagggttcagcaggttccccaaaaggctgcccagccttacagcagatgctgaaggcagag

SEQ ID NO: 132 - DNA, 534 bp, Homo sapiens
  Genbank Accession No. AA464020
ggcaactgcagctgctggattccagattctgggtccccaatccctctgcccagtccctcaatgttgaaacctcatctcttgaaggcagatcctgatattccaaggcactgaatcccaagccctgaatccccggtttctgatctgaatcttccaggcgccgggtcccaaatgttcaggccccaagtctagatcctggcagcccagtcacagagtatcccacacacactggtgcccagagccggcttctcatgacatgaaattgcatggtcgagggagtctgtggggaaggaagcccaggtcctggctgcaacctgcacggatgctggattccccctcaccccacctctgcatggccaccccctcccagccctgtggggaaactgttccctggaaccactccactccctgcatccccacacttcacagcatcttccatccccctcccaccttctaggcgaatagtccccagagctgtgttcctccaaggggtccgaggaatcactcactcctggaggctggcaaggagacagtctg

SEQ ID NO: 133 - DNA, 442 bp, Homo sapiens
  Genbank Accession No. AA468767
ttccttacattcatagggttttattccagtgtgagttcttacatgttgagtaaggtgagttgatctagtgaaggctttcccacattccgtacatttgtgtggttttattccagtgtgaatttgaatgtgaacattaaaggatgaggaatttctaaaggatcttccacattctttacattcaaaggacttctctcctttatgagtttttgcatgtgcagaaagttgagaaaaattagtgaaggatttcccacagttcttagtcttttcggatttctttccagtatgaactgctacacactgctttaagtgtgaggaagttgtgatggctctctcacattcctgaaattcacagagtttctctccaatgtggattcccatgtgattatcaaggcttgcaaaatacttaaagccttttccacattccttacatttgtagggttgt

SEQ ID NO: 134 - DNA, 708 bp, Homo sapiens
  Genbank Accession No. AA470369
  unsure (1)..(708): n = a or c or g or t
attagctataaccatttatttgatgaattaatcaatgttcagatggaagaggttttgacaatgtcactatgtttgatgtttatacctgccctgaatgcttgctcagaagagaaacagatttcccagtattttttataacttactttcccattgtcttcaattaatttgctattatcccaagtagacagacaacttcagtagtagccatctccctacatttttagatcactgaaaagaatggatgagcaacccatgaaaataactagcttactgagatgcttgtcttttaaagaatagttgggattatttaaaaagaaaatggccaggaccagtagctaggagatctgggagagagaagcattgccttggttctgcactaagtacccttatgcttttcaggtactttcactaggcgtcagaccttcctgtaactgagagtttaatgactctagtcatcctccncactagatgtctctacaccaagttatgtgagtcattggcagattgnacagagacacatcacgaggtcaagatattaatctgaatagcagagttgtttgcatgtcagtcaccttcagaaccnnagagtctcagtangctcgtcacgaccatctagtaattagacacctctgtcccctacttgtatgcatcacactcgtcacagagataataaagtggaaactctgtgttctctctggtctggatgtt

SEQ ID NO: 135 - DNA, 499 bp, Homo sapiens
  Genbank Accession No. AA480017
gaagtgtcctcaggtttcatgtggatttgcccagtaatggaaggctccaccgaggccaggttggggaagttcagcctcgaggacactaggggacgaaaaacttcaaaaagaagactctttttattaatattttggcgttcttttttgagaggaacttttgggatgtagcctttacctgtttcctgaatttgacatccaaaaagccttttggaaaacaccattctaaatttatcctgttctgaatcatcatcgcttctgatagatgcagttgcttgctgacatcgtgatctttgattttgtacaacgctatttgggctaacttttgggattttactttgtgcttagaatttgaaagtagtattcattggaaagagactccaagaaaatactcgaagacatcaaaagctggattcgagggtataacgtgttttgtcgtgttttttaaattagaaaaataaggaattgcagtgtgattttctttccccctttaacttagagg

SEQ ID NO: 136 - DNA, 588 bp, Homo sapiens
  Genbank Accession No. AA480075
accatttgcgacttgataatgatcctcgccttttacctggtccacctcttccgcttctaccgcgtgctcacctgtatcagctggcccctgtcggaacttctgcactatttaatcggtaccctgctcctcctcatcgcctccattgtggcagcttccaagagttacaaccagagcggactggtagccggagcgatctttggtttcatggccaccttcctctgcatggcaagcatatggctgtcctataagatctcgtgtgtaacccagtccacagatgcagccgtctgatgaggccacaacccctaggcccctcaggagctttgcagagaggaggacgtgtactccaggcgaggcctctggacctgtgttcctgtgccaaagtcctgtcaggctggtgggcaccaggaaaggcctgcaccctcttcctgctctcccaggaagccagctccctgagctcctgagccagccggaaactcttcctccagccttccggggagaacatccctcccattctgggaaaggaaagcagcctccagggaaatgttttctgccttcctgcttctagaaccacctcaggtactgatgaac

SEQ ID NO: 137 - DNA, 486 bp, Homo sapiens
  Genbank Accession No. AA483389
gacctcttctctttaaacgcttctacggcctgtgcatttcccttcagatattatccaaactcatcgtcgtgaccttcaaaacgttgtggtctggcctctgttggcctccctgacctcccctcccaattctttctctgcccccggactccagtatcacagtctgtctctcagccacaatttattttgcccctagagtttgctgtgcttataacacttctttttcccatatgtcattcatttctcaagtctaagagtagcagttaccatcttagacgaccgttcccttacccctcccttagtcttgggttaagtcccagaatccttgaatttgccgttcctgatacataaatatgtaatttcttgtgtggcctgagactctctctctaaactaagggctttacaaaagcagagaccacatcattaactcagcacttaacccagagcctcacacacagcaggcaatcaataaatatttgttgactgatc

SEQ ID NO: 138 - DNA, 486 bp, Homo sapiens
  Genbank Accession No. AA487503
attatactaaactaaccaaccaaccatccataccagtctcagagggcacaaacaaatctgtcctctgcagtgctgagactacacatgtgagttagagaaatggaaaatggtacaaaggaggccttcacaccattctcacatgggccagtgctgttcatgtggttaacccatttgctgtttagactgaacactgacacttggcaagtggctacttctagaacatgtgtgggctgaggtgaaccgggcattatgtgtatgtgtgaagctatccagacatgcctggtcactgacaatcccagcaaccgttccttgctgaagagacaaaaagtagcatgaaactgtgtgagactctcattttatgattctacaggtggaatcttttagcttgtttaggacacactaagccccaattctatgccctctggttaaagaaggggaagaacttgtaatgacatacgatgtggacaagtgcattaggaacaagac

SEQ ID NO: 139 - DNA, 561 bp, Homo sapiens
  Genbank Accession No. AA490688
  unsure (1)..(561): n = a or c or g or t
tgaggacaagagaaaaaagccaggttccacagaggacacagagaaggtttgggtgtcctcctggggttctttttgccaactttccccacgttaaaggtgaacattggttctttcatttgctttggaagttttaatctctaacagtggacaaagttaccagtgccttaaactctgttacactttttggaagtgaaaactttgtagtatgataggttattttgatgtaaagatgttctggataccattatatgttccccctgtttcagaggctcagattgtaatatgtaaatggtatgtcattcgctactatgatttaatttgaaatatggtcttttggttatgaatactttgcagcacagctgagaggctgtctgttgtattcattgtggtcatagcacctaacaacattgtagcctcaatcgagtgagacagactagaagttcctagtgatggcttatgatagcaaatggcctcatgtcagaatattagatgtaattttgtgtataaatacagactggatgtacaccanctactacctgtaatgacaggcctgtccacaca

SEQ ID NO: 140 - DNA, 579 bp, Homo sapiens
  Genbank Accession No. AA496243
tttttttttgggcaaaaaagctttttattttcccccacattccagctcttcactttttctaaaaccttttccaactcagagccaaggcccaagaagttgattcacacctggggagaaagaaaataaaacaacaaaacaggtcgaagagctgctagaggaagctctgagatgtgtgcagaaattgaggaaggagcagagggagtgacagctagagaccaatacgggcatttaatcccaactaaggtagcctcaggaccccagggtctgtcaggggccaggaagccctcctttcccagtccaaggttgagagggtcctgtcatttcctgtcccaagtaggtggttggggcatttaggccagccatcagcaaaataagcacagttgatcttgagcttccacttcctctggcctgatcagttccctgggcctcaactatttccacttttcccatagtaacttcctagggcactgcagccagctgaagctgagaccagttcaagagctggatgcataacacatggctctcaaatttcatgcacccccctctgacaagtgaagattttttgcagaaatatttttt

SEQ ID NO: 141 - DNA, 534 bp, Homo sapiens
  Genbank Accession No. AA502331
  unsure (1)..(534): n = a or c or g or t
tcccggcctgctggggtttatttgtctagctggggcagggtagggagggtcccagtcccaacagcctgggccttgggacagggcgggggcagtgatggcccctggagccctactgggggtggtagatgtggtcttggtcttcctccggtcccaggagcacctggtgatttggcatcacccacaaccggggcctctcctcgccctggtcctcctcaggcggagggtggtacaggctgtcatggtcgggctcgggactcaggacacggcccagggtgtcctcggtctccatccaggccttggtgcctggaaggatggggcccctgccctgacctcgtggcttctcctcggtggtcaagagtttcggcttctggacagggaacagcaccaccagctggtcgtccttctccggaggctccaccacacgggcgccccaggcttctctgggtcctgctctgagnggcagtgtttgacttgcatcttgatagggaacttgggtgctgggaatgcacctgcctcccacagaagaaaaacaac

SEQ ID NO: 142 - DNA, 466 bp, Homo sapiens
  Genbank Accession No. AA507036
aagatgtcactgtgtatttaaacgcctttattcattggcatacaccaaataccttcatcattctttgagtaatgattgacagtctcgtttaatgaaataatgtttgtcaaatacttaatttgctgccgggcacagtaaatgttagttatgattgttataatattatcataaaacaagttttttttttttaaggttttctgaatggaaaggaaatacagatcagggctgtcatgttcgtgcaggccactcaaggtaaaccatagtggattccagagtttacaccccctgagactgctgcccctatgacagcattttacccccaagatagtcaaattctcaattctttagacttttaccgggtctcccaaggtaccgctcatcccctccttgctccccacaagagggaagagacaaaggctgctgtttctcttgcaaggctgcccccaccagcctgagaaggagttcc

SEQ ID NO: 143 - DNA, 315 bp, Homo sapiens
  Genbank Accession No. AA508552
ggtcgaccccagaagtgctgggactacaggtgcgccatgacgcctggctaatttttttgtattttcggtggagacggggtttcaccatgttggccagtctgctttcctcctaacctcaagtgagccgcctgcctcgaagatgctttatttataagcgctttggacacactttaataaatgctctattgtatacagttgaactctatataacattttgaataatattgttaatgcttaccctaagtactactatcatctctgtattgtttaacaaaatatttccacatttgacaataaagtcagtatttgaaagga

SEQ ID NO: 144 - DNA, 467 bp, Homo sapiens
  Genbank Accession No. AA513406
cacattttaatctttttatttatataaaaaattataaattatttcacacgaaagcttttggagtaagttaactatgaggccaaagttcttttctcagagaatctgcacccagggaggcttttctgcctacttcccacggtggccgtgtgccccttctacctccttcagaggaggaccaaggaccatcacatcagccagcagggggaggccgtgatcgatcaccactgctggcaacagacctctcagggcacacccactgtgtatacaactagtcatcagtcatctccgtagtggggttgggagcaaagtgaataggactctattacaatgcaggcaagttggtagtgacaatgaccattatctaagaagtacaaccttaccaaaaaaaggtaactttttttttttttttgagactcagtctggctctatcgcccaggctggagtgcagtggtacgatctcagctcac

SEQ ID NO: 145 - DNA, 606 bp, Homo sapiens
  Genbank Accession No. AA514342
tgtaagaatagtttttaatccattttctcacaagcagtgcacagtgggccggcagtacttaagtaccttatcctaatcctggatgtgctcatacaggctgtcaatttgggtccgaaagtatttggaaagctctcctcgctttgctttcaatgttggtgtcaagagcccattttcaatggaaaatggctctggatgaagaaaaatggctttgacctgttcaaaagttttaaggccactttctttcccaattttctgcaagtcttctaaaatggcttcccttacaacttggttttggcacagttcctcaaaggagcccttcaccccaagcttggctgcaaatgagggaagtacatctgtgtcaggaaccaccactcctactaaggatgaccgtaagctctccccgtgtacaaaaatttgtaacactggttgactcctgttgtagatattttctatcttctctggtgcaatgtattctccttgggccagcttgaaaatgttctttttacggtcgatgatcttcagagttccattcgggagccagcgaccaatgtctcctgtgtgaagccagccatcactgtccaggggcttctgtgtcttctcagggtc

SEQ ID NO: 146 - DNA, 593 bp, Homo sapiens
  Genbank Accession No. AA521049
tttttttttttttgaatagtttaatagttattatttaaataaggctttggcgtgcttttccacatttttaggtttttttctctatgtgtacaccttgcaagatgtatcattaactcatgaaaccaccagctcctcaggcaacgaaaagggaggtagaaagaacgccagaaaggtgggtctgtgtgttctggggtgcgttgggccgccccgaggaaggtgccaacgtccctggagagcagaattaccaggctgggaaagccatgcgggttcgagaacctgggccatgggcatgctgggcagggcaaaggggtttcccaagccgtctgccactgagaacactgttaattccggaggttccacagaggggaaaacggcccaagggtcccggaacaaggaaggttcttaggccggcacccaacaattgccctgggggtttctttaggtttcttggggacaccgaaacttttgagtcctgtttcaagggtggctacctggggaagcttgccaaaatcttagaaaattttggctgttttttacttggaatttctgtaagggttgtttaacccagggtaccttaaaaatccacaatgtgt

SEQ ID NO: 147 - DNA, 559 bp, Homo sapiens
  Genbank Accession No. AA521177
tttttttttctctcttttttttttgagacggagtcttgcctctgttgcccaggctggagtaaaatggcacaatcttggctcactgcaacctctgccttctgggttcaagcgattctcctgcctcagcctcccaaagtgctgggattacaggcatgagccactatgcctggccacctctcccactcttatgtcaacctcacaagggtaggtacttgtgtgtgccctgttcactgctgtgtctccaaacctgttacattcagtaggcgctcggtcaatactcatctagtaaaaagcagcccctcttagactcagcccaagcccaggaccactcaaggacagagatggaagcttgaaccccattcagcagggcccacaggtctctgtccctggtggaaggacaagggatgagaggacagatacatctgccacccctcacccatcggcacctgtgcctctctagccacaggcccccgctcacggccagctccccttagatatggattctcaccaatcctgctattttcatatccatagatcctttcctgcggattcagaaaac

SEQ ID NO: 148 - DNA, 556 bp, Homo sapiens
  Genbank Accession No. AA521281
ttttttttttttttggtagagacaggtctcactacattgcccaggaagtcgaggctgcagtgagccatcttcatgccactgtactccagcttgggaaacagggtgacactctgtctcaaaaaataaacataaagctaaattgagctactatcctaatgaatataatgtattaacttttctatttcttctcaatcacccattatgccttaaaaagtataagggaggaagggatgagaagaggaccctttgttggatcccagttaagaggacatggtccatagaagagaagagctgggccaacaggaattgggatatctctgtccacttttggcttcacctttagcctcttgcacatgtgtctattaagtcccctctagcccatctcactgcatctttgaaacagagagaacagaatgaacactcttccttcccaaccctaatgttgcaaacagattggatgctgtctgttttgagttttctggtcaaaggcatatgataaaaaacacatggtttacatgggtccttttgttaattacaagtatcagtgccaaatgga

SEQ ID NO: 149 - DNA, 662 bp, Homo sapiens
  Genbank Accession No. AA523925
ccttcggtaacagtttattttcatttttgggaaaggcaaaaccactacctggaactcggtgcctccgtggttaactttcctattttgcttgtgatttaaaggctgttctgggtcaggggggaaaaggtgtctccttcggtagggaatatataacgtggtgataacctgtcactaggcagaagcatccactctgcagggacagtggcccctcgggaaagcccgccgctcctggccaaggcctctctgcagactccacgggggctcaccctctgccgtcacgagctctgaaattccgacatttctcccttaaagtctcaacagacacaagagaagtttccatcaagcaagcactgacatatttatattaaaaaatagtgcaaaatctcaacatttatataaataactctaaacccctgctttgtaattttttttctttacaagggtaatacccactttctgacttggcactcaaaattgccatttttgtcctctctagttccgaaacaactttgttttttaataggcctcttctaatacaaaatactcctgcctcgtacataagttcctcgtgcggattctggctcggggccaattcccatagtgagccgattaatcgaatctgtcaagcgtttcgatgggaatgtatccggcaaattctacgt

SEQ ID NO: 150 - DNA, 608 bp, Homo sapiens
  Genbank Accession No. AA524036
ttttgttttttttttttgcagtcagtgggttttatttgacgagggggttttctgctgaactgagatggggttgattgaacggggacagagcgaagactggcagagggcacacacgggaccctggccactcccgggaccctgaccactcctaggctaggtccttcatgtcttcagtcaggcgagcctggggccccctggggagagcctgcatcctgagtgggcaccccgacccatgacaagcctcctgcaagggcagcttctagctcatggtccgtgagtcactcggggctggtcaccgggcactgggaaggtggccagagcgcgtctggggggccgagccagcaacagcagcagcagcaggtgggcccaggcaagcgggcttttgtcagagccttcctgcagctgctgcccgcccgcctggcctcgcaagggtccctgtcatcccgcaaccgtgtattcagctccctgagcagttccaattgccgtagcaagctgaatttctctttctgaagttcctggagaaggcgaacacttctccttgggtttctcctggggcctcgtgcttggtttccaacttgggatttgctcgtgcggaattttgcctcgag

SEQ ID NO: 151 - DNA, 718 bp, Homo sapiens
  Genbank Accession No. AA524093
  unsure (1)..(718): n = a or c or g or t
ttttttttttttttttttttttttttttttgaccagtttcaccatcttttttattggatacagagccataaattctctgatgcccatgtgagtccttttaaatacatacactcaggtacattcagcaaagggcatcttacgggtgacatggagcaaagtgctgggatggcgatcctgggtggggcagagaagtgtggccggggaaggcccctggggtgtgaggtacaggcaccacttcagaaacaaaaataaaaccaaaaattgctctccacccctctgcctgtgcttggggctggggaagctaccctctcactcaggcccattatagcctagctgtgtaggaaggtagggcctaagggcacgttatggaggttgcccaccagtggtgcccactagaaccaagcctgctggcatcagcctacaaagcaagcctgggtcacctcaggcctctgccctggatacaagacccttgtcagggcagactgaggctggcagccaaggtcaagccccctgggccatgctgcagtgcagaggagctggccacggtgggagctgctgatgtcaggcagcttggactgctagtctaggtnttgggagatcgtgcctactgcccggatcgattttctatctacctatctaggaaggtgcaatacactttccagaactttcccatccagatttcagatcagctgcaagctgtaaacagcatgtttaaaag

SEQ ID NO: 152 - DNA, 551 bp, Homo sapiens
  Genbank Accession No. AA526079
tttatttacaaagatttattacagcacgggaggggttcaggcctggagtcagggaagaaggggaaaggggcagagcagctgcacggacaaggaaaacctggcgccccccgctgtgtgccccaccgggtacataaactaggcggcattcctggcatcaaagcacaaaacgcaacaaagaggtctctgccagtccatcttccaggcacccaggaggagcaagggtgattaagggaagattcccaaaatgttgaggctatggagaaaaatgccttagtcctggaccctggtagaagccggtgagagaagtggtgacttggaatcctccataggaaagtgggtagaaaaggatctaagggtacctcaaggttctcaggacctcctttccccagatcttagggtcctgccctgtgggtcatctgtgtccaggggaaaggatctggggagttgaattgtgaagggccaatccctgttcccgggtttctggaatttccaagtgggctgttcaaattcagctacgcttgggtaaagagggaaactcgacggggggggta

SEQ ID NO: 153 - DNA, 577 bp, Homo sapiens
  Genbank Accession No. AA527180
ttttttttttttagtttttctaagatcccttctttatccacatcacttcagccaacaatctgattggtatttccaagacaacagagcagtatttcaaactcatgaatgggattttaatgtgctgtatggaatttgaagcctcaaacttaaggaactttccacctggaaagcattcttaagtaacatcaatgaactgtcctccctaaaacctagacacagtatcactgtggaaacagagtaatagttctggaatcgattgaggattaggttagaagcgcccacaccaggaaaagcttccgggaaacggttttaggacagaatcaaggcacacctgtggaacctctttctgcatctgtcaaatggggacgctgtgtctcctctcttcttaggagaggattaaatgagccagagtgggctagcacagtgcctggcatgagactacagtttcactgggtgctatactcactacctgggtgacaggatcattcgcattccaagctcagcatcacaccatatacccatgttaacaagctgcgcacgagcttctaaatctcaagtaaagttgcgattaaaaaaa

SEQ ID NO: 154 - DNA, 496 bp, Homo sapiens
  Genbank Accession No. AA527237
ttttttttttttttttttttttttttttttttaaaaaaaaaacatgtttttattgtttgattaacaaactggttgggggaagggcaagaataagacatgcggggaaataccagctttgattagtcagaaactcctgttatctgtacaaaaaaatgaatgttacaaaaatcacgtaaaaaaactaggctcaaggaagcagccgcccttgcaaaagggctcaaggcacctgggaggctgagaagaggccaacctggacatgggcgtggctgcatggacagctcttccctcctgcccttccccagatgcccttccctcctgccccgaggggacactccctctccccaattacaggggctacaaaactgcctttgaataccaccgccaaggcgctgcccgagatgaaatgggccctagcaaagcctcgggtctccctcccccgtagcccaggcctgagaaaagatggcctgttccccaggcccaggtgggcaaaaattcc

SEQ ID NO: 155 - DNA, 568 bp, Homo sapiens
  Genbank Accession No. AA527880
tttttttttttttttttttttttttttttttttttttttttttttgaggggcctgaaggcttttatttgactggtccatagggtggggggtgcacccctacagggccaccttggggtccacttccccgggtccctggcctttgcgaactctgccgccttcttctcccgccgcttcttccgctggagcagcctccgctcccgctcaaactccttcatgcgcatcacatagtcgcggtgctcgcagtagtcccagtcgtgccgctcctgcttgcaggccaggaagttggggaagctgtcacgcttgcacttgagcagccggatgaggtggtgggcgcagtagtcccgcagctggagcctcagctgcgcgtccatcatctcctgctgtgtggccaccatctcgggctccttgcgttcggggaagccgtagtctggcgggaaggttggcatctgcagggggtcgggctcaccgaggcatcgccaggtaacgccgaccaggtgccccccatggttcagtcgtgaaatccctgaaagccggggtcaccaattctaccggaacctcggccgattt

SEQ ID NO: 156 - DNA, 610 bp, Homo sapiens
  Genbank Accession No. AA528168
taaatagagatgaggtttcactatgttgcccaggctgatctcgaactcctaggctcaagcaatcctcccaatatgctgggattacaggcatgagccaccacctggcccaagcaagaaattgacactatatagttatttaaggtagtcaggcagtagaaacattgccagaaggatagaaaggaatttggattatatataaggaaaataacaaatcggtgtttttaagactatcactgtcatatattagatccttgtattagtccatccattaatattagttctatttgtggtgctaggtagcttgacaggtatgatatgcataagtcatagctctattcctagtgtcataaagtgtagctaatttataagctctaagtaatcagctttatctaatttgagggcattaaaattactgcctagaactttgagaagagaaaaattcagggataagttgaaaggcactggaactgttcatgtccataccagaccggtaaattataagatccagatgttagtgtctagaattagctggttagaattcagagggggactatgttttaactttgtcatatattagcaagaattggtctaccgtgatggttgtagtgga

SEQ ID NO: 157 - DNA, 611 bp, Homo sapiens
  Genbank Accession No. AA531023
tcagtgtagaccgtctttattggcaggtgttaagagtgcaaaatatcaacaaacccaggggaatacgcaagggggtgggagtatggctcccctaccccatgtgagagccctgtaaccaagccagtggggtgggaacgttgacttgactgtggcaaattcaggctcagcaccttccaaagaacaagctcccaggcaggagggctccttgcaacacaagggggaaaggagtggcaccctggaagggcctgggctgcgaccaccctgggctgcttggctcctttatactgcccacctcaacccctcaagaggaaggcttcacagctgggggtatgtagttcagagaaccgggctaaacccagccctccccaaacccaggtatctgcctcgggcctcagtttccctcctcccagtgattacccaagttggcccatcaggccctgtagtggcccagctgatccaaagtgacaagtcgctgtaacataccatgtatcagtcagtgtgtgggctgcaggcctccaaagctgctgggatcacacaggctggcttagtcagaagacctcttagacatgggaatagctcgtgccgattcttggctcgaggcaaatgcctag

SEQ ID NO: 158 - DNA, 507 bp, Homo sapiens
  Genbank Accession No. AA531287
ttttttttttggtttgaagaaagaaatctttattaataatcttaataatactgttagtttgaatggtcacaccttggaagcatacagaatggtaagaaaggaagcccggggctcggctgcagtcctggggatctgagtgagtcccggggttgagctgctgcaagacaagggtccggaacagcagaggggacagggggctctgtacagaggacaaagccggacgagggctgtggggctatgtacaacgggaatagaaaaggagaattccatttcaatagctgatgctgaatagaaagtgaggtgtatttttaaatttttgacacttcatgagacagtggagccacgttgggagcctgtattttttgctgcttccctacttcagtgctccctgcctcgccaggggttcctccctgccacctgctctgctcctgctcctcccaccgggtaagcctggctgtccttggtgctgctcccgccacctggacacctgccttgggaacatggaaa

SEQ ID NO: 159 - DNA, 549 bp, Homo sapiens
  Genbank Accession No. AA533079
gcaatattcctttgcaagttcattaagaaacactgtaatttaatggggcgtacaatatggaacgatcttcttttgctatagtgctgttcgctgaatagaaccgacctttgcaaagatttcaactggggtgtaacctatttacacagtagtagctcctggtttgagtggtaaaattggtgctatgtgatatcctcttcttccgaacagtaatcccgacccttttcaattttttcatccagcattctgaagaattcttgttggctttcagagatgtgcatgtttgctctgggttgatgaactaatcccggaacctctttattagttttaagtcttacatttgagctggcacttttttccaagttttcttggttcctggctgctattttctgctcttcttctgccccatttttcatgtatttgacctcttccactggtttgatcctatactcatcgccaaacacatctccgttctggtagtttttccctttctggggctctcttcattttgaacagtggcaacatgcttggcggaggcacagcccatagtct

SEQ ID NO: 160 - DNA, 460 bp, Homo sapiens
  Genbank Accession No. AA534325
taaaaaggttcatcttttattctcccaaacactttcatttaaatcaagagggtgggatgtggttattgctgtgcttttagacagaatcaacggtttctgggtctgagatattgcatataccctctcagtccctgtatcctgagatggagtcacctgagaatccacagcaagtcctaaccagggatgggtctgcgtggttaaggaaggttggcttcagaactgggccagggcactgctttgcttttgctgttttgatcagctctctgcatgtttcagaggaagcgaacgccggctgacaccctgattttggacttctagcattcaggcctgcgagacaatacatttctgttgttttcagccacatgcggggccctcgttgttgttgtggttgtttttatatttttctggagacggagtttcactcttgtggcccaggccggagtgcaatggcgcgaactcg

SEQ ID NO: 161 - DNA, 588 bp, Homo sapiens
  Genbank Accession No. AA534390
ggaatgagtaacttcagtctttattcactggggggtggggtgggttggggcagggaacggcatgcccagcatgtaacacaaggcgtgggtggagtggattcacagtctttttggagaagagcaggcaggaagcaggttggctgtgcagtgtggcctgagaatgagctcagaacaggaagaggggaagaggaactgggctggccagaaggcttctttctggaagaggcaggactggagcagggattttgaagcgtgggtacaggttggaaaaaaaagcaaacataagcgaagagtggagtccggagtgtaaaagtctctggataacttttccaagcgggtggaatgggagtagggtgaggaaagggtgctttgtctcagaaccagtcctttagttcctgactctgtgtggatgagaggctcctccagaggtcgctgttccccaggaatccattactagcgtccgcaccggaggccagagctcccactgttcccctggctttgcttctatgaggcttacgcggctctgcatctgcccagaggactcagggacgcggcaatatttccgcccccacgagggtacttacggcc

SEQ ID NO: 162 - DNA, 489 bp, Homo sapiens
  Genbank Accession No. AA534542
ttaaaaataatactccatgcattgtgggtgggcttcccctccgcaggccccagcccaaggcagctgggcctagctgtcctcccccctcctctgattcatggaatgaaacttgttcatgagttcttccagctccgacccactttgctgcttctccaggaaggccttctgcatggtgagctggctgtacacgcggacgccctcctcgccgcacactttcttcagctcctccttgttgagggagaagagctgcggcccggtcaggatgcccaggttctccacgatccgcgggctgaaggcttggcttccagccaggcgcggacctcgtccggacccgactcgtaggtgagcggctggctcacgggctggctgcgctccacgcggaagtgcctctgtggctgcgcctgatgttgctgattttccggatgagctcgtcgttgacctcgtccatgtgctgcatgagctcgtctttgttccccgggaagcttgggg

SEQ ID NO: 163 - DNA, 492 bp, Homo sapiens
  Genbank Accession No. AA534591
tttttttttttttggggggaaggaaacatattatttggaatcaaaggacaataatacgtcaagcaccaaatgctacaaagaaatcatgaaaataggccttaaacgagtcattcctagattaacctccccacatgtgaaaataagtcttggaagtagaaagggtgggtttggttctggtccctagagatgacaacgtgcagtgactgcagttctgcacttctcccctggtgcgtcttttctgagtggctgttggtggctttgcacgtgaggtcacataactgcttatctcgtcaggaattttgcaagacccctggagagaaaaccagatggaccagtgggaaaggccgcccttgcaagttgctgcttcttttgttcttagtgaagatcagaaacgaaggaggtgacaccggtgtacaccccaggcttgttcacctctgcgcagcgaatgccaaagctggtcggtcccactaacttccacaggctcctctcttg

SEQ ID NO: 164 - DNA, 552 bp, Homo sapiens
  Genbank Accession No. AA534969
tcctattttctgaattatttattaacatttctcagatgttctaaagccctcccttgcctcctctctgccaaaccagggccctctgtcctacttcaaaagcccaagagctcacttaataaagcaagccccagtccccacctgggaagggcctggtcacatgggagggcaggtgagggtccctgagggacagcattgttgccctcactgttcctgagatgccccagcccaagaacgaaacaaaacttctcatcatttctcctcaggcctcagccgacgctggcccctcttgtgctttctcaccctgttaggactgcggatcaggctgaagggctccccagggtgagcctttcctggtccgactcaactggcatcaccatgaggaggcctggcggcacgtatgccctgtgaacaccgtggtaacctggcaacagtacagcagcgggacatcctggggccctgctcaggagtcttgccccactgccagcgagtcctcaagaggactcctcttgcgtgcagagttttctgccatagaagtcggctcccggggacgag

SEQ ID NO: 165 - DNA, 524 bp, Homo sapiens
  Genbank Accession No. AA535447
gacaagcttgaagatgcttttatggagaaggagagggactgaacagattcttgacaagcctaggcataaatgctccaggtttgggaaagaggtaaaataaataggtggttactggggaggctccaacacagccagaagggacactgtttgcttcagcctctgggcctgtccattggttttgctatgtgagctggtgtgtggggtttgctgcaaactgggatccagaagaggaattctcggggctctaatgggtatcagatctgccatcttgcatcagcgggggcctggttcttggaagtgtccaagctggtgccctaaaggcttatcccaagccatccttcttgacatgctccgagcctggaccaggaatccgttggggcctccctgttggacattaggcatctgttaccttccccagggtccttatggcgaaattagcctggcttccccgttccaggaccccaaaagtattcctcaaccgttgtcagattggtaaaatgtctcctgccttgaagtcagattcg

SEQ ID NO: 166 - DNA, 522 bp, Homo sapiens
  Genbank Accession No. AA535819
ggtcgaccacatcgcgcccctagagagcgcagcaactggagcaaagagaaggataaacagaaaggacaccctctctagggtccccagggggccggggctggggctgcgtaggtgaaaaggcagaacactccgcgcttcttagaagaggagtgagaggaaggccgggggcggacaacgcatcgtgttggcctcccctcccactcgcgtgtgtataattattacatgtgatggcctggctggatgcacaagctaggaggagcgtggagtaagagaaagaagggttttgccctaaattgggtcgtagtaacattttcggctcggccgcgattgttggagtagtagtgacccggggattccggaacggttaccggaggctgaacggctttcccagtggtgggtggtgttgaagcttgggtagagcatggggctagatgtgtgccgtggtggaattgttgtcgcgccccattccgggaaacattgagccggtagataaaggggaaacccgggtggctgattattggg

SEQ ID NO: 167 - DNA, 460 bp, Homo sapiens
  Genbank Accession No. AA552017
tcaactattgttagtgttattctattttatgtggcccaagacaattcttcttccaatgtggcccagggaaaacaaaagatttgacacccctggcatcaactctgtgaagcaggaattttgcctggtaagaaaacggcccagcagggcctgcagtcccgacatcacaggttcacaagccaggcccagggcagggctggagagagggacgccagggccgcacacttctcaggggggaccctgcaaatgattcaggcttgagggtcacccagtctctgtcacagccactcaactctgcctacgcaacagccataaaagtgtcaaggaacaatcttaatttcaaaagtaagcagagctgagaagaaagtgacccagctgcactgagggatccccctgaggactggagtggcctgcgcagaccccagggcagaaaacacttgcactgcacattaaactgcataat

SEQ ID NO: 168 - DNA, 454 bp, Homo sapiens
  Genbank Accession No. AA553396
ttttgattttgcagcacttttaatacacaaagcaaaaggtaataggctggatgggtgaccaaccttcattcacatacagagcccaagtatagatacagactaattgggaaataagttagagtttgcagggccttagggctgagagccagaaacactgtccttttggcagccatggaagcgaggatttccttttcttggcatggagggattctggagactccagcatgagcaacagctccgagttgtcaatctccagcagcatgcccgtgatcttgccagccagctgggtgtggacatcatggataagggggtagagacgctcccctgtgtggaacaccttctaatggcttgtgcacggcctagctcacaccccagcatcccagggctcgtatggagtggagcactgaggacatctgggttcttctcccagaactgctccttctaggctatgaca

SEQ ID NO: 169 - DNA, 510 bp, Homo sapiens
  Genbank Accession No. AA553527
tttagaataaacagctttaattccagacgaggacatctcgtgaaaaagattgtttacgtcggatataaatacacacaccatttcacgtcacttgggcgttttgaaaatctggaaagggagatcatggggagggggcgcaaagatctcacgccctgtccccgtgagtgtggagagggggcacgcacagatctcacctctgcccctgtgggaccaaggacagtcttggtctgacttttgaagctcctgggcctcggtgccacagaggaggctgaagtgggaaggagccggccgtcaggagaaggaagcaagcagccgggggagctgtggggcccagtccagggcattggggtgaccccttccccagccccctgccctccagctgtaaggctgaggagaggagaaagaggagtggggtgtggagaaactgaggcttgctattcaagggttctgcatcgggggctggcaggcagttctcagaggtctgagggtgggcccaagcctgtgtccctg

SEQ ID NO: 170 - DNA, 443 bp, Homo sapiens
  Genbank Accession No. AA554814
gagacagggtctcactttgttgcccaagctggagtgcagtggtaaaatcatagttcactgcagcctcaacttccctcgctcaaacaatcctcctgcctcaaccacccaagtagctaggactgcaggcacacaccattattattttttgtaaggatgagatcttgctatgtttcccaggcttgtctagaactcctgggctcaagcgaccctcccacctcagcctcccaaagtgctgggattataggtgtaagctaccacatccagcccaaaaacttgtctttagtgaaatatgtacagaaaattctttgattatattctggagtacatcctgccaaatagtgcccagtcctccctgacctacatgatggataaagttagggcactgatgttcatccatccaatgcagtgaaaggtactctcttttagggttgaaaaaaatctct

SEQ ID NO: 171 - DNA, 605 bp, Homo sapiens
  Genbank Accession No. AA557237
gggccgcttgtgactaaccgcagcgcctgtgtgcaacgtggtggggctccggagctcggctctgccaagaggcccgccctggggtgcgcgagccgctttgccaaggggtttccttctcactcagacgcatgatggccccaggtgtggccgcgggaccgagggatggacgggctggacctggctcgccgtaggagacgccccccacccctgggctggagtccagctaggccgctgatcctgcatccccagaccatggggcctccaaacaccttcccagctcctgtcccacgtgtccggccaggctcaggaaccgggctcagctgcactttcctctttcccggaaggttttgaagctacgggaacaggagcagaaggaggagaagctgaggctccagcagcaggaggagcggcggcggctgcaggaggccgagctgcggcgcgtggaggaggagaaggagcgcgcgctgggcctgcagcggaaagagcgggactgcgcaagcggctgctgagcatcctgctgagcaagaagccggacgacagccacacacacgaacgagctgggcgtggcacacggaaccttgctgcagcccgtcctggacatcctg

SEQ ID NO: 172 - DNA, 568 bp, Homo sapiens
  Genbank Accession No. AA557324
aaggaataaggtgaatttttattaagtgaaaaaaatcaataacaatataggaatgatcacatctatacaaatacattgctacatttctacatataaaatgtataggaaaaagtctgaaagaatgcacaccaaattattctgtttttaggaaaagcagtaggattggtcagggcatggaatgtcggctaagtgaagtgagatttaaaatttttattctacatgattttctagtgttgggaatttttgacagtgagcatacatgcacttattacttgcataattctgaaaactattttaaaaacaacagagaatatatgaaagtctattggtgtatacagcattaatagtagtgaaagtttaacagaaaagatctgaaaatctcccaaagttatatagaaacagatctagctgacacactgtgtacctagaaatgattttggatctcttcacagagacccctatcccaccaacctccaatcctcccaccatacattgatccctttctatctgcttggatcattagctgtaaatttaacttcgaaaaacaaagtacgtttaatcattgtac

SEQ ID NO: 173 - DNA, 518 bp, Homo sapiens
  Genbank Accession No. AA563933
gtctgggcagtttgtccttcctcaggaccagccgtcagcagtccctgacgaaagcaccccattctctccacagacagctggttccagaaggaccctctgaggctggtcttccgggtaggatgtgctgtgggagggttctgtttccgaggaggagaggcgcgacacagcgtgcaaggacctgcagcaccttccacgcagcaccccctgctcctcctcctcagcccctgccgggctctgactcctaagtcaggcaggagcttcttcaggcccctggctgaggaagagccacagccaccctaaaatggcttcgggggcatgcagccctccatctccagcagctctggccatccctcgtatttgtttgtgtctgggctgttctttaagaactgctcaaaggggcttttacccctgaggtctttggctcctatgaagacccagctgtcccggaagcccagttgttttgcgtaggaactccccaagtcagagaagagtttcctgctttcatcgttcattttggt

SEQ ID NO: 174 - DNA, 475 bp, Homo sapiens
  Genbank Accession No. AA564641
gatgatcatcttttatttctttcaggagccatggctatcaacctggagagaggccaaaagacacctaggctttttgtaaaccaaagattgaggtatccacatcagtcagcagtggcttctgcagcagcagccacagaaagtgagtaatggaaacaaaaggatagagatatacaggaagtcctctttcctcacctggagaagaaagaagacagcaaaaaaaattaggtcaaccccacaatcaaggtagagctgctctaaaatctgaggtagccaatgaccaacacaaaccacctcacctttctgagactcggctctcctgtaaaggagaaaccacactgaccctggatcaaaatccccagacagtagacgtgaccttggatttcaagaaggagcaaattacctctgctaatgcagataaagacgccaccatttttggttttcaggatttcacagggaaaatagtcccattatttgg

SEQ ID NO: 175 - DNA, 475 bp, Homo sapiens
  Genbank Accession No. AA568924
  unsure (1)..(475): n = a or c or g or t
ctttataatctattttattaccattaatataaaagtaaacaaatagaattttgtcagtgcacgcaaataagagacattcagaagtcaagaagtgtaattttaagactgcaaaaattaatgctatgccccttaataacagaactctccaggcttattttcatgattcacgctgtctaccacaggccctcctaactccagtggagaaggagtttgggggttctccaaaaacttgcaaatttacatattaaaactacttgaccacaactacctttttgtaactgactgctttcaagttctttgtgtttaattccatcaaaaactgcattataaaactggtaaggttattgacaaagaaacaagaacaaacttccatattgcagttgactacattatataatttcaaatanaataaaatcaattcataaaacaaatttagtggtgtggtttgggaaatctttaaaatgacgtattttta

SEQ ID NO: 176 - DNA, 450 bp, Homo sapiens
  Genbank Accession No. AA570193
tttttttttttttttctttggaaaagaatgcttctttattgatggttatatttatcagcaaggatcatgactcagtagccagttgaaggaatcagaacactttgggtacatgctgctaaaagcccgtcagctcgtcatccttgtttttgtcaacctggtatccagtaagtaccaagtcctcattttgtccgggaagacttttgaatactttcaagtgcatatatttattatcacctgctcgtaccttaatgtagtaatttgttccagcaacaacttgagttttatactgcacagcttccaattttccgtaagtctcatttgttttttcttcaagctgtggtttaaccttatcaacaatctcctggatttctggagtggcgggtttggcctcagataagcctccaggtatcattttggctgattgcttctttgctggacaggatgcgtcga

SEQ ID NO: 177 - DNA, 488 bp, Homo sapiens
  Genbank Accession No. AA580664
tcactgagatccagtgctcttgagctgggtctcagtcccctcccatgtcctgtgctctgccgccactgttttcattgttgtgttctcgttgtgattgttaagactcacactcctggctcagcagtggtttccagaaggcccaaagacggtgcggcacccacgtcgcagtgtccgttccgggcttgggaagctggggaggtgggcagacctggtcgcatctcaccacacacacacacacacacacacacacacagcgctgtcagaaactctggccgtcccccctacctctgagctctcaatgctgctaatctcttccaagtgtccctgtggtccagcaccttccttgaaggactgacgcccaccccacgctctttgcgaggttgtccaggctgtgtttgtcgcaatggctcttccttctggtataggttctcatcttccaattttatggggattcaacaaaagcctattatgcttgtttgcattatggt

SEQ ID NO: 178 - DNA, 494 bp, Homo sapiens
  Genbank Accession No. AA583350
  unsure (1)..(494): n = a or c or g or t
ttttttttttttttttttttttttttttttgctgcaaagagcacctttattcacagcaaaaggacgtcaccatagcaacaacacttcaattccctgagaacttttcccttatcattcgctttcctagctatgtctttgcaaagagaaaaacaacaagaaacacagcccacgggacaggtgagccatgctgggcccagcggggaggtggcagctacacaggaggagggcagggatgggaggttccagatgctggaacgcataaatacacagagtgccagacagtcccacttcagctttaaaaacaaagatgaccccgagtttggcttctgttttttctgatccacagaaaagataagataaaataagaccctcccccaccaacancctcccaagcaaaaaacaagaacaccctactttttacccatcccctttcaaaaaaaaacagcacagtaaaaaaatactgtcacaatatttacagacacgcccactgtggg

SEQ ID NO: 179 - DNA, 306 bp, Homo sapiens
  Genbank Accession No. AA583578
gtatttttagtagagacggggtttcaccatattggtcaggctggtctcgagaccaggtaatccacctgatctcaggtaatccaaccaccttggcatcccaaagttctgggattacaggcatgagccaccacgcctggcccctcctgtatgctttctaagcatcctatatttctttgcactcagctaggctgtgcactcaggacctagttccaccccagaaacaaagaggggcactgtgaattgagaagaaatgaatgatggggcttgtgaggttcagcatttattcctcaggaggtgaccaggctg

SEQ ID NO: 180 - DNA, 582 bp, Homo sapiens
  Genbank Accession No. AA584310
ttttttgttggaaataatttttatttaacagatataaaaaaaattcttaacatttacaaattgtacaaagattggtagcttttatatttttttaaaaatgctatactaagagaaaaaacaaaagaccacaacaatattccccctcataggttgagagaatgtgactatgaagaaagtattctaaccaactaaaaaaaatattgaaaccacttttgattgaagcaaaatgaataatgctagatttaaaaacagtgtgaaatcacactttggtctgtaaacatatttagctttgcttttcattcagatgtatacataaacttatttaaaatgtcatttaagtgaaccattccaaggcataataaaacccgaggtagcaaatgaaaattaaagcatttattttggtagttcttcaataatgatgcgagaaactgaattccatccagtagaagcatctccttttgggtaatctgaacaagtgccaacccagatagcaacatccactaatccagcaccaattccttcacaaagtccttccacagaagaagtgcgatgaatattaattgttgaattcatttcagggct

SEQ ID NO: 181 - DNA, 404 bp, Homo sapiens
  Genbank Accession No. AA584378
ttaataaacatccgattttatttacaaagcattaaagcttcagcaagaagtacccaaggctaagtctcatcttgtacaaaactacagattttttttttttttgagatggagtcttgctctgtcacccaggctggagtgcagtggcgcaatctcagctcactgcaacctctgcctcctggattcaagcaattctcctgcctcagcctcccgagtagctaggattacaggtgcgcgccgccacgcccgacttccttactgtctccgctactactactttgtacttcggttatttaatccttcaaaacactcgaagttaaagcattttcatcccatctcaattcgtaacccagggaaggtctgctcatactcatttcaggtgagcgacttgctccagtcccgccgtg

SEQ ID NO: 182 - DNA, 620 bp, Homo sapiens
  Genbank Accession No. AA584408
tttcgtgtgtcccagccccactttattttcgaatttaaaactcagggtcaattcctggggttcccaggcaaccctccctcgagcccactcactaggggccagccctagatcttgaaggccaaggtgagtccatcgcccaggggaggaggctgatgtagaccctgacgtcccgccggatgcgttcgtttaggtttcgcacacactcggccgccacgtcccctttcggaggttgcagcaccttcccgcgccacaggactctgaggacggcgaggatgcctccgggtcgcagcagctgcaggcagcgctcgtagtaggcggagagttctccttgtccgcatccaccacggccacgtcgaaggtgccggcctcgcccgccgccagcagctcgtccagggtctccaaggcgggcttcagcggaggtccgatcttgtgctccgcctcggcctgcctccacaggggccgtcccagctccgggggctgcgcgtccacctcgcaggtcaccacgcgcccgtccgcggaggcccaggggccaggggcagggcggagtagcccgtgaaggtgcccaggttcagcgccttcttggcctggaatgaccgcgccagtttgccaaaaagttggcc

SEQ ID NO: 183 - DNA, 630 bp, Homo sapiens
  Genbank Accession No. AA587236
gtgtttttggagtaaccaggttgtgttctgaaagtgtgtccttagtatggtggtatctggctcatggatgggcaggggtagccagacccgccccgtgctgcccagttcgctgagggtgggattaggaacaaaagtttaaggcttaggccactgccatgccctggatgtaacaaccaggaaaatcatgttaatcaaggaaacaaaaattcctctagactctgcaatactgcactcttaacaaaaatcaaatgaaaacaagacgtgtctgccacaggtctcagggtaacagatgccctgtccactgagagcggcagttctgcagtcagagttctttgatcagccctggacccatttatcacatggggcaagtatggacggtgccctctcgcctggtcccatgatcctggcatggtgcaggttccagcgatgtcccaggcagggtggcaaagggacacccggtaggatgaggcactcagtgaagaggagggaggcagagtctcctttctgactgcgggaggacgggaacacattcaccttccctaaagtcagggaagaacatagttctcctagaaaatcattttgtcaagaaaggggatgtgggtgctgaattgtaacattgattcagggggg

SEQ ID NO: 184 - DNA, 433 bp, Homo sapiens
  Genbank Accession No. AA593528
ggcccacacatgcaaggccctgggcacacggcacagtcctgactcaaagagttggcctcagctcctgggggttgccctggcctcattcacccttgaactccccaactgccacccaccttaggcattctttaagcatctgctgccaggtcaagaccaccaccttccgggacctgcaagccccacccagctctgactggcacatgaccagctatgagggccagtctggcaggaccgtatcccgtgagctcacaccctgctgagaaaacagcacagaaagggtgtatttctgggttgggcacagtggctcacacctgtaatcccagcactttgggaagctgaggcaggaggactgcttgaaaccagaaggctgaagccagcacgggcaacaaagcaataccccatttctacaaaaataaaaaattagccaggcgtg

SEQ ID NO: 185 - DNA, 487 bp, Homo sapiens
  Genbank Accession No. AA602984
tttgatctcaatacttcctatattgcaatatataaatgtgtctaattcagctgttttgtggcatagataagtgtctaagctgggcagttagtctacccgtttatagttcatgttcttcatggctttgcagcatttgtcactttctatgatgtgttcaaagaccagaaaaggccacacttgacctgtcagctggtccttgaacagctgtaggtttttatttttttttgagacagagtctccctctgttgtccaggctggagtgcagtagcgcaacctcgactcactgcaacctctgcctccaggttcaagtgattctcctcctcagactccttagtagctgaggtgggagaatcacttgaacctgggaggtagagcttgcagtgagctgagatcgtgccactgtattccagcctttggctaggaggagccctgagcctcagtcttgagtcacagcagatcacaacttcgaacacaaggaaatcctctg

SEQ ID NO: 186 - DNA, 437 bp, Homo sapiens
  Genbank Accession No. AA604618
aacccaggaggcagacttgcattgagctgaaatcgtaccacagcactccagcctgggcaacagagtgagactccatatccaaaaaaaaaaaaaaaaaaacaaaaacaaacaaacaaacaaaaaaaccagcaacagggatagtcagcataactaatttaaccagcacatccatttcgtaaaagacatcacacattgtcatttgtaagcctgggactttaactatttctcaacttttttagctgaataatttttctttttaaaacaaaactgaaatctgttgtatccattttagaatttatctcagtagtttgtatattcatatatatgtggtgagtttaagaagacgtatttagaacatttttatcttgttagcaatttgacatagaaaaatgaaacattaatgtttttattgtgagtcatgtcactggcacagtttt

SEQ ID NO: 187 - DNA, 393 bp, Homo sapiens
  Genbank Accession No. AA608808
ttttttttttttcattaggaaatattctctacagattttttctttggtccagttaataaccacttaatacaacaacaacaacaacaagtataacataatttcatccccacatggtcacatttgaaggcattccttccaggtgccaggctgagtccttatcacttataggctaaatccaaatggcaaaaaacattccagagagaatgccaatgtgtatttctctggaagtaaatggatcagggttatgggtttttttgtttttagcaatctgggagttagagattcaaatttagctaatttgctttaaaagtgctgtgaacacaaaaataaaagttctttgcactggagtcaaagttaacaaatattttcttacttttttttttttttttaagc

SEQ ID NO: 188 - DNA, 565 bp, Homo sapiens
  Genbank Accession No. AA612678
acaaaacaaaacatgtttttattgtttgattaacaaactggttgggggaagggcaagaataagacatgcggggaaataccagctttgattagtcagaaactcctgttatctgtacaaaaaaatgaatgttacaaaaatcacgtaaaaaaactaggctcaaggaagcagccgcccttgcaagagggctcaaggcacctgggaggctgagaagaggccaacctggccatgggcgtggctgcatggacagctcttccctcctgcccttccccagatgcccttccctcctgccccgagggcacactccctctccccaattacaggtgtagggcaccccacaggccaggggtccaggggcactgcagtcgtggtactgattcttgctccaatctcggtagtcctccccgccacagcacttgaactttttctgaacaaagtccatgatgtttttgaagtccagatcatcatagtagttctcaattcctcttcgaatgttgtcgttcaggaagtcaatggtctggttacggaagtacaaggacaccacgtcaccaatgagctccatgatgag

SEQ ID NO: 189 - DNA, 482 bp, Homo sapiens
  Genbank Accession No. AA613291
tgcaaatgtttatggtttttatttttcaatttttattttggttttcttacaaaggttgacattttccataacaggtgtaagagtgttgaaaaaaaaattcaaatttttgggggagcgggggaaggagttaatgaaactgtattgcacaatgctctgattaaaccctccttttccccttttgccaaaaatttaagcaagtagatgtgaggaagaaatggagggattcagcttcaggttaaaaaggaggaagaggaaatgccaaggagaaggtttttccaaattccttcctttttaaatttagatggagtccatttattggaaacagactgggcaaatgtccacaaagaattcctggtcagcaccaccgatgtccaaaggtgcaatatcaaggaagggcaggcgtatggctaattggttttgaattacatgattggcttgcccaatacatttggccttgaggaccagccatctacatgaacagt

SEQ ID NO: 190 - DNA, 507 bp, Homo sapiens
  Genbank Accession No. AA613523
gtgatttaaataggtttatttcttcatttacaagaggaatatatttggcttctctcttaagactctgagattcacaatcagcagctctaaaaaataaaggagcagtttggcttccggaagatcgaggaggcaacactcggacctggttcttgtacaacaagaaaacatcgctggggccccgctgaggctggagtgggggtggaggctggtctttggaggatgccacccccaccccatcctcttgtcaggccctcggggtaccccagagcttggtgggtgagtattccacctgcttacacaccactgaagccacagccagccagtaactaaggggcaagaagagcattgtccaagctggctcttggggggtccccattggccacaaggctcaccccccaccccacccccgcaccagaaccaccttgattgcagcagaagtgcagggagtgggtgacgcgggggctaagctccccaaagcgggttggggctggtgtgaagttggcagct

SEQ ID NO: 191 - DNA, 607 bp, Homo sapiens
  Genbank Accession No. AA613715
ttttcattaaagctattctttattattacaaaatgcttttacaatgctattcttgacaacaggaaaatacttaccctcactgaagtatgtggagtaccattttttggaaaccatgtcaagcataatggcaatattcaggttcaatcttcctatagatctgctcaatatttatctaaaccttagcttctattcttttcacatgttattagttatattttcacttaaaaaattggaggctgaaggggtaagcaaacaaacttttgaagtagacaaagctcatctttaatcaacagaatttagagtccagtctttccaaatctgtttttaacgacagaaacttctccctcccctgccccattttgtcctccccattaaatggtactgtgtcaataaaattcccaagcgacctctttaaatcagcgttctttccgatgctggctaccacagtcatggaaaagggagatgtgttggacaggcctgtcattacaggtagtagttggtggtacatcagtctgtatttcttacacaaaattacatctaaatatttgacatgaggccatttgctatcataagccatcactagggacttctagtctgtctcactcga

SEQ ID NO: 192 - DNA, 468 bp, Homo sapiens
  Genbank Accession No. AA614254
ttttttttttttgaggcggagtctcactctgtcacccaggctggagtgcagtggcacggtctcggctcactgcaacctcaacctcccaggttcaagcaattctcctccctcagcctcctgagtagctgggactacaggcatgcgccaccacgcctggctaattttttgtatttttagtagagatggggtttcaccagttggccaggctggtctcgaactcctgacctcaggtgatctacctgccttggcctcccaaagtgctgggattacaggtgtgagccaccgcgcccagccaaagcccttccttttctcagggtccccccaggcccatcccgtgcgtgtgttcagtagggagaaggcacaggtgagacagagaccgagagacagagcctggcagagagatacagggtgagacacactggctagagagggaccagagaaggacagagagagggggagatatggaga

SEQ ID NO: 193 - DNA, 473 bp, Homo sapiens
  Genbank Accession No. AA621061
ttttcaatatatagaatttttatttgtcaacacgaaaaaagtaaatttaaaaaacgctttaaacatacttgtccctttgcagaaaggaggacagtaaaaaagttactgtgtatataagaaagtttttcaatccttcatggaaataacatcacgtttcttctacagacatgaaacatggagagagaaacatttctgctggatttacctgattttctatgcaccgaaactgccaaggccagcttgtgttgtacagaaatggtcgcagatcaaacctgttgtcctcagggctgtagttctcggcgtggtacgcgggtgtgagcgtggtcatcttgtgtctgttcatggagtacttggagaaaaaccgcttcactttgtcagcgacctggtgggcgtgcaacacacgagcttcatgttaccaaaactggagagaccccaggccggaattcccatgctggatcatacaagcaaatgac

SEQ ID NO: 194 - DNA, 639 bp, Homo sapiens
  Genbank Accession No. AA621124
  unsure (1)..(639): n = a or c or g or t
ttttgccggaataaaggtttattgtgctggtgcattatatctcagcacctggagagctgtgcagaggttaggggagccccagatggagggatgggggagaggacctcctgccagagcctccctaaagcaggacggagcccaggctcactgtcgaggactgacgaatattgtggacacaggctgccagacaatgtgtgagcaacagggggtggccagggccccctgctccaggcatgggcgtcagaaacccttccccagcccctcggacttccccagggtggaggtccctcaaacacagcccctcagcttctaggctgctttggaggccagacaggaagagttccattcattcaacctgatcccagcagcagtagcgggatgagaaactcacccccaggcaggggtgcattggagagcgcttgagaggatttaaatgccctataccccacatcactaatcctggaccaacttagaacagggggccaccttcaggaaaattaagagcagtattttacagagtgggtgctgcaggattttacactgtagcatgtttaaaaagtagtttgngccggcacgtggctcacgctgtaatccagcactttgtgagcagagctagtgatcactgaagtcagagtttga

SEQ ID NO: 195 - DNA, 398 bp, Homo sapiens
  Genbank Accession No. AA621478
aattaagaaatcagatttaatcataaacttgtgaaaggaacaaattcaatttttaataacttttatatcaatggaagaagcattttcaattggcaaaactagaggtttctccctaattttctgtctgaatttttataaataaaatgcattatttagctgaaattttaaaaatatttttttcactagacgttagagcaatcttagattttaaataaattgttaagtatcatgaacatgttatttaagatttaaaataaagctaagatttgctttacattgtggcaaatatatacattttagaaaacaaactttgtatttagtcaacataatttttaaaataactaggttgtggatacacataattttctgcagtaattgacgacagatgaaactacatt

SEQ ID NO: 196 - DNA, 414 bp, Homo sapiens
  Genbank Accession No. AA622152
catttttaatcctcagtacattttcaacccatcatttttttttaatacaagtaaaagggggtgatgcaaacacccccaaggtcagaaccaggaggatctgctgggctgtccctggaccaaaggcggaaagggcgacaagacgccgaagcaaggtagcgcatcacgctgggaggggagggtggcagcagcagaggggcctgcctcctggcatccccggtactgggcagtgtgtgaagcctccctgtgggtgtggggacctggggcacacccacctgcccctcactaggagagggtttctgttggcagtcaggctttgggggtctctgtctggactcctgaggcctgggagcactacactcctcccagaagaggggacatccgtgtctgcttggctcagcagagctgcccacaccc

SEQ ID NO: 197 - DNA, 503 bp, Homo sapiens
  Genbank Accession No. AA622392
  unsure (1)..(503): n = a or c or g or t
gtttagtttgaacaatatttaatctctgatgcttcagaaggcactttgagatcttgaagggccttagggttgagtctttgatggtgactatggctccttagggtgctgtgtggatgtacaagagcactggctaaggagaggtggcagcatgcaacaagggtaagaacctcagctctttccctaaatggcaggctgacccggggttagtcacttcccttccccagcagcactgcgtcagagcttctctgaggcccctcttacctctgatattctattaagactggcagaggatgtattgtgtgggttttctatcactggaactgagaaaaatttaaaactacctgcatcagcacagagaagatctgaaacggttcttgggtgtttataaagcccgtggctggngctcccatcttgatgtcagcccagccctggggtcagtgcagactgagatacggagcaggaaagcaggaagaacgggagtagcagagtcagggacgacagca

SEQ ID NO: 198 - DNA, 461 bp, Homo sapiens
  Genbank Accession No. AA622570
gtctgggcagtttgtccttcctcaggaccagccgtcagcagtccctgacgaaagcaccccattctctccacagacagctggttccagaaggaccctctgaggctggtcttccgggtaggatgtgctgtgggagggttctgtttccgaggaggagaggcgcgacacagcgtgcaaggacctgcagcaccttccacgcagcaccccctgctcctcctcctcagcccctgccgggctctgactcctaagtcaggcaggagcttcttcaggcccctggctgaggaagagccacagccaccctaaaatggcttcgggggcatgcagccctccatctccagcagctctggccatccctcgtatttgtttgtgtctgggctgttctttaagaactgctcaaaggggcttttacccctgaggtctttggctcctatgaagacccagctgtcacggaaagccagttgttt

SEQ ID NO: 199 - DNA, 566 bp, Homo sapiens
  Genbank Accession No. AA625199
attcggcaacacgggaaaacccggagctgctgaaccctgagcccagagagactgagcccagagttgaggctactgcctaatatgatcactctgggcgacgcgatgcacaacttcgccgacgggctggccgtggcgccgccttcgcgatcctcctggaagaccgggctggcaacctcgctggccgtgttctgccacgagttgccacacgagctgggggacttcgccgccttgctgcacgcggggctgtccgtgcgccaagcactgctgctgaacctggcctccgcgctcacggccttcgctggtctctacgtggcactcgcggttggagtcagcgaggagagcgaggcctggatcctggcagtggccaccggctgtttacctctacgtagcactctgcgacatgctcccggcgatgttgaaagtacgggacccgcggccctggctcctcttcctgctgcacaacgtgggcctgctgggcggctggaccgtcctgctgctgctgtccctgtacgaggatgacatcaccttctgataccctgccctagtcccccacctttgacttaaga

SEQ ID NO: 200 - DNA, 432 bp, Homo sapiens
  Genbank Accession No. AA625990
tttttttttggctaagtgggagactggaattttattacttaagtcaatctcccccaaaattcagaggctagggtttttcaaggataatctggagggagctggggactagggagtgggtgctgctgattggatgaggtgcaatcataggggtgtggaaaatggtccttgtgcctgccgagtctgcttctgcatggatgggtccacaggacaagctggagatctggatggagtcatcagaagtgcagaagcctgttcattaggaaagactgaaacccaggagcagctggacgggagagatgcatagcacgcggtgtggaggtggggtgttggagcttccacgccctctccaggtgtgccgctctcccagcgcctccgcatgtccggcagccacatcccggagtgcaaggactttgacggaggcctcatcacatg

SEQ ID NO: 201 - DNA, 263 bp, Homo sapiens
  Genbank Accession No. AA626219
tgtattttagtagagacggaatttcaccatgttggccaggctggtctcaaactcctggcctcaagtgatctgtccgcctctggctcccaaagtgctaggattatagacatgagccaccacaccccaccagaaggatgataattatttacatgacagtcaggcaagacctcaggaagtgatatctgaacaaagacttggggtgagaacagagaggcaggctgagcccaggtgagaagagaatgtttgctacagtaagggcccga

SEQ ID NO: 202 - DNA, 753 bp, Homo sapiens
  Genbank Accession No. AA628967
tttttttacaacttaaataatttatattacaaaaggaagaaaagaccaaaacatccccaaaattctcccatgggcttccccctccactccaataaataaggtatgggagactgaccggcggagggggtggggatcatggttcagcagaagggggagcttagccgggggggtggcaagcacatccaacccacctcccccagtccccggcactacggtcacattggccagaacacagaactctgcccacagacagcaacagtctctggatgtgtcttgaggagtgtggccggggaggaatgtcatacctcagaatggccgggatggctgccccacccctgtggccttcccagttctggaaagcatcgggtccagccagatccatgctggctcccagggaatttagcagcatcaactgaggcgcaacgcacccaaaggggcctaagatggatggaatgggccctccccaatggggaggcacgagtatgaaaactcgtagtgagagcaggctgagttgggagtcgccgtgccagcctcaaggtctctaggagagaggggtcaacaaccatcccctcgccagctcagcttgcagctctatgactacaccacgacgggggtgggggacgctggtgttggccagtcaagtctcaatggtgtatcttcatggcaaaggttcagtgtaggtgacaaggtgctgacaaacttgagggaagggtgaggcccagtgctgccaattcctgaactcgtgccgaatcc

SEQ ID NO: 203 - DNA, 570 bp, Homo sapiens
  Genbank Accession No. AA629059
ttcatattcttgttaaacctcatctagccattaaaaattactaaatggggctggtaactctagtaccagtgtaaaattgcttctggggaccggaatctatgtagtaacaggaggagtgtcaaatgcagaaggtaaaggatatttaaagcgaaggcaatcttccagcttctgtggactgagtcttacttaaaagtggtacagtggacgctactggataggctctacaccaaacttataccttgctattagtacacaattcagaccatccttcttaaacataaaaccattttcagatgttagaaattcttctgcaacaattttctaaacccattttaaaaaactgcatacctgtctttaccagaatttctttttatcttcatcggtcacaaaggaatagttgtgtttttgttgtttcacagttgtcttaagtattatctaaaacaatacaattatttttattctgtttgcatgtcttccatgtttttacagggcagagtattttactctctcggcttccacattttttcatgtcattattaaactcatggagaatacaaccagaagctgagc

SEQ ID NO: 204 - DNA, 637 bp, Homo sapiens
  Genbank Accession No. AA630327
  unsure (1)..(637): n = a or c or g or t
ccaggtaatccacctgatctcaggtaatccaaccaccttggcatcccaaagttctgggattacaggcatgagcaccacgcctggcccctcctgtatgctttctaagcatcctatatttctttgcactcagctaggctgtgcctcaggacctagttccaccccagaaacaaagaggggcactgtgaattgagaagaaatgaatgatggggcttgtgaggttcagcatttattcctcaggaggtgaccaggctggtcagaggcacctggatctggggacagctgagccctccctgctgctcaagactggcctgggcactgcagtggggccagtcctggctnngacaactcaagctcctaggtccagtctagactccagggaccttccaggcaagcccaaggctctttgaagcaagaatctgagtctactaacctgccttgtccaacccaacaccccaaactcctcagctagctgcatccctggtggctacagcttcagatggctcccccatacaactcatagataacgggttctggggcctcacccctaattcattgggcccaaggataccctagtattagcctttcctaagaggaggagtttccccaactctcccgaaacatccagaatgttcccaca

SEQ ID NO: 205 - DNA, 475 bp, Homo sapiens
  Genbank Accession No. AA630981
ttttttttttttttttttttttttttaggcacatatttatttaattttttttaatataaaagtaaaagagtacattgttgagtagaggattaaaggagtgacgaccctttctaaagtggggtctcccatcccggatccctaagactgtaacatctgctacatacattaaaaacaaaacaaaacaaaagcaaacatgaaacttatgacctgacttcactccacccttcatgcctgcattatgacagaaacacgtcccactgctcctacttatgtatgtacatccagagctccaaacctaagctgtggccccctcctcccagccctacccacatccacccttatttcccaaaagcctgtagaagcccccacttagaaaaaaaggcagacatacacatacacagaaacacatatctatctgcagctcctccatgtgaagcccctgaaacatacacaccctggaactttcctctcctta

SEQ ID NO: 206 - DNA, 588 bp, Homo sapiens
  Genbank Accession No. AA631047
acaggaggaaaaaaaaatttaataatatatgtttgcacaggagttccacgaaatatgagactccaagaagggtcagatgattgacactcatacaccatcgtgagctatcgaaaagaacggcagtttgggagttctgcagggagttgaccacagaagtgggagagtgaagggaagaagtgtgtcgtgaataaagcttggctggttttcagataaaaggtcttgcgagtggccaggtgtggtggctcactcctgtcacgtcccagcactttgggaggccaaggcgggcggctcatgaggtcaggagttcgagaccagcctggccaacatagtgaaaccccgtctctactaaaaatgcaaaaaattagctgggcatggtggcaggcactgtaatcccagctacttgggaggctgagacaggagaatcacttgaatccgggaggcagaggttgcagtgagctgagatcgcgccattgcattccaatcccgggtgactgtgtgagactccatctcaaaaaaaaaacggaggaaaaaggtcttgtgagtaataaatgttgtctggagcagacctcaggagaagaggtgagagtc

SEQ ID NO: 207 - DNA, 491 bp, Homo sapiens
  Genbank Accession No. AA631215
aataaattcttttattgagatgagagacggacacacactgggagggttttgttttttgttgttgatttttttgtgactgagtcccagtactcagggaggctcagactggaggcggcggcaggcaaggcggcggcaaggctggtcccctggcgctggggccgcgcatacttgaggaagactgcggcgcgacccggccgggaacctcggagcgcacgcgggccatgcacggctcgagggtgcccagttcctcggggctgcagcagggagatggagaaactgaggcagggcaaggggttggagatgacccatccttggaactggagactggaggctgagaagaagcgtcgatgtggttccccacggacgggtcgggggctctcttgagatcgggcacgcgtcccgtcttcaactggagtgactaggcgagcaccgaggagaggtggacaccctattcttcctacagggcgcggctagtgcggaagtcagaacac

SEQ ID NO: 208 - DNA, 457 bp, Homo sapiens
  Genbank Accession No. AA631399
gctcgacgcactgtgaaaatccctgtcctgttctgttccgttctgattaccagtgcatgcagcccccagtcacataccccctgcttgctcaatcaatcacgaccttctcacgcagacccccttagagttgtgagcccttaaaagggacggaattgctcactcagggagcttggcttttgagacgcaagtctgctgaagttcccagctgaataaagctccttccctctttaacccggtgtctgaggagttttgtctgtggctcctcctgctacaaaaggaattgctaactagaataaccagtttagagaagaacacaaatgacctggtggacctgaaaaacacagcatgagaacttcatgaagcacacacaagtatcaacagctgaattgaccaagtggaagaaaggatatcagagtgtgaagaccaccttactgaaataagacattcagaaaagatg

SEQ ID NO: 209 - DNA, 569 bp, Homo sapiens
  Genbank Accession No. AA631908
tttttttgtagtattatcatttattgagtagctacactgtggccagaactaagctttacatgttttatatcacttatttatctcaacaatcttgaaagggtggtattattttccccgtcttataggtgaagactctgaggttcagaaagttaaagtgatatcgccagggttcctgactggtaagtgatggaggctgaatttgagccagatctacatgctccatcatcactctcctggggaaaagagcctagatgtgttctatctgcattcctgcttagattctgcatgacttctcctgtccatccccttggccccctctcctctagtccatgaggatacagcttggcacactgacaggagggtccttccttcttagcctacatatacaaccaggtgtcaaaggatggaagggttcatctcacacactcacagaccatgtagactattcaatctacacctccagctcgaactcagaacattgacaggaacctgctcttcaatctttcacctcccctttctccatgaaacgaacgtcaacattcacacagcagcccatccccagcctacag

SEQ ID NO: 210 - DNA, 896 bp, Homo sapiens
  Genbank Accession No. AA631972
ggggaaagcagcccattcctgggtcagagactcccaccccagctcagagggagcaggggcccagcagggacggaccctcattcctcccagggaccccagacctctgtctctctcgggccttggctccttgaacttttggccgccatgtgcttcccgaagtcctctctgatgacatgaagaagctgaaggcccgaatgcaccaggccatagaaagattttatgataaaatgcgaaatgcagaatcaggacgtggacaggtgatgtcgagcctggcagagctggaggacgacttcaaagagggctacctggagacagtggcggcttattatgaggagcagcacccagagctcactcctctacttgaaaaagaaagagatggattacggtgccgaggcaacagatcccctgtcccggatgttgaggatcccgcaaccgaggagcctggggagagcttttgtgataaggtcatgaggtggttccaggccatgctgcgacggctgtagacctggtggcacggggtcctggcctgggtgaaggagaaggtggtggccctggtccatgcagtgcaggccctctggaaacagttccagagtttctgctgctctctgtcagagctcttcatgtcctctttccagtctacggagcacggggggacaaggaggagctgacaccccagaagtgttctgaaccccaatcctcaaaatgaagatactgacaccacctttgccctccccgtcaccgcgcacccaccctgacccctccctcagctgtcctgtgccccaccctctcccgcacactcagtccccctgcctgggcgttcctgccgcagctctgacctggcggtcgccctggcatcttaataaaacctgcttatacttcctggcaggggagatacc

SEQ ID NO: 211 - DNA, 570 bp, Homo sapiens
  Genbank Accession No. AA633203
gtttttacagaaggagttcaaaatttatttataaatttgtgtaaaagaatataagacctttttcttttgtacatatttgtaccataaagaaagtagggattaaaatctaaaaagacccccaaagctttcaaaacctgatctgagaattagataagaatatgtcacttagaaagacaagcctgtagcacccatagctctgattaacctgaaagcatcaagtgactccctctttttctaccctaccaacatcactctaattatacttccaattagaaaaataatgtagcatttccctggcagtagagtttaaatatgagttcaggaatcagctcctccaaacatgcataaatgaggacaaggagaagccagtcactcctgactgcacggtcaagtgtgtgggcagttgaaattaaggtaaaaacagtgaggctgaacaaaatcacattaagaaaaagcatctcatgaggcttttcgaggtcagttgatgaaggccagataggagtcaatattttctcatataccccagctgttaccgctattcatattccaacagcctccagattgctcgag

SEQ ID NO: 212 - DNA, 538 bp, Homo sapiens
  Genbank Accession No. AA634799
tcttttctcaaagttcctgccttgctagactgttagctctttgaggacagggactatgtcttatcaatcactattattttcctgttacctagcatgggacaagtacacaacacatatttgttcaatgaatgaatgaatgtcttctaaaagactcctctgattgggaggacaatatctataattgggatgtgaatcatttcttcagtggaataagagcacaacggcacaaccttcaaggacatattatctactatgaacattttactgtgagactctttattttgccttctacttgcgctgaaatgaaaccaaaacaggccgttgggttcacaagtcaatatatgttggatgaggattctgttgccttattggggactgtgagacttatctggtatgagaagccagtaataaacctttgacctgttttaaccaatgaagattaggaatatgttaatatgatgtaaattgctatttaagtgtaaagcagttccaagttttagtattcgggggattggtttatgataatttttcccctttg

SEQ ID NO: 213 - DNA, 645 bp, Homo sapiens
  Genbank Accession No. AA639753
tttagaaaacatatgcgccatttattttgttttataaacttttgttaaaacacagaagagtaagaaatgttttttgtttctttgccccatcaggcggcagtgatgggggctcaggggtcagcgcaagacctaatgacattcacacccacagaaagatgtgggtcgttctgatgggacccagcccgctttgataattgcttgatgtaaatttcacaattcatcttaatcagggcagatcacagaaaaatttggcaaaagtaattggcttggtaatgacaagaaatagaagagcgttcatttctgaccctctcctctcctctgtccactctcaggagagccctgcgaattttttagaagctcctgagacccgcctgaagatcagggtgtcttggtggggaaattgtgcccacgcttgtccccccagcaaccctctgtttgtccatcagattttatgttttaggaccacaactcaagtagccaaaaaaaaaaaaaaaaaaaaagagagcgagagattttctaatatcatgtcagcttagagtcaaaaaagtaaactttgttttgtgtttctcacattacaataaagttattaaggtggaatgggtttctcctccagaaaggggtagattcccagcagagaactgaccc

SEQ ID NO: 214 - DNA, 571 bp, Homo sapiens
  Genbank Accession No. AA641023
tttttttttttttttttcaaaataaaaaatgcaatttttatttgttgaacataatttgaaactgtaaaaagatttctctgtccatcaccagaaatccagaagacacctgaagaggactgactgtttctttgccacggggaaggtgtgatgaaacaattaaaatcccatgcatccctggcccttcctccacgttgcccctcagaatgcctgcagctgcagcaggcaggaaggcagcaggagaacccgggctgtggaaggcccctctgcctctctgggaaagctgctggggaagccagaggtcacagtgcattggaggcctggctttcagcactggccagggccaaatggaaacttctgctcaagtctccccaggcaccttgctgggggtgagtgggagaaagaagtggagaaaactgatgctggaccacaagttatcaccctgtaccttggctttgaagtggcccctgctggtacaggagcagggtgagagtaaaagtaaataaataaaagcaacatgcttcaaggagagagggtgacagacccactgaagcaccccgtgtcctggctcgac

SEQ ID NO: 215 - DNA, 569 bp, Homo sapiens
  Genbank Accession No. AA641636
  unsure (1)..(569): n = a or c or g or t
tttttttttttttttttttttttttttttcacacgcacaacttgggaatttaatcttcacttttcctcccataaatatagagtgagggtgtgataccagccccagcccagtctccttggggtctgcatctctgcttcctggcagcctcttgagtcgacttggggatttgacgtcagttgctcagctccattccttccttctggacttggggaggtccggatatgtcggggagtgagtcagtgcaggggactgagggggtggttcccattctccctctagccccctcaaccaatgatccaagttcaaggagctcatctctgtttttcagaccatcgagctagtgccttgaagtctccggaacagcgcacccaggaaggggatgttgcagacattgcccaggaagccgaaggctangggaaaaagcccttaaagaggctgaagaatccgtaggtttccaggaacatgccgaggaggggccagcgtaggagcacgataaccacaccccccaggaggaagctggttctcttgagtttgtgccgttggaagaagaaacaaaggtctttcttcag

SEQ ID NO: 216 - DNA, 447 bp, Homo sapiens
  Genbank Accession No. AA641972
actcccacgaaaaaaatcaacttccagagctaagatttcggtggaagtcctggttccatatctggtgcaagatctcccctcacgaatcagttgagtcaacattctagctcaacaacatcacacgattaacattaacgaaaattattcatttgggaaactatcagccagttttcacttctgaaggggcaggagagtgttatgagaaatcacggcagttttcagcagggtccagattcagattaaataactattttctgtcatttctgtgaccaaccacatacaaacagactcatctgtgcactctccccctcccccttcaggtatatgttttctgagtaaagttgaaaagaatctcagaccagaaaatatagatatatatttaaatcttacttgagtagaactgattacgacttttgggtgttgaggggtctataagatcaaaacttt

SEQ ID NO: 217 - DNA, 563 bp, Homo sapiens
  Genbank Accession No. AA642981
  unsure (1)..(563): n = a or c or g or t
tttttaaattattcacattgcagtaaacttctttttaaggtctctgagagttacaataggaacatcatgtgcaaaactgacagccgtccaagggcccagccgacaggactggctctccctgcccgctcggccggcgcctccccgagcgggagcacactgcagggcttggctgagcctggtggacaaggcaaagagccttccaccccgcactgaggctcgtgtccctcggcagctccctgctccttcacagtagaggacctgggccgcccggggcagtctgcaccggacntacgtcccgtggccaccaccaagggctgacacgcaggtctgggcagctccttctgggaaggcctatgacgactgcgcggaaggtgtgggtgcccccccatccactgtccatcatgctgagtcctggtccatgctgcagcccagcgcctcaatgtcgctgctgatgtccgagatcatgcggtcccactcatccccctctgagggtgccgaccggtcatcagagctgcccgtggcctgttcccattggtggtggaactggatgtggtgctcagggc

SEQ ID NO: 218 - DNA, 476 bp, Homo sapiens
  Genbank Accession No. AA643238
ttcaagttggaagcatatttatttacaatggaatttctcatgactgggaaacaaaaaataatgatatgtagatctacagagggtttggctaaaagctggggctttggaatccagcaaatctagcttagctgttccatttactagatgctacttggaaaagttagttgacctgtcaaggttttgatacccttttacttaaaacaataatagtagttacctcatagagtctcagagattaagttagataatgtatgtcaagtgctaggtagactgtctttctttaagtactccatatatgttagctattactattattcttatcccaagggcagttgtgctccttgtggactgtacttggtgttatggactgaatgtttgtgtcctcccaaaactcctatgttgaattctaatccccattgtgatggtatttggagatggagcctttgggaggtaaataggtcatgagggtggagccc

SEQ ID NO: 219 - DNA, 509 bp, Homo sapiens
  Genbank Accession No. AA643507
agattgcaaaacactttatctccatcacatatgtgccaagacttgtgttctgtatccaggagtgtgttagatactaacatagtgtttcatttacatgtgtgtgaaacctgggtgaagagccagggtttctctcccccacccgcctcagagtgcttgtcctggaatcagagtgtaaaaccccctcttgaagcagacaccaaaactgaacttccacccggtcatgggccctgctcttcctgctgtcagcctagtccaaagagcaatgagggaactgcttaggaggggtctgagggtgatgagggcctgggggcaccacaggggtgggtgctgtcaggtacaagcccatccctgcctgcaaataaccttgcacagggtccttcctcattctttcctcttcctttttgtttatgagatgaatggctcttctgctgtggctttaggggcagtggggaggcagggagctatttgggaacagcctggaaagctgaccctgcagaatctcccagaag

SEQ ID NO: 220 - DNA, 180 bp, Homo sapiens
  Genbank Accession No. AA648038
tctttctagccctttctagccctttctagccctttctagccctttctagccctttctagctctttctagcccacaccttggaaactgaatccctttccttcatcgagagtttccaaagactttacactttggatatattatgtctgatctaacaataaaacaatgcatagatatctcccc

SEQ ID NO: 221 - DNA, 316 bp, Homo sapiens
  Genbank Accession No. AA649608
caattttgctcaaaatgtacttcaaaaaattttcctctttgctctttctctttccagtttttcctcttctttcaaacgaccaagaaagaccataatcaaaaaattaaaaaaagatagatgttggtgtggatgcattgaacagtgaacacttctacactgctgttgggaatgtaaactagtacaaccactatggaaaacagtgtggagattcctcagagaactaaaagtagatctaccattgatccagcaattacactactggatatctatctagaggaaaagaagtcattatgcaaaaaaaaaaaaagtcgacgcg

SEQ ID NO: 222 - DNA, 408 bp, Homo sapiens
  Genbank Accession No. AA653151
gcctggtatatgattttcagtggctccctgataccaagatgagtcaaacacttacggccaaatattcatgtccctgtaatacgactctacctttcttcagacaacaaaatctgagagtagctaggacacttacccatggagtccgaagtttgactgccaaccactcggagcagcataggctgactgctgtcggacctctgtagagaggtagaaggagaggacaccgttgtgccattcactttggcctctgcctggggctaagtcatccaaaagaaaacagaattacttttcataataaacatacaaatgtataaatttcaaaatatgatacacactcaggactcataaattttgacccttcctactttagaagccctcccaaagattgtttaatttgggatatttcac

SEQ ID NO: 223 - DNA, 328 bp, Homo sapiens
  Genbank Accession No. AA668464
tagatgttgtactaatttagaatgcgtgactttctgtaccagacattactgggttccctctgcgtgtggatgtcaggggaggtgccatgaagatggtactagaactgaagaggagggtgtgtatcaggggaacaagggaggggccagcgctccaggctcagggttctgtatacacaagggtgaaggagccggtttgggcaatggaagcagattctttttgttggtcatttgggaacgagtctaatctcagacactcagctgcaattcttgttaaaagcaacaggttgagtaatctgaggagcagggccaaggagagaaattcactggc

SEQ ID NO: 224 - DNA, 787 bp, Homo sapiens
  Genbank Accession No. AA675917
ctgcagcaggagcaggagctgttacccttctaatccccacaatgaccccagcctaataatacaatgatccccaagtagaaccaggggcccaaggccccctcgtcagctgggctcccacctccaagctgacgccctcaaccactctgctggggtgagcaaacccaggccccacagctggctagcgggacatccgtgtccacgattggcgccatgtgttttaagttgcagcgtcaaaaacatgaagagattgctttagcaaatatttacccagtcctgactctgcacatggcatcgttctaggagcccaaagatgttaacttgtttaataatcaagccctgtgaaggagtttatagcatctgtggattttggtacccacggaggtgctggaaccaatcgttgaggattccaaggacaactctatgatgcaggcacacctgtcctagctgctcaagggtcgtgggatgcaggtggcacggtgcacgccaagatggctgtgtccacagaggagctggaggccacggttcaggaagtcctggggagactgaagagccaccagtttttccagtccacatgggacactgttgccttcattgttttcctcaccttcatgggcaccgtgctgctcctgctgctgctggtcgtcgcccactgctgctgctgcagctcccccgggccccgcagggaaagccccaggaaggaaagacccaagggagtggataacttggccctggaaccctgaccctgtgtctcctgcccggtggcagtaacaaagccttctgtctgccc

SEQ ID NO: 225 - DNA, 564 bp, Homo sapiens
  Genbank Accession No. AA679297
gtaaaaatgggacctttatttttgttttgattataaagtgaacatggtcatggctgaaaatctgtcaagcacagaaaagtataaagtaaaggtcgctcaaaattccactgcccagccagctgatactgacatctaggaggtgtcccactttggctcttattgatccctggtgtgcagacaggggtccccaggtagacagaacccctgaccaaggacaacaggaggcatttgctcttccagggtaagcatctgttttattcagatctgggtggctcagggcctccaggcagccagttttgcaggagattcagcacctagtgtcttcctgcctcacgctcccaagaacctgctcctgcacggggaacatcagaactcatccttgatgtcaaaatggggctggtcttcaggcttgaagtccaggttagggctgccatcctcattgagaattctccgggcagtgtagccgacgatggggtatttggctttgtacactttggtgaagacctcatccagggcctccagttccttggccgtgagacccgtagtgtcatgggtgaggtctgc

SEQ ID NO: 226 - DNA, 484 bp, Homo sapiens
  Genbank Accession No. AA682328
  unsure (1)..(484): n = a or c or g or t
tttttttttttttttttttataagatggagtctcactgtcacccaggctgcagtgcaggancgtgacctcagctcactgcagcatattttttctttgctatccacttgtttttttttttctatttcttcccctctttctctcctctatcttctagagacctaggtagttccccaggaatagtgctttacagattctaatggtgatttattaggtaaaaacagaaaatgatttttttaacctaaaagttccataacaaaaaatgaatataagcttttgatgcagtttcacacattgaaaatgcaggtaattttaatttcattgcatttttatcagaattctcaatcacaatcctctgacagctgttgaagatccgtagctcttggaactgccggcattaatatatctgtaagtactatagtactctcatgagtcatgagatgacttatgctcttttaaatttgtcatcaaagattaagtattttg

SEQ ID NO: 227 - DNA, 445 bp, Homo sapiens
  Genbank Accession No. AA699394
tcaattctagataatgcttcttttccaaagccatgacttagaattcctgctgagtctcgggaacgcacaactgttccatgaaggctgtctccgctcatgactccagccagccttgtcgctggacaagtgaggaaagtgaaatgcacagaggccgaggttgctggctggatcagactcgggcccaggatggagtctgcgtccccttactctttgcccttgggttcccaccccattgatggcttttacatgcacctggagttaacactaccgtgtctccctgcagccctgcccaggtgcagagcaagtcaattctaacctggctctgtgggccatcggaagagcgtgcccttgtagccaggttgcttgactcctactcagagaaatctgcggtctacggtgggaagcagcagtttatcaaatgaggaaagccgaagcctgaagaaca

SEQ ID NO: 228 - DNA, 502 bp, Homo sapiens
  Genbank Accession No. AA700160
atttttactggaatgtagacattacttttgaatatataggacaatagagattgcatcaaagcaatgctgcctaacagacacagcaggaaacttattggcatggcaggctagtatattttctcattagtatatcaactaattataggaaaagtactgtttctaaagtgcttgaaacatttgcctacgtcactgttctctttttcaatgacctccttcataaagtcaaactctagcccaaacttaagcccatctcactgcatattgtaaagaatggattctgaatgaattaacagaaatgcttttatataggaggttgcagagattctcttgcagtcaatgtctagaggagctgaccctcaggcatcactcagaggaagtcccagccaagattcacagatctgtatgtagccttcggtcaatatcacagtgtacatcaggagtctcaagttcattgcacagaactggtcctgtagcagggaagactcagaattcctgagttttc

SEQ ID NO: 229 - DNA, 519 bp, Homo sapiens
  Genbank Accession No. AA700621
gccagacagagtctatcatgatttctggtgtagacaacattctccctctcagataggatcccttgagtttcatgatcacctttcttatcctattatttggagtactcatttaagagtcacctactgttaaggtgactcttaaatacaaatacaagacatcttttagacatcttgaccataaacctgtgagggcagattttcatttgctaaaataaataagagggcagtgtcgttgcatgcgttccatattttttgatggccaggaagagtcctggagcctacaagagatttatcaggaacagatgagcagcgtctgacttaaggccacatcctcaaagatgctgtggagtgggtgagcacgattcttactgagacgccccagatggactgtgttgggggttttcatgatttttttctacttttgtttagtgaaacaggaatggatttacaaaaatgccatcatggatagcataagagatttcaaaagtctttattctttttcttcataggctcaagttt

SEQ ID NO: 230 - DNA, 564 bp, Homo sapiens
  Genbank Accession No. AA700625
  unsure (1)..(564): n = a or c or g or t
gaggggatgtcagagactttattgccgtcctgcccaacaaaggccttcaggntttacatgagagcaggctgggaagcagccccagcagtggggtcatgcctgagacccctccagcaggtcatgggaggaaggaatggcttatactgcagcaggacgccttcaggttagacaccaggcagcacttctgggcatggggcctgggcaccaaccgcaccctccaggctctgtagaaaggccaccactgccaggttcccggctgcctctgcctatggggaagcagtggggaggggctgccttggggccactgactagcagcctggcccaaggatccccatccccaggatgccctcccctgtccccagcccacacacacagggccccagcagctcctccactctcgtcacccccaccactcagagccccgggaagggacccagtctgtgcgggtcctgcatggggagggccaggcatttgggggaggggcagagcggggaggggcagagcagtgagctggtgaattgtccaggtgtccttcctggaggtggcagcctttggagagggtgc

SEQ ID NO: 231 - DNA, 522 bp, Homo sapiens
  Genbank Accession No. AA701983
gcttgacaacatactctttattccctttgcagattcgcctcctactcccccagcagaggttcctggatcagcaccaaacacactgatccttaaatcctcatctcagggtccattttcctggaatccaagacaaggaagcactcccgaatctccccgaggattctgcctaagggcaacactggccctcgtacccgaggggagagctgtgtatgttcctgagctgcaggtgggtgtctgcctgcctgcgagcgagacctctggaggggtctgtgccgacaggtctttccacaatgagcctggagggatggagccaatcacaccatttattgtgccctggttctgacgcccactcttgctattctgcatgggtgaagatcgggtcttccaggagttttctggagccaggggagagtcgacagttctcatcctcccagcagaggcagaatgtaaaaccagtgctccatggtgacgtctcactgggactgaccagagctcccagctacccctccagctgggccctgg

SEQ ID NO: 232 - DNA, 447 bp, Homo sapiens
  Genbank Accession No. AA702143
aacacatctactaaaatgtgcagaaagaagaataagtccttctgggtcgggggaggtagagagcacaagcatgaataagacatagatgctgccttcagtgaaatttgtggtctccgagggaagacagtggataatgcaggtaggagataaatgtccattatatgatgaaaatgaaaattgtccaactggatcttcagaaaaccgctgttaatattccattgtttctgagttagaagcacatgaaataattacccttcactatttaccagttacacaggcatacactgatttgttgaatttgcttgaaaagtagagccgaagatcctttgaaaatggaagaggttttcatgggggaagagatgagtgggggcgaatgagaaacatctcctttatatggcagatgcggcagtttcttgatgatggggagaagcagcttaacgtattagg

SEQ ID NO: 233 - DNA, 462 bp, Homo sapiens
  Genbank Accession No. AA702220
cagattattttcatattttattcaggatagtgtgattcattcaatacaaaaaataaaaactagataaatgcaagacttgcttgtccacttctaaatttaaattaaaatatataattcaacttactcttttactgaggcaaataactggccacatactgcaacctaatgtgcagcagcaacaaaggcagccacaaagtagccaacgtacattaacaggaaggttcttcttaagacaactgttaactctgttgatgctggctttaaattcttcaggagctacttttccagttaatgaagaagggaattcagattcaaatttgttgctcagtccaaatacggtgacgtgaccggagccgcggacgaccaccgggtccggcgagtacttgagcagctgctcctccagggcccgctcctcgtcctcctcttcctcatagatttcgtcgaaatccgccatcctgagcc

SEQ ID NO: 234 - DNA, 499 bp, Homo sapiens
  Genbank Accession No. AA703316
cagtgtttattaagtagattcagtcttatatatgatatacagattcaaaaggaaaaggattccacatacttatgaaatcagtgcatttagcaagtaataccatggagataacagttcgattaacagctcattggtcttttgttaagtgagggagagagggagtcggcctgtgctagtcattccacaaacaaaacagaatttagtcacatcacgtagagaagacacattctaagaattaaaatattaagccacatttactggtaaaactcactatatagaacacaaataatttttatagagagcattgaggaggaagtcctcacctgcttagaagagccacgttaagttgcataggtgcatatctgtaaaaatataatttagaggtgaagccattaatagagtcacctttaaaagttggtgccatccactgtttgccttaagtgcttactatctggagccatgtgcccctcaccggaggtgggacctcatgaaggagctg

SEQ ID NO: 235 - DNA, 923 bp, Homo sapiens
  Genbank Accession No. AA704137
  unsure (1)..(923): n = a or c or g or t
ttgtggctgagaatgctggagatgctcagttctctccctcacaaggtaggccacaaattcttggtggtgccctcacatctggggtcttcaggcaccagccatgcctgccgaggagtgctgtcaggacagaccatgtccgtgctaggcccaggcacagcccaaccactcctcatccaagtctctcccaggtttctggtcccgatgggcaaggatgacccctccagtggctggtaccccaccatcccactacccctcacatgctctcactctccatcaggtccccaatcctggcttccctcttcacgaactctcaaagaaaaggaaggataaaacctaaataaaccagacagaagcagctctggaacaaaaagtacaaaaagacagccagaggtgtgcggagagggtgaggtggccgcgtggacgtgggtagataatcgcatgcagcactggaactcctgatgaggggtggggtcccacttctcctcaaggtttgaaggattggggggaaggggtcagctgactcagagaagtaggatctctgcactggaacttgaggcttctgtctcctccatgggccccacagtcacagggacatgaaatccgtggcctggaggaggagagggagaacagagaagcagcgcccagaggtgttctgagcagcaggttgatgccctaaaattaacagtttgtcttttagcactgtgtacttcttggaagagatgngttgggaatggcacagtggtggagattacacatttaagttgcccctctcctctgcaatggaaggcggaaaaaaaagagccctccatgtttatttcccgggaaatttttttggaggagggaaattgttcccgagaccccccaagggcccaaaaagccgtgtttctttttttcacggggaaaggaaaaccaaacacgagagg

SEQ ID NO: 236 - DNA, 480 bp, Homo sapiens
  Genbank Accession No. AA704465
tactaacaaagatcagcctgaaaaatggagctgcaaacatagataagcaagctggaacttcggaagggtgaatgccggcagctgtgccaatagaaaagggctacctgtgggccaggcatgtccaacacagaggctccatttttgttgttgttgttgttactacatgtagagtaaaggaatgggcaatatgatgcagctcaggaagaagacccacttaagacccacttacataatacaagattagggtgggagtggacacaaatttgccacctatgcaaattttccgtaatccatgcaaatgacatacctctaaccaatttttcatgctccatgcaaatgacatacctggtccaaccaatctttcgtgccctgtgtaaatcaaacaccgcccccctcatcaggcatctatataatcccatgcatttcactgtggagtctgcagctcatttggcacccctctctctgcagcacagggagctt

SEQ ID NO: 237 - DNA, 514 bp, Homo sapiens
  Genbank Accession No. AA705628
tttttcttttttaaaattaaattttattattttgctctaacaaagtaacctcctactttttcaaggctcagaggtggtcaacaatttgcccaactcacatggcagatagtggcggagtcaaacagggcactcaggtagggctattccagcctagagccgtttgcttggcctgcagtaccgcctttgccataagagccactcatggctggtcctggaggaggcaggacatccccaaagatgcttattgacgccagctggacgtggctggcgggaagactggcacctgttcatgaaaataaaatctcctgataaggttttcttgcggacgctggttgagcctgaatcaacaaacaacatcctgaacctgagcaccccttgctgagctaggaggaaaggaagggtgaggggaacgtactccagctctgtttgtcagcttcattagttcacagagtttatgactgctgcagggaacatttttgtgtgtattcaacacattctgttttatcctcgtgcc

SEQ ID NO: 238 - DNA, 566 bp, Homo sapiens
  Genbank Accession No. AA707308
ctaagaaagcctataaaaaggtttctgaataaagactgaacagtagtcacagtaagtaaacacaattttaatttacaaaatatgattttgctgttgcagttttgatacgtatttccagtgtgtagatccgttcatcgcacacatctttgggttgaacaagctccacccgtcctcaagtgctgaacaccccaagctgtggccccgcttggaaggcagtgcttctgaaggttcccagcagatctcttaacagaccacagttggaagttagcgtttctgccttgaccagcaacatactcatcctattttaacatggcgaaaggtcaccaattaatcttctcccttcccttgggtagtagctccttgagggaggcagaggacggattttaaaacccatggtgcaaaaaacacaagagctgtggtttgcagtccttcatcagaccacttgagaaaacaaagggactgttgtcaggaacgggattacttactggccagaaatggaaaaaggctaacaaaaaggtatgatggaaataatttctccaaaccttccttgtagccccgaaaaaaag

SEQ ID NO: 239 - DNA, 345 bp, Homo sapiens
  Genbank Accession No. AA721234
tttttttttttttttcaaagtgcaaaattgaccaatggattttaatgtaagagtataaaaatttcttgatatggcttcagattgtacattgtacctgtacgtagaaggtcctggagcttgttattatttcaaacaggttgtccctcattaagagatcaccagacttgaccagacattcatgggtcttcagaacatccttaagaaatatggtgcgcagtggttctcggtcctgctcacacttgaagtagcagatggtaaagtcatcaagtgcaaagaagcgacgtttccagctcttccgcacattcccttgcttcacgcagtaaccactcttaatgaggggaggcc

SEQ ID NO: 240 - DNA, 472 bp, Homo sapiens
  Genbank Accession No. AA725820
  unsure (1)..(472): n = a or c or g or t
ttattaaaatgtgcatcacccttttatcttaaaatgtgcatcactgtctcgtgctcggcgcatggaccctcagcgtggtggcccgctggggctccgttcccgcccagctcccgcgaccgcagggagcaggcgcactcacgtggcgcgggcccgggggctcccgcccatcggacggtagacgtcgatgggcacgtgcagcagcgtcaggcagtggcatccagcgcagcgacgaagcggcctgaccgggttgtgctccgtcgctaccgcctccgggctgtccctgggactcggcggcggcggcaaggccacgcgagtctccggcctcaatggcgaatctcccaccctgcgggcgctcctgggcgctcatgtccaagtcccggggcgctctcccggcggttgagaccggtcccaggctagaagcagctgccggagccctggccgcgggagaacgctccgcgtccaggcggacggn

SEQ ID NO: 241 - DNA, 310 bp, Homo sapiens
  Genbank Accession No. AA730798
gctcgaccataattggaaacaaagcagacatcaaaatgttatgttgattccagcagcaaattaagtattatctattcttaaaaataatttcaagactaaaagtaaaaatgtcaaaaattcatttgcggcgggcggatcatgaggtcaggagatcgagatcatcctggctcacacagtgaaaccccatctctactaaaaatacaaaaaattagccgggcgtggagcttgcagtgagccaagatcgtgccactgcactccagcctgggcaacagagcaagactccgtctcaaaaaaaaaaaaaaagtcgacg

SEQ ID NO: 242 - DNA, 464 bp, Homo sapiens
  Genbank Accession No. AA732736
  unsure (1)..(464): n = a or c or g or t
ttttaagggtccaattgatttatttactaactacaagataataaacgtattcagaacaagaatcagctgtttaacatggggtattccctgtcattggatagattcattcgagagatatcaggttattagatgagcttcagagcaaaagagttttattctccaaggttgtgctatggtaacccgctgattcaaaaatttttcctacaaattctttgccagaacactccagatgttgaagacttaaaattgtgacaaatcagccatgcaatattcatagacttcacaagcagagaagtgaactccactgtgcaaagacactgaggaaatagtgttctcagggatcaaagagcatatgtctttggctgagcatgtagaaaaaccggtatcagcgaatgcaggtgaagcggtgangcggtaanacagcggtaactattattccgttaggaaattcacggcttgacttt

SEQ ID NO: 243 - DNA, 460 bp, Homo sapiens
  Genbank Accession No. AA740146
tttgtctgcactttttgcagtttcaagccactcctttgcccccttctttgttctagaaaactctcctttaggcccacttcctcatggcagccttacttgatgaagttgctgaagaagctgaggtattgatgttgctgccattttcattcatctcaccccagctggtctggaaaagcttgtacatttgtatgggttaattctgggtccatagaaaagctagcctggtatctagatttagcaaggaccggagtttggttctgctgctgctacagatttcctaggtaattttgggcaagtctcttgatttatctgatcagtcttcttgatcacgaagagagctcagggaacaggctaacacaatgaacccttccagcaagtctatgaagtgatatcctcatgtggtaggtgggcacgcatgatcagagggatggagtgacttgtccggatcgcagggttgatg

SEQ ID NO: 244 - DNA, 486 bp, Homo sapiens
  Genbank Accession No. AA740543
tttgagcccaggctggagtgcagtggtgtgatctcggctcactgcaagctccgcctcctgggttcacaccattcccctgcctcagcctccggagtagctgggactacaggcacccgccaccaagcccggctaatttttttgtatttttagtagagaaggggtttcaccgtattagccaggatggtgaacatgcctttaatgcagccttgaacaggaattggccaagccttgccaacttgataaggagcaaaaaaggctctaaaggtgtatggctccccagatttctggagggcatccaaatgaatgagaacagggctgcaggtagtcacctgcagcatcctcctgggcacgatgacagagggaagtgtctctaccaagatccatcatgggggacaggttcccatagccccggacacacaacctaaaaaccgtggttctgtggaccgacacccgtaagaccctagagctggaaaggcccacctgtga

SEQ ID NO: 245 - DNA, 466 bp, Homo sapiens
  Genbank Accession No. AA741117
  unsure (1)..(466): n = a or c or g or t
tttttttttttgtgaatcctaaccgctgattttatttaaccgaatatatccaaaatatgatcacttccaggtcctcagtacagaaccaccacgagggaaacccagacctaggtttccggcgccgactctgaggcccgggagttttcttcttgcgtacccccagcgtgggctcaccgacccgcccccctccacctggagcgcctctgccttgcccccagacccaccagccaggagccagaggagggaggctgaggggcggggacgaggaagaggatgtggctggtgccctgggtggccgcagcgctngtctttcacgcctgtctcactccacacggtgccccgaccccagggtcccgaaagtcccaggctgttggacgtggtctgggtggggtgggagggacgacgctggcaaaggcgggctgagaggattctttatttcgcgttcagacccaacacactcggacac

SEQ ID NO: 246 - DNA, 526 bp, Homo sapiens
  Genbank Accession No. AA742697
  unsure (1)..(526): n = a or c or g or t
gctcttaaccacgtttattgagaggggccgggggaaggggatggacggtcctccccgcggcgggtatttcagccctcgcgggtgggcagcgtcttgtcctcaggtgtagatgctccagtctcggctcagccaaacactgtcagggcccccagcagggccttcagggcattcacggccccacggcctggggacccagctcagccacacacttctgggagccctctatgaggtggttcacggggatgcccaggctgctcagcaggagcttcagcgggttgagggtgccgagggggttggccagggtcccggccccgggctccggcgccgactccagcgcagancaggcttgggcacaggctttggcggagccactaagaaaagcagcagcggactgngaacaagggccacgcagagccccaggaaggggccgagctttcatggcgccggggctcggggcgcgccgggaacctgcggctgcccgggcaaaggcaagaggcttctttataccggttcttggccctcgtgc

SEQ ID NO: 247 - DNA, 285 bp, Homo sapiens
  Genbank Accession No. AA742993
gccaagcacatgatacattgatgatctgcttagtaagaataaatgttgctcctcagtttgagaggtttttgctgtctttgagaaatatattcccagacattctaatgtctaaatgccatttgagtagacaatcttcttcaatccatgcctggtaagtagtggggttctgtgtagccagcttattacactaacttctcctgactccagtcatagctccttattattttgtcatcaatgatgttaaccaaaccaaggaacatatttgctacttttcatatatctcac

SEQ ID NO: 248 - DNA, 466 bp, Homo sapiens
  Genbank Accession No. AA743820
tttttttttttttttttttttcaggggccaaggcaaaattggtttattaaaacagctatttgcaatggcagattttaaagacaaagacacaaataagtcaatggatataaaaaactgtaaaaggctgtaaatacatgatcatcatttataaaatcaacaacatctcatgtatctggcactttatggaaacccattttacattttatcatttggaataaatgaagggttttttttcctaaataaaatactttcctaccccataagctacgctttcaaagtgctcctttcttctggtacagtacccatctgacaggtgctcaaatctcctttagtcctctgccaatggacacacttttatctcttcattcagcttccttcctgagtctgctatggagttggaaatcaaacagccatgtttgttagaattgtttgtaaattaagattaaatagaatacaggttgactat

SEQ ID NO: 249 - DNA, 496 bp, Homo sapiens
  Genbank Accession No. AA765843
tttttttttttttttttttttttttttttttttttttttgtgcatgttttaatttattaacacaaacatttaaagtacgctttttaaaaaaataatcatgtcttggcattttttcaggtactatattcatagcctcaaaaaatagaagtggttgggtctcttctgcccctggggctgggtgagctgcagccgcaccggggccatgtccctccctagagagcgctcctcccttccagccagcaatgttgcccaacgcgggaggccagctgtgcagaacccagcatgcaggcatctcactcccaattcagcctgggaaatcggaactgagagccccacgatgaagccctgagctgatgctgacatgacactaattcactggaaacgagggtgatgggggcacaagcctctcatgctgtgcgccctgaagcccaccctctggatggaaggggacttctcacgcaactggagagttcagacattgtcctgagggtaatgg

SEQ ID NO: 250 - DNA, 398 bp, Homo sapiens
  Genbank Accession No. AA766126
atcactgttttaattatggcatttccccactgggaacattccttacaatcaaaagaagtgttatacatacttaacacttctgttcttacaatatattcagcagtatcagttacaaccatttgggtatgtgaactgttcgctaaataaaacatcatacagtaagtttcaagggccacaatggtatggcctcttctaccacagacaaatagattaattttggcaggcgttggaaatctggtaggtcatggtagcttcatcagaaacatgcagtcctttccttcgttagaggcatcagttcttagactgctggagggcttcagtgtagtaaatctatatacatagtccccaatttttttttttttgattttgagatggagtctcgctctgttgcccaggct

SEQ ID NO: 251 - DNA, 440 bp, Homo sapiens
  Genbank Accession No. AA766775
ttttttttttttttaaataactataaataatattaattagaatttatggaatgcacaattcatggaattcaccagaacacaagaaacctttgagacagtgttgcagtattcacttctacagacaaggacgacccatcctatttcccctgcaaagacagctgtccttccctacgaaggattttaaataattctcactatgctgctcgccgatcatccccaaagaaatattaatttacaaaataacccaatatccatataattcttttgacaaataaaaatcttaaattaaaaagcatgattctctccctctccccaccccctttattccaatttcaggtagcttggcactgagtaattgaacattaaaaaatcgagtttgtagacttcgtacagctgcgtttggtgctctgagctgatgttctggaagacttctgtggtca

SEQ ID NO: 252 - DNA, 503 bp, Homo sapiens
  Genbank Accession No. AA767440
tttttttttgttttttgtttttttgagacagtctcgctttgtcacccaggctggagtgcagtggcacaaccttggctcactgcaacctccgcctcctgggttcaagtgattctcgtgcctcccaggtagctgggattacaggtgtgcaccaccatgcccagctaatttttatatttttagtagagatggggttttgccatgtcggccaaactggtttagaactcctggcctcaaatggtctgcccaccttggcatcccaaaatgctgggattacaggcataagccaccgcgcccagccaacacttaactgatttcttatttcctaatagaaaggattctgtttggtatcctataatactgatgcagcttgatttgctctgtacacccaggagtcttctgacaactcttgtgttcctgtggtggctaatgtcccacaaaatggaaacacatatggcaaggaaaattaaagtagaacctgtgatagtaagaaagttcatgaatgc

SEQ ID NO: 253 - DNA, 538 bp, Homo sapiens
  Genbank Accession No. AA767895
tttttttttccaggttgtcatttttcattgtgcatatttcctgtctgagtatagcaatatctgtcttcaaaatgcaattttcatccatcagatctttcacttcttcatgattatgaaaatcctgatttggagtatttcttgcagtctttggtttcatctctagtgattgaacagttggttcaagttgttttgcttcaacttctttcttatattgtttctctttcctttctaattcttctcgattttttttgtgcagcatattaacatttgttttttcttcattttcttgttttaaggtgcatctatcatgctcttccttcagtttcttgggaaattgctgaggatatgttttcccaatctttctttgttgggttaatctgtcagcagcagcagaaaatgtactatgacatatattttctgatagttgtattttttcacttttgtatgtattatttccttctatgacctgtggttgcttcttttcacttctttcactgtgtttacttatatagcagcagccagtctagactgataagat

SEQ ID NO: 254 - DNA, 575 bp, Homo sapiens
  Genbank Accession No. AA769578
ttttttttttttttttttttttttgccatttttttctctttattataaaggttatatatgaacaagaatatataaaatatatatgtataaagagtattttaaaagtgaacatccatgcaatcaccacccaagacaagaaatagaacattgccagcatcccagaagcaccaggtgccactccccaatcacactgctgtacttctccacagaggaaatcattattctggttctggggacagcaaaacacttgcttttctttacagttgtatctcatatatataactatatacccttaaaacaatatagttgttcagtttatactgttttaaactttatacaaatggaatcatgttgatggcatccttctgtgatttgcttcttttgctctatgctatgtctgtgatattcatctatgttgtggttagctatttccttcattttcaccactgtgtagaattctactgtttcaatataaatgccatggtacaatttaaccattctaccattgctgaatatttggttcatttctaacttttggatattgcagtgctgctatgaacattaaaaaatttttt

SEQ ID NO: 255 - DNA, 607 bp, Homo sapiens
  Genbank Accession No. AA769588
ttttttttttttttttttttttttttttttttgactcattagaagtgttaatcgttttttaccacgctgaaatgaaggtataaagtcagtctgtgctgtcgtgaaattccaaggagatttggaagtaagatcattatttactggtcctttagaatagaccaaaaaaaaaaaaaaaaaaaaaagacttaaaaaacgagggctgtcccctgcagactctggcaggaccctgggctgctctgggggacacaggccaggggagtttcaccgacttgattcacagtgattctggtttgcctgtttctccatgtggccacgagtcggggacgtgtccagcagtgggcatgcctacaccttgtagttaagctcagcgttcatctgggtgtacatctcgtagatgacatcgatggtcgccgtgtagttgactaggaagaggcggatcttctccaggcactcctcctccgtaacattctgccccttggagagcgctttcaggaagtcagacttatagggtgctgcgtacagtgctgcctggaagatcttctgcacgatccagccatgggtacttcttgaggggcatctcgtagggcttggtggcgttgaaccggat

SEQ ID NO: 256 - DNA, 504 bp, Homo sapiens
  Genbank Accession No. AA772055
ttttttttgcaaaacaaagaaaaatattttattgtaacttaaaattcatcccctagacaacagataacgcccacattggatgttatttagcagacatagtgaagatgcctttggacaattatcagcattgatgaatatgaagatgtcacatcaaagtcaaactttttcaggttattgggtttcctgaacataactggcaaaaaggaactttcaacacaacaagtagtttagttttttttttttttatgtcacttattttatttactaaccttgacagggactaaagaatgaggtacagaaaactttccagaagtctgagtgtggtgtagaagtccaagacaacttggagctccattattgcattattaagtagaatgaactgttatgaaattctccatattccaggtttactacatagaaaagtactatttacctacctcacagaggtattgtgaggatttgtgtttataaagtgcttcaggcgccttcgaagaaaggcaacat

SEQ ID NO: 257 - DNA, 529 bp, Homo sapiens
  Genbank Accession No. AA772278
tttttctgatgtggtggtaactttttgagggataatgaaattatgttcagcctcaaaaccctgaaaattaattataatgctgctcagtcttgcttatgcatttgtttgctctaacatgctctttccattaaaaattgttaacttcctccattgctgttaaaaaaattaaaaagggatggaaaaaagagagagacaaaaaagatgaaaaaaaaaaaaaaaaaagaaaggaaaaggcaaaagcacttccctgggggaaaaactgtcagatagaccgatagtgttattgttgcatggttattttaataaaagtattcttatatgttatattattaacaataatttaattaaaaacccaaaatactctattgtttcatttctcttttaatatttctctctctcctctaagaaaatgttgcaggaagtttggatcctcttggtttccagcaaaacaagagaataaaacttccatgcaacccgatggcaatacgaaaaaggagttcatattgtttgcagtgacacaagaatctac

SEQ ID NO: 258 - DNA, 471 bp, Homo sapiens
  Genbank Accession No. AA772360
gtcccaatcgcttcaaatagtatacccagtcgcttcaaaataggtacccactattgacatttcaatgtcccagactgatacctgtagtagcacaggcaaaggtccaaccccaccgaaaggcttaaacatttaccttctctgaaaaactattgaaatataaagagagtccccagtcacaggggcaacttctgtaaccaaatccagatctgaggaaactcctgtaaccccatttgggtgttctttctaagccaatagggttacaggttggtacagtgacacattgagaatggggctacaaatacttttcccaccatctaggatgaaatacacgaaatcctgttgaaatcttggtttttatgcctttgctcatcagaataaacgtaaatgctgaaaaacaaataacctcctgatccactgtcttgcctcctggtgagaaatgattctatcccctgtttattgggaaatttccaa

SEQ ID NO: 259 - DNA, 570 bp, Homo sapiens
  Genbank Accession No. AA772381
  unsure (1)..(570): n = a or c or g or t
ttttttcatagtacaagattttatttgctaagctttacaaattaaactctaaaaaattattacaatgatactgaaagatattttattggccttttaaaagacaaacacaaatgagaattatcttatttagaaaattaactttgaaaattatcttaaatgaaataaatataatatctaatacaatctcttcctgcaagatctcttaagatgggcaatcctaaaaatgcagcttcccatctgaaaatacctagaactagtatgtcccttaaaacaaaatttatgtttctttataaggacatttgggtttcccacattttcttaaaatttgtcctaaaacaaattctatctttaacactcacgtttcttaatatatatatgtgtgtgtgtatatatatgtgtatacatatacacatatnatattaggttcaacttattttaaaattaggtgaaggctatctggccacattttctaggaaaactttgcaggaagtaggtaatgccagggtatttacgggaggagtttcctaaataataatgtaaatacacggttcaagagccggacaaaccctt

SEQ ID NO: 260 - DNA, 368 bp, Homo sapiens
  Genbank Accession No. AA775536
ttttgcaggaggggagactttattgatttttgcagcatccgctgtgggctggcttgggctgtgggcagggacacggagttggccttgcagagccggctgatggggggagtgggccaaatgtgttcaggaaggaggtggctgctgggtcgctcagtaggtgatggatgtcttcagactcgactcaactgtcttcttcaggatggtgtggcagctggagccagcgctggagccagacacagagcaggaatccaaaacagggtccttcccagagcccagaatgatgttggagcctccagtcacaatgctggtgcagcaggacccagggctgcctttcccactaccgagtccacaagtgctcccaagcctca

SEQ ID NO: 261 - DNA, 501 bp, Homo sapiens
  Genbank Accession No. AA775833
tgaaacctcactcctaccggccgctcatgctgaggagagcggaccgggacacagcagcggacccgaaagagcgcagactcgggacgaaccggccgctctgccccggacacagcgacctcgggccctccccgcaaacactcctttggactcccagattcgcgtctccttccgccggcgcggcggggcagcagcgcgagagggtcagcgggagacgaaaaaatgaagagggccgcgggaaagtaggcgacacgtattcaaagcttttgggggtctacctttgtattcgttgctccctcagaggtggaggtgaggggaaagtgaagtgtagtggttccactctgatcacaaaataaactcctgggttgacgcctcacccgcggtttgatgttcagagcacacagcgcccgccgcctgagttagcctgaattagcagtcccgcagtaacagcagcagagcaggacaacacttctactgaaaactaagccccaaagtcacagcaga

SEQ ID NO: 262 - DNA, 485 bp, Homo sapiens
  Genbank Accession No. AA777011
  unsure (1)..(485): n = a or c or g or t
ctcaccacacgggtgctctgacctgcttggaagaggccaacggggcagctctggaagggttgggggctccctgacaaggcgctggggctgcagctctgtttagaatcaccttcgtggaccctgatgttagaatcccacccccagataattacctttcaagtcttaggtgagcagaattgcatatttattgagaaaagcaaagtggaccctttcttcctctccccttagtaatttatttttctgaaaatggattcttttgtgtttgtacagattgctagtctgtgtctgtctgatcagaaggatgtatccccatacctaacattccatatcactacactgatgtgggctggggcagtaggggcaggacaggtgccaggctggctgttcctctgcatgcctggtgcaccctgtggccgctagcccttggccaaggcattcctgattgcagatcccagntgctgccacagggacaccaccaggcacct

SEQ ID NO: 263 - DNA, 466 bp, Homo sapiens
  Genbank Accession No. AA778124
gcgaccgcggcgatcacggcggacaccacggcggcggcggggccatctcctcgccgtgcgcccaaggagggccggcaccgcccggcgccgggcagctgctgcgccccgcgcgtaccatcgaagccgccctggagctggtggctgttgctgatgagcgcctcgaccgcgtcctcggggctgaagccagacgcctcggggttcagctgctgcgagtagccggtcatccagtagtagtcttccaggtgcgccttctgctcgctgcccgagcccgggtgggcgccgagaagctgggggaagggggcacgagctgcacggcgtcgtcatgggggtggaggacagcgagcccccgcgactagagacggccgcactggctgatgatgcggtcggtctacaccggttcctttttcacttcaaacttcatcagatcgaagtcattaacatattccatggccaggggactggtcgg

SEQ ID NO: 264 - DNA, 499 bp, Homo sapiens
  Genbank Accession No. AA778522
ttttattgttacagaaccattaaatacaacttatacacaagcaagctgggcggcgtccggggggcagggagagtgcaagagggtcaggggtgagcagtccgggcccggtcctggagggggctgaggctgccgtcgtgggaggggcttggctggcggaggcggggctgcctgtggaggccttgaagctttgccagcagctcctggatgaagtcctcgacaggtttcccacatgacttcaggagtccctggattttccggcttctctcctcttcactctctaactccaacaattcatcaatgttgatctcatcgggcatgtctgcctcctagggccagggagggaggggtgcttaggatccccttccctccctccctcgcctttgtccagggctctgcaggagccacccggccccagggccaagctggcgggttctggagcattaatgtggcagtccgggacagcactgccaagacgggacatctgggtgttgggggggag

SEQ ID NO: 265 - DNA, 423 bp, Homo sapiens
  Genbank Accession No. AA778773
ggtagagacaggggtctttctatgttgcccagcctagtcttgaactcttagcttcaattgatttcccccacctcggcctcccaaagtgctgggattgtaggcatgagccaccactgcccggccaatcttaaatcatagtagcacttctggtggccttcatgtcttatgctacactctcttatattttgtgatatttcttgtaatcctgggacaggcagtatcactgttaggattagctcattcctgtgaagcaagaaagagactaagggttaaagccaacttagaaaagacaagccagcaataaaacatttgatttcagttaaatatttattgtctgcttactgcactgtgcttgagcctggggatacagagatgagaggtatccctgccctgaagatgcttacagactagtaggggataagg

SEQ ID NO: 266 - DNA, 606 bp, Homo sapiens
  Genbank Accession No. AA779712
attgaaacaacaataaagagtttattctctctctcagtttctgtgggtcaagaattcaagagcagtttagcgacgagttctgccttgatgtctctcttgaagttgtagtcaagatgtcaactaggcttgtagttatctgaaagcttgactggggttgaccactctgtactgcaagctggttcactcacatggatagcaagttggtgctggcttttggtggaaggcctcagtttctctccacattggcctctccatagggctgcttggtggcccaatttcctccaccaaagtgacccgttcctctctgtttcaagcttgctttctctggccctccagtatctgggtcaacttgggcccaaaatatattccagctttggcccttctccaggtctgtttctccattccttttcttctctgtttccagctgttgccgctccagctgcttctgatgcttctcctcccgggcctgggcattcatctgctgcacctcgatggtgtcaggcttcctgcggcgcatatacaactcatggttgcccatgcagagctgcaggatccgcttgttgattctcagacgtggggcataaaacacaaagtcaggtgccttct

SEQ ID NO: 267 - DNA, 472 bp, Homo sapiens
  Genbank Accession No. AA779891
tttaatgacaactttttggttaggatttttgttttgagaaaaataagaatgttataaaaataagatagccaatttattttccataaaatcaataagtgacagtaaatctgtccatcacattaaagaccaccaaaaatgttattcctgccatgcatttgaaatgagaggggaaaattttataaacattttaatgtgcgaaaaaggtattttcctgcagtagcccctgagatcttagtattttgtttgccaggaagttaactttctatcctattagaatatacctatttttaaaggttagtaactaattataatttccttaataagggtgaaagtgcaaaatttcaagagagccattatgataatttgttcagatttttcacaaagatttttctagttgcttccaaacagtctgtggaaaactcactctttagggataaaacatttgagagcaatcgaaatgtaggatataatc

SEQ ID NO: 268 - DNA, 489 bp, Homo sapiens
  Genbank Accession No. AA780912
tttttttttttttttgagactgattctcactctgtcgcccagactggactgcagtggcacaatctcggctcactgcaacctccgcctcccgggtttgagcaagcaattctcttgtctcatcctctggagcagctgggactagaggccacggcaacactcccagctacctcttttgtatttttagtagagatgggatttcaccatgttggccaggctggtctcaaaactcctaacctcaggtgaaccacctgcctcggcctcccaagtgctgggattacaggcgtgcgaccgcacccggccgacccttcttaaaaacacagagaactgaggtgtcctgatgggcatccaaaggaaaaagcagcccagcgagttttgcaggcccggggtcagcagggggacgaggctctcaccccctagcacagccacgaatttctccagcaaatacaggatctgcttcaggtacatcaggttcttgggcttcaaacgctt

SEQ ID NO: 269 - DNA, 426 bp, Homo sapiens
  Genbank Accession No. AA781220
gtgtttttttatgagttaaactgtgtcctgtaatttcagaaatgaataaagggaatttgttaaaattaaataacattgtatttctagtaccaccaccagtttacctacatgcgaaacatgcttctgtacaacaatgtaaacttcacagcaagccattgttacattcattagagcagaattttccattttctttaaattacaacattatttggggctgagattgctgaacacacaggtaagccaacaataataggacaatttagtttcacagtggttttcttaacacaaagttcattttaagcatctttgcaaaacatttcacattaaacttaagtttctaagtgacttcctttagagccttcttgttcagatattttccaccctcttgtctttatatgcttagcatgtgtgttgtttgattaggta

SEQ ID NO: 270 - DNA, 367 bp, Homo sapiens
  Genbank Accession No. AA781854
tttcaaaatcaccccgtggccaatttattgcgaggtcgcaagggagacactgctacaaagcatgaccccaaaggtgcagaaatgcctgcattaggctggaagattccctgaggtggctcaggcaggtaagaaacccacacagtcctgggtcctccccaagcctcggacgtgcagctgctgcttcactggaattcttctctcctcctggaaacttgctccagttgtgtcacgatggccaccaggtccccgcagtccttcttgtggaactcggtccaggccttggtcttgcagtacttgctgcaggtcaggatcccgtagcagcgagggcagggcaagaggcggaccccgatggagcggccacactggt

SEQ ID NO: 271 - DNA, 469 bp, Homo sapiens
  Genbank Accession No. AA807273
tattttatttatgaataggttagtttatatttagagagagaggaagaatcatttgggttctgtaaacatcagtacactttattatgcctctgtctggctgaaaaacaccagctcctgctgactccacaagggcacggctgcagagagtgctgcctgccaggtgtgaggtttccagttaaaagtttcagcagggacaccatttgctggatgtgtttaagattaaaattgcttcgtaaaatgtgataaataggttactatacaccttggtcaatatagttaaagcaccagcaatcaaaatacaccgctccgggccgggtgaagtggctcacgcccgtaatcccagaactttgggaggccgaggtgggcagatcacttttagtcaggagtcagagaccaggcctcaagtgatccacctgcctcggcctcccaacgtgctgggattacgtcgggtgtgagccacccacccagc

SEQ ID NO: 272 - DNA, 571 bp, Homo sapiens
  Genbank Accession No. AA811088
  unsure (1)..(571): n = a or c or g or t
tttttttttttttatcttttctcagggactttattattttttgtctttaacaaataagtcagtgaatgtttgaattttgttgttggaaagctgggatgctagtcatctctgcctattacgacaaaagcctatcgaccccagcagccagcacatggcaggctgagctgaagcaagcaatagcctggagaataaacacaatatgaaaagctaggtgcatttcttaccgattcccacccacacacgcatattcccactccccctcccacctttcctcctgcccatacatgaggcacaagggaagaagcagggaggagggtatgcagttcttagatagcaacagaagcagctcttgagcttgggtagagaagagcaggcaaagatcacctcgggatgggagggagtggtggagcaccctttctcttcggttggatacactccggctttcgtatcttggcagtttgctgagataacttatggtcgtttgtacatatggctctggaggtgggcaatcggaaatcggatggtagtagaatctgctttcccacatcatctcacatggagagtcntggaa

SEQ ID NO: 273 - DNA, 482 bp, Homo sapiens
  Genbank Accession No. AA811371
ttttttttttttaatgtcaatcagtaatctttatttttcttcattagtggttgtgtcatattgcttaaaaaaatttttaaggatgaaaaaagttcagtcatatgctgtaacaactgatatacacattcaaaaacaatttaaatgaaggttttacatattattgtgatatcagtatgtggggcaggtgacatatatggcatgttccagtgagcagatactattagtatacttccaatagggagaatggcccaacagaacttgggagatgttttctccagactacatattacattacaagaaaaaaaaaaaggtagaggaagggaggaagggaaggggagggaggaagtggagagggagagggagaggaagagagagaggcagagggagagggaaaggtggggagagagggagggggcagagagacagggagagagagggagagggagagagagggagggggagagagagagagagaaagaaaa

SEQ ID NO: 274 - DNA, 410 bp, Homo sapiens
  Genbank Accession No. AA812024
tttctcttaataatatgggtatttggccgggcacggtggctcaggcctgtaatcccagcccagaatgtctttatttttaaaagacacgtgctgacatgtttagggatgaaatgtcctgagatctataacttactttcaaatggtcccagaaaaaatacaaagcaaaagaaacccaaaagccaacaattgccaagttcagcaggtggatatataggacagtattatgccattcttttaatttttctgtagagactcaaaataaacacacacaaatatttgtgtacacattcacacaatcacacacacactctcacacaatcaccccatcatctgttcttaatccttcagatcatgtcacccaagcccccagtggctcccgtcttaccatgaaaacccaggccaggcagtgg

SEQ ID NO: 275 - DNA, 459 bp, Homo sapiens
  Genbank Accession No. AA813527
tttactttgcatgtcttttattctgatgcattgcacgttcttccatgcattgatgaggcgtgtgctccttcctcagctggcagtttactgtcctggtctgaggatcttctggggactggtctctcttgctgactctttcgtgtcattttcacaaacaaccttttgaggaaaaaaagtctgctgggtgtcatcgttctgctctgaactaggaggactgactttcagagggttctcggtgtcctcttcttccacagcgctcctgttgacacaaacagcctcatgttcctccagatttttgatggggaccacgtggcaggcgttgtatttgcaggtggccatctttttggctttcttggggttctttctcctgcacgatgccaggtggtactggaatctgctgagtgggattcggtggtgaggatcataagggcaaatttcaaaggcttctggctccatgag

SEQ ID NO: 276 - DNA, 459 bp, Homo sapiens
  Genbank Accession No. AA814901
tttttttttggagagacagtgtcttgttctgttgctcaggctggttttgaactcctgggctcaagtgatccttctgccttggcttcccaaagtgctgggattataggcatgagccactgtgcctgaccatatttgcttttcttacaagtattactgttataaggcacctctgagggggccgctctttatctttcctttaacctggtagcccagtaaatttagggtttgggcccctgctgtgtgccctctttttttttttttttttgagagagaggaggtctcactatattgcctaggccggtctctaattcctggactcaggagatcctctcacctcagcctcccaaagtgctgggattttgggcatgagctaccatgcctggctcagccctctccctttgtcagccagaacagggcagccttgaactcaactgctccttccagctgcctgcctcttcc

SEQ ID NO: 277 - DNA, 426 bp, Homo sapiens
  Genbank Accession No. AA815371
tttgacatggagaaatttaattttgataggttctagtacacagaagttaagcttcctaacagccatgagtttacagcttcctctttctgaatttggcagtgtttttgatgtccaaattgccacgatgtctacacatatttacaatagtttatattattcattttgtattactaattgtgcactttggccaacagtgtttcatacatcatggttggtttccaactccgcttgaaaattggaagtgacagccccttatggaatgttgcttttgacactcttccatttaaggctctgtgtccccacagtgttacgaagacaaatagtcatcactcttccattttgagggggccagggtaagcagatgcaatttgagaatacaaagtacctgtttactgctgcgatgtgtggggcctgtatccgccactg

SEQ ID NO: 278 - DNA, 438 bp, Homo sapiens
  Genbank Accession No. AA829709
  unsure (1)..(438): n = a or c or g or t
gaatatagaaatagtatttttattaggcttggggccacattttggttagaaagtgcagaatcagatgataaaaggaaggggtaagagcaagaggtagtggaagtcgcaaaaataatttgcaaagtgaccaatccagctgtccacaaggaattcatccatatataaacactcagatgtttctgggacggttgagtaagtatctaatccatgtcagaaaaatcagctacttttctcaggaggcctgccacaccaaacattcatcttcctacagtttttattcatgtttattggtatggtgccttgagttttcgatttataataacatccctctctcactgtgcagcattcaccaggtggttccacagccagcagaaaatgtggngcgacagcattgcctgacttcagtaatgagcagaaagcttccttaaaactgtggtt

SEQ ID NO: 279 - DNA, 426 bp, Homo sapiens
  Genbank Accession No. AA830533
tttttttttgtttttctaacaatagtctgaaacataaaattaagtttgggtttaaaaacaattcttgaaactgtcataaacatatgatatctattgattaaacagtaataaaaagacacaaggtataagaattgaggcttggctgttctggctgtatactaacttcatataccctgacagaataaactatctttttaaaaagtgctttgtacactgcacaattatagctttaccaaataaaaactcaatgacatgtcgctgaaatttgcttcttctagaatttgaaattatttaaaatactgcatgagaatatttttatcatattatataatatgacttcatcaacatgaagttcagggccccagatgcctctctgagaagttcattatttgatagggttggatcaaatgtaaaggtccaggtgtt

SEQ ID NO: 280 - DNA, 402 bp, Homo sapiens
  Genbank Accession No. AA832417
ttttttttttttttttttttttcttggagaatgagtgcaaggttttattgagtggaagtagctctcagcagatgggggagccaaaagggagaatagttttcccctgaagtcaggttattcagcggcccaggctctcctctggctgccccagccaaactctatgtcaatccattggtcggtggcctgccagagtgctggtgcctgttggtggattcctctcagcgtcgagagtttttccctctcaggaaagggagagaagtggcagccacccatgtgttcttgcactgatgtgctcctctcgacgtccaacctcctgtgtgtctgcctgtctcccgtaggtctcagtccaggttctgctatgcctttctcctggtgagccacctatttaagagtcgctgtgtc

SEQ ID NO: 281 - DNA, 543 bp, Homo sapiens
  Genbank Accession No. AA838748
ttttttgagagatcactcaactgttttatttcttaagcttggtaatacagtcatagattttcatcatggtattctttatatgtttttgtatgccttaaatgttgcacaataaaaacgttttaagtaatagaagaggaactcttcaagcagtgtacggtggtgtttttcttaaaggatgaattatcaaatgcttgctccccatggaagcctcttaaggaaaagttaaaactttgaatatgtcttatgggaagagactgacgtagcacaaatcattaaaaaaccttcacctaattgtcttcctggtcattttcatatggaccaaatgttcactctagggcccaaaaaacatttgtttcctgcatgtattcaatcttctggaacttgatatttcccacgaggtttggtaacagtgtcccaaagtcaaggtgacaaaagaactttgcattaataaagacaatttcgagctgtagtcaaatttggaggattaaactaccccttttccttatactgaaagtcttttaatatgcctgtgccttagttgaa

SEQ ID NO: 282 - DNA, 435 bp, Homo sapiens
  Genbank Accession No. AA843562
  unsure (1)..(435): n = a or c or g or t
tttttaatttttatttttattttgtagagatggggtttcactatgttgccccggctggtctaaaattcctggcctcaagcgatcctcctgcctccgccttccgaagtgctgggattataggcttgagtcaccaccgtgcccagcatacatctgctttctgaatatttgagaggcggaaggcacaaggcgtgacaattgatgggatttgggatgtaaagagcaagagaggactcaagcacagtcgcctcgaggtttctagccccggctgctgtcaccaaccactctcaggaaggtaggcagaaggttacgcaggagaaaccgtnagggtagttctgaggccctggaaggngtagttctgaggcccccgggggtgcggactgcaggtccagggaggagtggtgaggctggaggaaggtgaggctggaggaggaggtt

SEQ ID NO: 283 - DNA, 493 bp, Homo sapiens
  Genbank Accession No. AA843931
ttttttttttgtaagaattgctctcctttactgagcacctcccatgtggctaagcagcctcctgtcactcaacaccctgcgaccccatacatttactgtccccaatttacagatagggaaactgggcccagaggaccccgaggtcctagaaaggacagaagcggtgccatgccttagctggggtcagctctgacagtctctagagtctgtgctcttgaccactgtgccatcctcccccatcactgggtgtccggggtgtggatggtggtgacgttggaggcagagtccctcagcactccacgccgtagcggtcgaagttgcggagagcaggccgatctccaggtgcacggtgccaccagcagctgtgtgcaggcgatacgagtcggccccactgtagatggtgtccccatgcagcagctgcggcccaccacccacgaaagcctgtgccaactgttctcgccaactgcccaggggccgccacgtggggcaggcc

SEQ ID NO: 284 - DNA, 643 bp, Homo sapiens
  Genbank Accession No. AA846471
tttcaatttctctttttacaactgtaccagaacttcacagctacaatgatagtatgaacacatgaaaaaatgacttcactcaaacaagatttagaaaagtcggggtgacctcggggccagggcaccaccctgtgtggtgaaggtttacagtcagtcgttcgataatggagagagagtgtgtgtgtgcacatatgtgtgtgtgtatatacagatatctatatatataaataaccatgttcagtcctttacaagcctgtaaatatgatgttgtgctccgggttcacgatttgaaacttcaaacacacaggccatgcagagtagagtatcgtgtgtatccctggttgttaccagcaaatagattgtgaaggtttccaaaacactgttcatcatatatttctctggtaagtgtttgagcttgtggatgaagttgatcatatattcacacattggggagcggtctattcggtatacaaatcgggcattctcaaaccttgcatactccgtctctacttttactactactggcttcccaaaggagcaatacttgggtggaacaggtggactgtcatattctcagaactctcgtactggacggggaacaccataaaaggccccagcagcatgcttgaatattgcggtttaa

SEQ ID NO: 285 - DNA, 590 bp, Homo sapiens
  Genbank Accession No. AA862350
ttttttttttttattggtaaaaaaggaatagcagatttaatcagaaattcccacctggcccagcagcaccaaccagaaagaagggaagaagacaggaaaaaaccacaggaagaaagaaaggagggagggagggagaggaggaaggaaggaggagggaagggaaggggggaagaagggagggagggagggagggaaagaaagagggaggaagggcagagggagcagggagactgtagatcagggtctgaatggagatccggtcctggaagtaaatgatccaaggctccaggtgctgggaagagagcaggaggggagggcggcccatgcacctgcatcttagaagggtagtggctcttccacaggaatgttgaggatgacatccatgtctggggtgcacttgggtctccgaagcagaacatcctcaaatatgacctctcggggttccccgggtctggcttggagctcttcttgcgcctcgcgcgctgttgcttcttcttctcatccccttcagcgtagctctgctccacggcgccctctgcaggcaagtcagcaggtatcaccgtctcaccatcgtcggggctggccatcac

SEQ ID NO: 286 - DNA, 455 bp, Homo sapiens
  Genbank Accession No. AA863003
gggccgcagggactaggcagggctgggtggctccagcagctctggcagctccaggcgtgggaaggcaggcggcatggaggcgtagtgggacactggagtcaggctggacagccgtcggtcagcgtgtccacaccaacatccagctctgtgtagtagaagtcctcctcaccatcactctgatcaggctctgctgcctccccaggtgcaccaggcggatgtgtctctgcatcgccgacgccgtgctcagcaccttcccgcagctcttccacagacactggaacatgacctgggccgggctcttcctttttctcagggtgggctcccaaacagaaagtgggctgcctcggggggcagtgggggtgacggggtggacggagaggactggtcactggccaggtcccatccccagtctccactgttgctgctgctgctgtagctgcctgggggcgcaccag

SEQ ID NO: 287 - DNA, 306 bp, Homo sapiens
  Genbank Accession No. AA868136
tttaagctttgcttttcttcatttggcttgcgtcagaaacacaaggctcggcacagcgaaggcttgcacccgcctcccgggacccctcaggccgccacctctgctgccaggcagtccaggtcctcagcttcccggggcccttgttccgtgaactctgtgctcagctgccacaccttcactgtgccctgggcatcgccgccagccaagagctgagtctgctggctgttgaactccagacagtagacagggctttcatcctgggtttgcttgatcaaaactgtgggtttctgggagcttttctggaga

SEQ ID NO: 288 - DNA, 429 bp, Homo sapiens
  Genbank Accession No. AA877572
tatttttagtagtgacagggtttcaccatgttggccaggatggtctctatctcttgaccttgcgatccgcccacctcggcctctcaaagtgctgggattacaggcatgagccactgcgctcagcctcctgcttactctttaagatccagatccaatggagctttcttgcagagccctctctggctacccatctctctaggcagttctataatagtcctcccttgctctgggctcctagtgtgccctgtgctgccctcattagagcatattctactaaatcttgactgcagctcttttagagtagggagcagatttcctccctgtcctggactctagcctgcaggaaatgttcagtgcaatggaatgaatgaggggaaagagagggattggaggtttggatggggaagagggagaaagaaaaaattgaat

SEQ ID NO: 289 - DNA, 580 bp, Homo sapiens
  Genbank Accession No. AA877900
accatctaacaaaggcactttattgcattaccattcacaattaacagtcaagaacaaataataataacaaataaaataacttttaagaggacaaggcattagaaataaaaaaggacactaataacatttgtaaaagcttgtactggatgtggttgcccccatttgtgtgtgtggttgtgtgtgtgtggttgtgtgttggtggccacagctgagcctctgtcaccagagaaggctgaggcccaatggcacacctcagaaacctacaccccgaggctggacggctggactcctgagcacaagctccctctcgcaccctttgccagacagtttgtctccaatttcaaactgacctaaggctcttactcctggattttttgtttttaaaccttctcccagccagtcttcttgggtgaggctaggttgcaagctctgggctgttcaaaggttgccagaatctctccattggagggatagaagcagtgtccctattctgacttgtcagagagtgagcttgtgacccttgaaagatggtgggtatcccttctcatcccctcggacctccacagttgatgcgtatgtc

SEQ ID NO: 290 - DNA, 416 bp, Homo sapiens
  Genbank Accession No. AA879466
ttatattacagtgttttatttagataaatttcaaactccattaattaatattagaagttagaatattgaatattttggaaggtgatcgttaggaaacttaaaaattaaccaggataagatacaggaagcattgcattcaaggagagaaactgtaattatttttcatgaataagagaattaaatatttttaaaaaatattttaacatgtaaaataaggagtttgacatagatgaatttgatgttatgcctaatttttcaaatgcatatatatataaataatttaatttatggtaagttaacatcatcatgaagacataaaactttttttattattatactttaagttctggggtacacgtgcagaatgttcaggttttttacttaggtatacacgtgccatggtggtttgctgcacc

SEQ ID NO: 291 - DNA, 714 bp, Homo sapiens
  Genbank Accession No. AA883422
  unsure (1)..(714): n = a or c or g or t
aacaaacctttttttttttttattggagataaaaacagcgaagtcccacataccataccctacaagacacaaggtgcgcagacgagccttggtnatgtaccggcgctgcaggaagaggctgtccgccgggcctgggctgctccagctacgcggggaggcggccccattgcaaagtgcagtttctccgcggaggtggcggtgggtcagtggcagaggngcatggtttccatgttaaggaagcggacgtgcatcttggtctcaatgtcgatcccctgccagatcttcaggaagtcctcgaaggtgantccctcgtacacctgatcaggctccatctgccccatgcacacgctggccgcctccatcatggccccgtcggcgatggagcgagcggactccttctcgatgtgagggtttccgacagcagctcctcgaccacatttcgatattcttccagagtgatgcggccgtcgctgtccgagtcgtacatgtggaaagaaatctcagcttctccttccgggacagctccacctgttcctcgtccatgttggtttgattggggcggagtaaggacagatgttccggagttcctcgaaatttatctaatccccggggcactgggtccctcgcggaggtcccctttgtcgaaaagccacgaaaaattttgaattcgagggggtttacccccaagtgcggggaattgtttaagttcttcct

SEQ ID NO: 292 - DNA, 572 bp, Homo sapiens
  Genbank Accession No. AA886870
tttattttttagacgttcctttaataacttaaaagacaaagcatacacaaccagcatattataggcatgtaaatacatgtgttcttaaatggatcttcacttggaagaaagtttttcgtccttctcagaaggagattagacacaacatatggtaaagccaaaagcaggagcttatagatttgcatgaaatgaaggcgttcttcagacttcttcataacccacgtgacatcagcacttccttttcccactggtattttctacacttccgagactccgtttctgtctgagcacggcaacacaatcattcctgtcagggtgttcacttgcttttattgtctgcatacatttaattgttgtaagaaacttggcacagtctggaaatccacatgaccaagcgagatcttcagctgtttgcccgttcttattacataaatcaatttgggcatcactggctacaagcaggcttaggcactccaggcttccaacttttgctgccttgtgtagtggagcttctcctaaaacatcctgctggttgaggtcagcgcccgtttgcagctgccagagaagaaagc

SEQ ID NO: 293 - DNA, 749 bp, Homo sapiens
  Genbank Accession No. AA886976
catatataattttctttatagttaccaacacttttctggcaaagacaaagttttggaatggcaaaagcaacagaagttttagatctcaaagctccagaaaggaattaatctgagtcttcatcatcgagatagtcctcggcattgcttaatgttcgaactgcatctgttccctgtttctttttcaggagagatgcacaggcagcattggtagccatgtcgaaggccagcttcttctcaatgtttcttaagtctgttctagcaccttttgccagaagcaactggacgatatctgcataacccttccaggcagcagcatgcaaagctgtatctcccaacttgttctgctggttcagttcaatatttggttgagtaaatagcatttccactatatctttgtggcccccgtggcaagcccagtataaggcagtgcttccagctttgtctaagccattaacacccactctgttgtccaaacactctctcaaccagctcaagttgcctctttttgctgcttcatgcaatggattgtcaatggattctgcctgctcagccacatagttgcttggaattagtccagtcctgcctttggaggtgcctgtccaccaattggtatcgctcatgtcagtaatgtagataatatcagcttccccaaagtataattcatctggagttctgggttcaaacgtatacagggctctgaagactttaacttgcactggtttgactggtttgggtgggcggctcgacat

SEQ ID NO: 294 - DNA, 369 bp, Homo sapiens
  Genbank Accession No. AA888985
tttgacataaaatgaatgatttatttagcaatttttttggctaagataaacagataagcataccattggtccagggccaagtccaactccttttccatcatactgagcagcaaagttctagagaagtaaaaaaaaaaaattatatatatatataaaatatttttagttactagtcatgtagttcattttctcattctacttgtaaatatttttctgttgttatttaaaagagggcaatgtttttgatataattattagtttaaaattctatattgaactaaattcctaaaaagttatgagagctgtacgtcaaaaacttggccgacacctctttgaaatggagaacttccctactttactttttgagcc

SEQ ID NO: 295 - DNA, 504 bp, Homo sapiens
  Genbank Accession No. AA897501
tttgtggagaaatctttgaaatctttgaccagtctgagtcctaactgcagtaaaaatccatgggcatgcttatatttaacattttaacacaagttaacaacattttggtaaacacatcttaggtgggagggaaggcggtggtgagaaagagggaagggcagaatgtggggtcggtgtggggcctggaagccaggctgccaacagtacttgcagcatgctgtgccatgggagtcctgtaggcttccagctaatggccatgctggcatattggaatgaggtgcctctcagccccgaggccgttctttaaacaatccatctctttgcctttggtagcctcttcttcttcctcttcctcttcctcttcataatcctcgtcatcactcctcacatcctggatgctcttcatgaatatacatctgttgagcatcttcaagatgtaataaccccagtaaaggtgaaggacctgcaagatcatgagctgtaggttgaggaagatgtatgaaa

SEQ ID NO: 296 - DNA, 546 bp, Homo sapiens
  Genbank Accession No. AA902949
tttttttttttatgatgtaaaagtctttattaattaggaaaagtaaacccataataaatttgtctgaatctttttaagaaacagttgtatcttttcatcagttctcttagcatttcattaattactaatcctaaggacaagggatggctgagataatttaatttagaggcagctaatgcctatttcagtgcaaactggattgacagtcctctcctgacctctggtctgtgcttggaaaagactctttgttgtgaaagatacaaacccagggcagccagtgcatcttctgtagaaatgcaagaagatccctgagctctgctgtcatgcctctcaaagaggaattatcagaagttgtactttttcttctctttatgtgatcttggcttagagtttggcttctatatcggtaacatggatttctcatcaccttagactaaaggatgctgacaggtcttattcaggagctattagtgcgaaagtgattgtggtttttaaatggcagaaatcactttcgcactaacctagtatttaaaagacactaagaga

SEQ ID NO: 297 - DNA, 551 bp, Homo sapiens
  Genbank Accession No. AA903403
gaggtatgatttatttttgtttttctcttctcagtcatgtaccacgcagagcccctgggccgtcacaaagcccacgaggctgtcaaagttttggggctcctctggtactggcatcagtagccagcagggaggcccgcaagtgccgcacgcctggtttagggtcatagtccctggagactggtaggtatcacagtgcatcctcttcactgcagcccccgccgatcatgaaacgaaactcctggaggtttgagacaccatggaagtgaacaaaagctccagcaaccacaaagatatgaaacagctgatgagagtgagaccagatgtcacatttgccagggaaaaagcgttcggggatccgggcagcatacagggcagctcctgtgatgtagaggctggccatcagcatcaaccagcctatctgctctatggtggcggccttaaggaaccctccgagatgacatagtgcaaggtaggaatgattccactcaggcctaggccaaaaacaatcctgctcttactccccgatactgaggggtggcaaacatgttcca

SEQ ID NO: 298 - DNA, 530 bp, Homo sapiens
  Genbank Accession No. AA909687
aacaacttgatttttcagagctttttgaatttcaaaattgcaagtattaataatacttggcactggaaatgcttaataccaatctactaatcctacttctagaaatatattttacagaaatatatgcattaataaagtagaagtcctaatcccagtagctggactcaaaattgtccccatccatgtttaaacaaggtgacagcaactggtggccagggcaagaacagacttaaatcatgccgctagaccccagaatttcttgcaggctagcggtacaggctcactctggtcatttcattaaccatataataatatgattttctgcaatgattttggggaggcctcatttacgactgggttttgcagatttgattttttatcgtatccatgaaaccgtattaaaacaatgaagtctgcttctaaaaaagtacaaagtcatactcattaacacagctttattagattcccctatttcccactcttcttttgtaatcaggatacattttcttcctggagaggcagcctacgta

SEQ ID NO: 299 - DNA, 416 bp, Homo sapiens
  Genbank Accession No. AA910562
acatttttacaaatctctttattgcctggattctcacatctgcttctacattcaatattttgcaatttttttttggttgaagtacataaacaatggccttatagatatgtcggacaaggaagaaatactttacagccttttcatattattgtgaacattcttctcagacactccaccaaaacttgacaagtggcagtttcttaaagatgagttgcaatgtggaatctaaaaatcataacaattaactctttgtactttctcacattaaaacccacttgtctaccttgcactgtgaatggctctcttacccactgtacactggtcacttgaggaacattcattcactgagttacgcttatcttccaaatgttgaaacatttcattacacaacattaagaacaaacaacaaaacaaaa

SEQ ID NO: 300 - DNA, 451 bp, Homo sapiens
  Genbank Accession No. AA911052
caaacaatgggaatttatttctcacagttctagaggctgggaagttcaagatcaaggcagcagcagacctgggggcaggtgaggctgctctctgcttccacaatgttgccttattgcagcatcttccagaggggaggaacactgtgtcctccatagcagaggaggtagaaggaatgagctcacccccgaagacctttgaggggatgaacgctgcatcctccatagcagaggaggtagaaggaatgaactcacccccgaagacatttgataagacactaaccatatccatgagggcagagctctaatagcctaatcaccacctaaaggccccacctcttaatgctgttgcattgaggattcagtttcagcatcagttttagagaggacaccatcattcaaaccacaacagtgacatttatgagaaaaagtgatttttgttgtaactaaaata

SEQ ID NO: 301 - DNA, 562 bp, Homo sapiens
  Genbank Accession No. AA917667
acatggctctgcctctgttttcagtgtggctttggacaggaatatatgaataaatcactgccatacaggttttccaatacacaagtgctagaaaatacacacaattccccaatgcgtaagttgtgctaatgtctttccaagttctgggttgggaagtggagggtggcagcgtttgtttgtgcgcaaccgtccagtcctgttcacagcgaggatttggagtcctccagggtctcatcatgggagtgatttgtcagcggacgcctctgccctgtctggcttcaggtccagggaagctttgaagcagtcaagccttgtctttgtaccccatgtgtcctgtctttgttgagtcactcagagatcactcctggacctctggggttggagttccagtgatggcttatggcggcccactcactatggtgggctgagtggaagctccttaaccatgtccccagagacactgaggtgctcgctcttttaatgtcctcgtttgttgccgtaagttctttgctaggtttcattttggcatttggcaaatcagcctggaagtctggccccatga

SEQ ID NO: 302 - DNA, 495 bp, Homo sapiens
  Genbank Accession No. AA918616
gtgttgtcagtgttttattagatgccagggatacatcaataaatgagacactatctgcacagagcttacattctagtgggggacacagttacaaaacaaaaggaaggtaattgcagattgcagtaaatactgttggaaataatgtagtaagagaaatttaacacatactaaatgtccagaatgtcccaggctttgtgctagaaaggctgcaatgataaacaagagagaacagtcctgttctaataggcctattgtgtatgaacttgtcgctttgtatgtgatttgggttgtgaatacagctggccctcagtatcctgtggattcaactatcctcagaataaaaatattttttaaatcccacaaaacaacaaaaatacaagtaaaaaatacagtatgactacacagcattacattgtattaagtactataaataatctagagatgatgtatggggaggatgataaccaaatactatgccattttatgtaagggact

SEQ ID NO: 303 - DNA, 488 bp, Homo sapiens
  Genbank Accession No. AA921922
ttttaaaggagacagtaatattttaataggatagtgaaaaatatagcagattgacagtgacagcagaaaaagagcaggaatacagatattttcagaagattaaaatggtactgtgtaccctcaaaccaggcaagtttttctgagaggtctctaaacatatctcctgcatagagtagatgatttttcttggagctgtcataaatgctttatagttctctacattaattcatgtcgaatattttccatggttggtcagactcagacttaaaatagatctgagaaaggtcttcaggtttactttcagtaccattattcacttcatagccagctgggtgacaacatggtgtgtggccaattcaagtttacaaggtaaccttgcctgaattatcctggtccatcgaatacaaatagtaaagtgaaggtgagagaatagaattgcaaggaacgtgggagaagcagttgtcaaaaagcaagacaaacacaagaaa

SEQ ID NO: 304 - DNA, 411 bp, Homo sapiens
  Genbank Accession No. AA921994
ttttttaattaaggatgtagtttaatctgaagtttaacttcagccagtcccacaggtgcccaggaacacaaattgcaccacagactgggtcccacctggaggcaagagggcaggctttctgcacccacgtgtcagtcaatcatcggctgcaggggtgtgatctcccaggtgaggaagcagctgtttggccaagggcaattctgcagaggagacagctataagccactaggggacatcttcctgacagttgggggtagttgcaccagcaccgtaaagagcaccaaggcatctactgacagcatccattcatggtcaccagaaagcacactgcagagggagagatccttgaattactattcatccaagcccagcattccacagacaagaaaactggtgcagactgggtgactt

SEQ ID NO: 305 - DNA, 653 bp, Homo sapiens
  Genbank Accession No. AA923142
  unsure (1)..(653): n = a or c or g or t
gagtcccacccggccatcggctttatatttctgcataagacaggcaaagttaagatgctggcttctggcttcaaacctgtgctaaagcaaggcttcttttttccttatgttacttttttgagaaaaggtctcactctgtgacccaggatggagtgtggccacacaatcatagctcactgcaaccttgatttcccaagctcaagtaatcgtcctgcctcagactcccgaatagctgggattacaggcgcacaccaacaggcctgactcttttttttttcctccggtagagatggggtctcctatgttgtccagaatggtttcaaactcctgagctcaatgatattcccgcctcggcctcccaaagtgctgggatttcaggtgtgagccaccatccccggaccttttcttttcaaaacatacataaaaatgngaatgaataggaccaaccagtggctgtgatgcagacaaaacgccctgtctggaaagcatgcgtctaggtaatcttcctccgctttaccaggcggtctgagatctgggctagagcagcgggagggacagggtgcccaattagtgatcatcttcactgacggcgccacagacacccttcttttggagatctacagcctacaagctttggctatctccctcgtgcc

SEQ ID NO: 306 - DNA, 346 bp, Homo sapiens
  Genbank Accession No. AA927001
taagagaaagcatttactaagtggaagtggattatcatagaagtcttcatcctcgttgtcttcatgttgagtggctgaggaggaggggctggtcttgctgcctcagggtggcagagaggaagacatggaggaagtgggaagggaggcaggagaggcagggacacttggtataactctgattgaaaaacatccctgtgggtggacctgcacagtttgaacctgcgttgttcaagggtccactgtgcttgaaagtgtttagtcagcagtcctgaacgaactgtaaacaatggttgaatgaaggagcaagggagcctaagggtggggagaggcgggtgtcggcaaggac

SEQ ID NO: 307 - DNA, 654 bp, Homo sapiens
  Genbank Accession No. AA927633
  unsure (1)..(654): n = a or c or g or t
agagccgcgtgaggaaacggggacctgcccggggcacagatctccagcggtgaagacgtagagcaccgggttgacgctagaactgaagaaggccaaggcgtnagttcccgctcgcgccgcctggccggctccgcacagcttcgccaaggccccttccggtggagccagcgctgcgaccgcctgcagaaggttgactgcgtggtagggggcccagagcaagccgacgagnncacgatggcgctcaccagccggcccacacgcgccccgtgccgcccggagccccagcggcgccccgaagccgtgccagcgtcacgctgtagcagccgagcatcagcccgaaaggaagcacgaaagcggtcagagtctccaggctcaggtgggcggcggcgtggaccggcgacggttggcacagctggcatacgcggtccctccacaggtggcggtagacggcggccgggacgaaagcaacagggccgccagcagaaccgccagcagaaggggcggccaaagggcgggctgcccaccgaggcgccaggaaggggcgggtgactgccaggagccctgcaggctgagcaggcccgtgagcagcacgctggctaacatgctgagcgcgcacacgtaatacacccccttgcagccccgctggccaagcgg

SEQ ID NO: 308 - DNA, 348 bp, Homo sapiens
  Genbank Accession No. AA927837
tttgatttttaataatgtatttttaaattaagttaggtacattgttcttttagatataatgctattgaatgtttaataagctgcagtagagtgtcagcatggattatattcactgggaaaccaaaaatttcatgtgattctcagtatctccaggataggcctgctgaagacagtggagtctagttataatgtggctgtttctcagttgtgtggtctggaaggtgacagtgtcctgatgtagtggggaggggggtctaagcatgaacggtctgtcctctgcctcctcagtagcagtagtgtgccccacttgacatccagaggagaccctgaggctggtgcctggcccta

SEQ ID NO: 309 - DNA, 488 bp, Homo sapiens
  Genbank Accession No. AA928646
  unsure (1)..(488): n = a or c or g or t
tgggtatttcactttatttagcaaacggtcacactcggccccaccacaccgcgcctgcagcctcacttgagcatctgtctcaggaagcagctcagggtgaacaggaaggcctgggtttcccagttcaggccttatccgtcgccacacgtgccacacaccacaaaacaaaatcacttccccacgtcctcaggagcccaccccagtgtggtccgggggacgctccagtgttcaacagctgcctgcaggggccacagccagtctgtagacacaggccctggcacgaggcggtcccgggtgtaccacaaggcgatgcgtnctccatggaggttcttcttccctgtgccgtggactttgaagtggacgtgcatttcccagtctttgaggaagcacggctggtggttccagatagagccctctttgctgcgcccgtcaggggtcagacgtacgtactggctcgtgagcatagtgctgccctggaagttccagag

SEQ ID NO: 310 - DNA, 488 bp, Homo sapiens
  Genbank Accession No. AA931562
agacagggtcttgttctgtcacccaggctggagtgcagtggggagatcacagcttactggaggcttcaaactcctggactcaagtgatcctccccactaagtagctcctgagtagctgggactacaggcatgcaccaccacacctggctaattttttgtccagatgagattttgccatgttgcccaggctggccttgaactcctggactcaatccatccacctgccttggtctcccaaagtgctgggattacaggaatgagccacggtgcctggcctataattcctaatggatttatagggcatactctgtaagtacaggctggacctgctgccctcagtctgtactttcttagtttatgagatagagcacagataagcacacattgaaataataatccattaccaaggattatcgaggacttggtacatgtaaagcacatgaaggcactgtgttaggggccgaggaagaggtgaagagcagacatag

SEQ ID NO: 311 - DNA, 489 bp, Homo sapiens
  Genbank Accession No. AA931876
ttataataaagtctgtttattacagcaattaacagagcagcgtttgccggcatgcttttcagtggcaaccagaaaagtgcttactccaggtgcatagattcgggaaaccatgcaacttgagccaaaatgaaaccaattagaggcttagtaaatgggttccagccaccccaggaaacttaaccatccacgagtcagttcagccgaggtagaacctcagtgcaggaatttagcatgatatagattgctactttacagaattaatccagacctgtcgccagggttgtggtcttgaggacgtgaaatgtatccgcccaacacagccacccaggtgctgggttcaaatctcgataaactacataggggtatataggtggggaacgttagcaccattgactctcaggggtactctgccactgccatggaggtggggacataaggagaggactagaagctgggccagagggaacagacagagaaagaacagaaatc

SEQ ID NO: 312 - DNA, 508 bp, Homo sapiens
  Genbank Accession No. AA932331
gcggccgcctgcggagtcgtctggcgcggtttgggaacccgcggaaccatgtgctgaagcccaataaacctctcattctagctaaccgcgtcggggagcggcgccgggagaagggcgaggcgacttgcatcacggagatgtcggtgatgatggcttgctggaagcagaatgaattccgcgacgatgcgtgcagaaaagagatccagggcttcctcgattgtgccgcgaggctcaggaagcccgaaagatgagatcaatacaggaaaccctgggagagtctgggagtttacttccaaataaattgaataagttgttacagaggtttcctaacaaaccttacctcagctgaaaatggacaagtattttcaatgactgaaatatagcttctgacaactatgcagaggcattttagagacattggcattgcatgccctctttggagggtagaagaggcaaaacacttttttcaccctttggaatcatagtatgggtagaagttatgatttat

SEQ ID NO: 313 - DNA, 373 bp, Homo sapiens
  Genbank Accession No. AA937952
actgcaacctcctcttcccaggttcaagtaagtctcctgcctcagtgtcccaagtagctgggattacaggagtgaaccactgtgcccagcctttattctgtttccaatgtggcttttaatcctgtgataattttagttttctcttccactactttcctgtgtgctctgccagctgatgttatattttctctttgccatgccttattttacccaatcctctatatctctgcttgaagttctgtattttcttaagttctttgaactcacagtggtaggactgacaattatttttcaaccaagctaaaaacatctttttagtatgggtactttatctgccacttattttccatttcccccatcctttctaatagca

SEQ ID NO: 314 - DNA, 421 bp, Homo sapiens
  Genbank Accession No. AA938245
tttttgcattataaaataatatttattgtgtcctgctgaaatggagcttgtagtctcatttcttaggcacttacaaggtaaaatttatgaaccatactttattaatgggcatttacaaatgcctgaaataaaaggtgacttgtagaagggataatatatcttattgcaaacatgacacctagcttctggaatacggttagtggcatttgcactagtgagcataatttccatgttcaaatgaataatgaactaatcaaaaaacctttttttgaggaactgaggcactcagacacaaaacacaaaattaggcactcagacaaaaagcaacttattagccagttggagagagagctaagaaataccatatctatataattatcagagaatgtgataaaaagctactactctgtacttgtgtgcc

SEQ ID NO: 315 - DNA, 513 bp, Homo sapiens
  Genbank Accession No. AA939266
ttttttttttttttttttttttttttttgtagtcctgttactctaaaagatatgagttatttaaagaaagggtaagaaggcttagacaaatatcatgtatgaattatctgatgataaggttttgaacatgcttctccagaacacaaccgcaaacacagggtttcaaagactcaatcaaggacactcatgttgggtgtggcaaggctagagtttccaattaaaccacagggctggccttggattatatatgagtgtgatttcttggagactcttgaaggagctccacaaagaaaactctctttttcctgttcactgacacctaaaattcttttaaagcaaaaatgagagtaaattgcaattgattgcaaatgttttcctagaagtaggcttggaaggagatgcagaggaactgtggagtttcaaagaaaatcctgaggacactgatttctgaggggaagcaaaggacatgcaagggagtattggggaatcaaaaccaaagaaggccaagggaag

SEQ ID NO: 316 - DNA, 525 bp, Homo sapiens
  Genbank Accession No. AA946617
ttttttttttttttttttaaagtaaccatatggtttattactataatacaaataatatacattaggatttgttagatttgtgtcccctagatccctgaaaaccttgaaggaccaagccttggaaactagcataaaaacagggacttggatagttctataaaggattgtggataatgattcaatttctactaaacaaaatacatacagcaggagataatatatcacaatgcccaagtcattaactatcaaaggtgaccagaaaagtcttgttatatttgaattccagagtttttgactgatattataaatatggaagagattgctggtgccagaaaccgagtgagtaatgttggtgtatgcaataattgaagcatatgtctcgcaatagtaggaggtgtactaacaaaaaaggaacggtctttccacagttgtcacactcataaggcttctaccattggaggttcactggtgtttgataatacctgagctgcgactgaagcccttgctgcattgttcatattggta

SEQ ID NO: 317 - DNA, 277 bp, Homo sapiens
  Genbank Accession No. AA947258
gcgtcgacaatataaacagggactatgaggtatgtataggaaattaatagctgaagaatattttaccatgttcaaaaactaaattcttcatgtggctgagagaagaaagaaaaaaatggtatgtttgtgttccatttgcaggtattacataaacccattttaaatgaactaaaatgcctaggatttgggggggaaaaattatcttgtgctcgcatttgaaggttcttctcagaaataaactgtttaaagagaaaaaaaaaaaaaaaaaaaaaagtcg

SEQ ID NO: 318 - DNA, 411 bp, Homo sapiens
  Genbank Accession No. AA948682
ttttttaaggtatgcaaagcttacaaatttattagcagcttgtgcagtaagtttcttttaatgcgtctgtggcaatactagcaacaaattaataaaagcttaatttttatacaaatagttttattacaaatttgaattcttaagaaatacacatttaaagaaattacataaaaggccttagtagtcttagaaatgttttggagacttttagtgaaatgtcatttcaggcctagtggtccgaatctgccctcctgcggtccatgcgatgccctgctgaggtctgtgaacacagctcatgagaaaccacggaaatggcccgaatgtgcttacgtgtgaaaatactgatactgtgattcaacagagctgtttttcaagccaggatgcagaatgaggaatactaatgaaatgacg

SEQ ID NO: 319 - DNA, 434 bp, Homo sapiens
  Genbank Accession No. AA960997
gcggccgctccaacatcaaaatggaaacccctccacctcccaccctcaaaagcacccaacaacgggccctgggcactgagggtgggaggtggaggggttaccattctgcttgggggatcagcatcacccattctttctccttttcctctgggctggtgctcagatggtgagagcactgtgctgatgaggtgggccaaagggtggaaccatggccccctccgactcccaggagacctggccagctgcagcgcccccgtggaccagcagagggacaagagaggagctgacgtggaggagccgaggcccactgggggctcctggagagtccgtccgcctgtggacagcagctcaggtgttcagctgcttccagagaggaagcacctcttcctagactgaggcatcgttttgattaaaaaaaaaaaaagttcctcgtg

SEQ ID NO: 320 - DNA, 473 bp, Homo sapiens
  Genbank Accession No. AA961504
ttgaagtagacaaagctcatctttaatcaacagaatttagagtccagtctttccaaatctgtttttaacgacagaaacttctccctcccctgccccattttgtcctccccattaaatggtactgtgtcaataaaattcccaagcgacctctttaaatcagcgttctttccgatgctggctaccacagtcatggaaaagggagatgtgttggacaggcctgtcattacaggtagtagttggtggtacatccagtctgtatttcttacacaaaattacatctaaatatttgacatgaggccatttgctatcataagccatcactaggaacttctagtctgtctcactcgattgaggctacaatgttgttaggtgctatgacaccatgaatacaacagacagcccccagcttgtcttcaaagtattcataaccaaaggcatatttcaaataaacatatgtgggatggcaaccattt

SEQ ID NO: 321 - DNA, 377 bp, Homo sapiens
  Genbank Accession No. AA969517
tttttttaatgttaaaacatgaatttattgcatctgtagcatcttaccttgagcacggcttctttcaatgcttttattttgcaattataggtttattttcttcctttcctctctcttgagctttttaaggtgttttctgtcactcagctggagactttaaatttcctatttatattaattatcaaattatttcatatatgagtcattcagctcagccctttttggctccttcttgcaactcttacttgtggatttattgggcagttcagcgcctactttcatgggcagactcaactggcgagattttaactggagggtgagagatgtcctggccacggggccctgttgctcacagtccctggatcagaggatggtgc

SEQ ID NO: 322 - DNA, 494 bp, Homo sapiens
  Genbank Accession No. AA973035
tttttactgaaacatgaaagcgaatcctttaattgctttcagttcttcataaacaggatgtaattaatttcaaacccaaggaacaccggtaatacattccgatgtaggcatagtccctggaagagaggcactagtggcttctggactagaaatctctgccataggatcacaaatccagatcagcgccttcagcaagcaatagaaataaatgataactggatagagcgagggatgccaggtgtactttttaaaaggcgatagaaaaggtttcgagcttctttgtggctgtttggtatttcctttttaatctgttgggggaaggtaatttgatttttttccccctttttcaactgggaataaggaatagtggtagttgggagtctaccaccactgaaattgggctggcaacctggcatcaggggaatttggctgggccactttatggagcaatgaccctttataaataaagtttaatcccaaggcagagtgtttat

SEQ ID NO: 323 - DNA, 408 bp, Homo sapiens
  Genbank Accession No. AA974579
  unsure (1)..(408): n = a or c or g or t
tttgcaaaatcataataatagctaattaattaagggatgtgaaaacaccagaacaattgctctcagaggaggaggccgggtgggaactttcagcgccatttgatgtgagcagacccaagccaaggtgtcaccagcctgggtctggagggccccactccctgcctggttccagcctccctcaccagtgtgcccagggaggaaaggaggggacagacttctggaacattctcccgggttctctaggaggttggccacagaagcgggatttctagaggctgccttttttttaaaaaaaaaaacaaacaagttatcttttactccacgcctctatcagggtgcgtaggggggtggcttctcccccgggggaaagtaggtgggtgcgtacaggtnggagcctggccgggaagc

SEQ ID NO: 324 - DNA, 497 bp, Homo sapiens
  Genbank Accession No. AA975511
gaatgttattaaatttataaatttatttaactttccagatcttcttggaataaatgtcaggtagtagaatttgtacaaaccttggtaatgtcttaggtttagatacgaacttaacaggtatatttaattttctgtattccacaatggagctagaagcaggactcatgaaaatagtaactatatgttttgcatgtatccttcaaagtgaaatccttaacaaatttaacagtatatattaggctgctgatgaaacagctaaacctgtctgccaggtggcttcgaaaatggaattaatttttacatggcattgataagttactattttaatacaaccaggtggtaattgatacccaataatgtttgaggtttgctttaaataaaaaaaaactaacaaaacaaacaaaaaaaaacagtgtaatatagtactgtgggatccacaataacattttctttagtttcccttaatatcaagttgtcattaggaaagattcacaagt

SEQ ID NO: 325 - DNA, 463 bp, Homo sapiens
  Genbank Accession No. AA976712
acatcataaaatatttattaataagtaaaatgattttcccctgcctttggttattaaaaaatgagtatcattgatgataccaattgccaacactggttttacattattcagtcatgaaacagaatagaaagatgatcgatagatatctatagacataaatgtgtagaagaccataccatacagcgatttgtttaattacaaaatactggttgtgctagcagttggaaatgtacttgcacatccttaaagttatctttttttatataagtaaagaacacacaaataaattcacttgaatttgataatttggaacattggcaatgaatacagtgcctgttgaggcctgaaagagagaggaaatcaagaacagtgtgggagaagaaaggcaatccttcgttgaaaagcttttctcttaacaatccttagtgcctgaagaataagccattttgataacaagagtata

SEQ ID NO: 326 - DNA, 468 bp, Homo sapiens
  Genbank Accession No. AA976838
gaattttctgtaggatttttattggtggcacctggggccacatggagggattcctcagcacaggcgctggggtgtgggaaatttcagaggcccctcctgggatgtcacccttcaggtcctcatgagtcaatcttgagtttctccttcactttctgaaatgtctcagaaaaccaatcccgcatcttggcagaaagttcactctgtttgatgcggctgatgagttcccgagccttgtcctccagtggtgttccaaactccttcagcttatccaaggcactggagacgtctggggatccctgggctggggctgggccttccaagacgatcgacagaaccaccaccaggaccgggagcgacaggaagagcctcatggcaagggcggaggggcactctctcaatcttcctgactctgtgggggtctcagaccaccttagtcccttttcccactcagaatgtagcagggggggc

SEQ ID NO: 327 - DNA, 417 bp, Homo sapiens
  Genbank Accession No. AA977896
ttttttttttttttttttttttttcccccttaaatagctgtttattggcagtgggctggaagggatggcagatttagcattcacagacaacactgcacacacgagggcagcaagagtgatgggaaagagcctgaaggcccctcttcaatagcaagtgggtaggcaggggcctggagtgtcgatggagcagccttagatcagctctggttagtaggcatggttagagatgaagagagattcactggctgcggctccagactggccacttggagtgtactttccttgacaagcgaggctgttggccagggctcgcttgatgtactcctcctgggctgccttcaggttctccttcttcccaccccaagcctttagagcagaggcctgcaggctgcggccataggagaaagtcaaggccca

SEQ ID NO: 328 - DNA, 382 bp, Homo sapiens
  Genbank Accession No. AA978128
tttaacaaaacacttttatttggtccactggagcctgagtcggaaaccactgtggagaatcctatcataaaggaatggggactgacagttgataaaacagcttctgtgtcacaagagctggccgtatttacatatttaggggttaaaaatattcacagttcagggtacagggaggccaaaggggagtggggaatgtttctccaggtgtaaaagctctggaagcccctaggagggtacgggtggtggtggtggtggggggggtggttgggaggggagtgaaggcggggctggccgctgccctgggggtgaggggtggtgagggccaggtggggatgcaggaagctgggctcagatgtctatgcatccacactcgctaggcttc

SEQ ID NO: 329 - DNA, 471 bp, Homo sapiens
  Genbank Accession No. AA993222
tttatttttcccacagcagaagtatatttattgtgctgaaatcaggtagcagggaatgaatagctcttgggaaccagtacagaatgttcacaaagatttacaaatctcagtcattacacactgagcaacaaaacaaaggtgttgaatcctcttagatcaaactactttatatgttgcaaattttctgtaattctcatgactgcatgcctttggggaaaaagtatttaattttaatgcacaataaatatgttatagcttacaaaatattctggaatagtttgtacaaacagcatacatcctacacatgcagctttgacatgttgttgagatacttaagaaatattcatgcttttttttggtcacattttgtctttctctagtaatccctttgcaacatcccttaaaaaattaacctatgtagtagaacatgatacaaattctttcctactttatttccagttgttcacttat

SEQ ID NO: 330 - DNA, 471 bp, Homo sapiens
  Genbank Accession No. AA994029
ttttcaattcaagtaatttattgattttcacaataaatacttcctgggggtatactatgtgccagatactaggggcgagcaagatcccagggttccttcattgagggaacagagagggcagtggagaagccaggtgagttaacgagcacttgcaggacagtgtggtaaggacgatgggccatacacagagccaggggacggagagagcctcctggaacccaacgagcaaataggacaagcatgtgaaaacggagttggactactgtctcgacaggcaataggttctggaagctggaggctgtgaatcagcagagcaatggaggagctgaaaaaaatgcggcagactgtctcccagctgacaggggtagcacgcaggagcttcccaggagtgaggtttctcccaggacctggtctagcatccaagccaaacactgggaggaaagggctcagttcagccaagactgtgactgc

SEQ ID NO: 331 - DNA, 414 bp, Homo sapiens
  Genbank Accession No. AA994249
ttttaattgggatacggttttattgtaacaatgagcatggcggaaataaatggaaggtggcaacctgttgacagtgatgcctgtctggtgtcaaccgatggacttgggtttcttgtggcaggagtctgatttgcctttttgcatgcttgcatgtaccttgttcctgcacggcagtcctgtctttggctgtcgactgttcgaggccaaccaccaggcgaggatccactgtttcctggccagactagactcccagctgtgggagtggcccaaaccctgctgcaggccttcactcacaaaagggagtgaatgggcagcccggggtacccagtgttgcctctaagtgcgggatatgaggcctgttggaggatgacaaaaggaacggatgaggtcatactgccgctgggttgggcggga

SEQ ID NO: 332 - DNA, 497 bp, Homo sapiens
  Genbank Accession No. AA995233
ttttcccagtgtaagttatcaggctaattcttgcatatagcagtaaacacatggagtttacagtgtaatgaaaaaggcaagcattaaacaggtgaattaaacagtgatgagtgctatgaaaaaaaggtgaatgtgttataggaatatggagtggaagatctaggttcatcaggcagaggagaaatcagggaaggcttccttgaggaagtgacaaccaagctgagacctgctctgtcgcctgccaccgctgctcgggcccgagtggttcactgcaccgtgaagacagattcctgacaccgggaactcacgcctccaatcccagacgctatgtccagcaaaggctccttggttctggcctacagtggtggcctgaacacctcctgcatcctcgtgtggctgaaggaacaaggctatgatgtcactgcctacctggccaatactggccaaaaggaagacttcgaggaagccaggaagaaaggactgaagcttggagccaa

SEQ ID NO: 333 - DNA, 477 bp, Homo sapiens
  Genbank Accession No. AA995791
ttttgttgtaaaactgtaaaataagcaaggccaaatatttattgtttggcaacacatagagatatatagagttttacatgtaaaattacctataaatgtcaacagcacattgacatggtaaatacgaattcaaaatgggatatccctggcatggaatagagagctgggatggcggagggccacacgggaagctgcaatagaatttttgatgtttgcttcattctctaggtgatgtgttcactggtgttcatcttatcatgtttttaaattgacaagcatgttacatatacaccacagaatactatgcagccataaaaaatgatgagttcatgtcctttgtagggacatggatgaagctggaaaccatcattctcagcaaactgtcacaaggacaaaaaaccaaacaccgcatgttctcactcataggtgggagttgaacaatgagaacacatggacacaggaaggggaacatcacac

SEQ ID NO: 334 - DNA, 1201 bp, Homo sapiens
  Genbank Accession No. AB000584
agtcccagctcagagccgcaacctgcacagccatgcccgggcaagaactcaggacgctgaatggctctcagatgctcctggtgttgctggtgctctcgtggctgccgcatgggggcgccctgtctctggccgaggcgagccgcgcaagtttcccgggaccctcagagttgcacaccgaagactccagattccgagagttgcggaaacgctacgaggacctgctaaccaggctgcgggccaaccagagctgggaagattcgaacaccgacctcgtcccggcccctgcagtccggatactcacgccagaagtgcggctgggatccggcggccacctgcacctgcgtatctctcgggccgcccttcccgaggggctccccgaggcctcccgccttcaccgggctctgttccggctgtccccgacggcgtcaaggtcgtgggacgtgacacgacctctgcggcgtcagctcagccttgcaagaccccaggcgcccgcgctgcacctgcgactgtcgccgccgccgtcgcagtcggaccaactgctggcagaatcttcgtccgcacggccccagctggagttgcacttgcggccgcaagccgccagggggcgccgcagagcgcgtgcgcgcaacggggaccactgtccgctcgggcccgggcgttgctgccgtctgcacacggtccgcgcgtcgctggaagacctgggctgggccgattgggtgctgtcgccacgggaggtgcaagtgaccatgtgcatcggcgcgtgcccgagccagttccgggcggcaaacatgcacgcgcagatcaagacgagcctgcaccgcctgaagcccgacacggtgccagcgccctgctgcgtgcccgccagctacaatcccatggtgctcattcaaaagaccgacaccggggtgtcgctccagacctatgatgacttgttagccaaagactgccactgcatatgagcagtcctggtccttccactgtgcacctgcgcgggggaggcgacctcagttgtcctgccctgtggaatgggctcaaggttcctgagacacccgattcctgcccaaacagctgtatttatataagtctgttatttattattaatttattggggtgaccttcttggggactcgggggctggtctgatggaactgtgtatttatttaaaactctggtgataaaaataaagctgtctgaactgttc

SEQ ID NO: 335 - DNA, 1250 bp, Homo sapiens
  Genbank Accession No. AB000714
aattcggcacgagggcaggtgcaggcgcacgcggcgagagcgtatggagccgagccgttagcgcgcgccgtcggtgagtcagtccgtccgtccgtccgtccgtcggggcgccgcagctcccgccaggcccagcggccccggcccctcgtctccccgcacccggagccacccggtggagcgggccttgccgcggcagccatgtccatgggcctggagatcacgggcaccgcgctggccgtgctgggctggctgggcaccatcgtgtgctgcgcgttgcccatgtggcgcgtgtcggccttcatcggcagcaacatcatcacgtcgcagaacatctgggagggcctgtggatgaactgcgtggtgcagagcaccggccagatgcagtgcaaggtgtacgactcgctgctggcactgccacaggaccttcaggcggcccgcgccctcatcgtggtggccatcctgctggccgccttcgggctgctagtggcgctggtgggcgcccagtgcaccaactgcgtgcaggacgacacggccaaggccaagatcaccatcgtggcaggcgtgctgttccttctcgccgccctgctcaccctcgtgccggtgtcctggtcggccaacaccattatccgggacttctacaaccccgtggtgcccgaggcgcagaagcgcgagatgggcgcgggcctgtacgtgggctgggcggccgcggcgctgcagctgctggggggcgcgctgctctgctgctcgtgtcccccacgcgagaagaagtacacggccaccaaggtcgtctactccgcgccgcgctccaccggcccgggagccagcctgggcacaggctacgaccgcaaggactacgtctaagggacagacgcagggagaccccaccaccaccaccaccaccaacaccaccaccaccaccgcgagctggagcgcgcaccaggccatccagcgtgcagccttgcctcggaggccagcccacccccagaagccaggaagcccccgcgctggactggggcagcttccccagcagccacggctttgcgggccgggcagtcgacttcggggcccagggaccaacctgcatggactgtgaaacctcacccttctggagcacggggcctgggtgaccgccaatacttgaccaccccgtcgagccccatcgggccgctgcccccatgtcgcgctgggcagggaccggcagccctggaaggggcacttgatatttttcaataaaagcctctcgttttagc

SEQ ID NO: 336 - DNA, 1442 bp, Homo sapiens
  Genbank Accession No. AB001325
ccggggatccacgcgcgccgccacccctgcccgcccgacagcgccgccgcctgccccgccatgggtcgacagaaggagctggtgtcccgctgcggggagatgctccacatccgctaccggttgctccgacaggcgctggccgagtgcctggggaccctcatcctcgtgatgtttggctgtggctccgtggcccaggttgtgctcagccggggcacccacggtggtttcctcaccatcaacctggcctttggctttgctgtcactctgggcatcctcatcgctggccaggtctctggggcccacctgaaccctgccgtgacctttgccatgtgcttcctggctcgtgagccctggatcaagctgcccatctacaccctggcacagacgctgggagccttcttgggtgctggaatagtttttgggctgtattatgatgcaatctggcactttgccgacaaccagctttttgtttcgggccccaatggcacagccggcatctttgctacctacccctctggacacttggatatgatcaatggcttctttgaccagttcataggcacagcctcccttatcgtgtgtgtgctggccattgttgacccttacaacaaccccgtcccccgaggcctggaggccttcaccgtgggcctggtggtcctggtcattggcacctccatgggcttcaactccggctatgccgtcaaccctgcccgggactttggcccccgcctttttacagcccttgcgggctggggctctgcagtcttcacgaccggccagcattggtggtgggtgcccatcgtgtccccactcctgggctccattgcgggtgtcttcgtgtaccagctgatgatcggctgccacctggagcagcccccaccctccaacgaggaagagaatgtgaagctggcccatgtgaagcacaaggagcagatctgagtggcaagggccatctcccactccgctgccctggccttgagcatccactgactgtccaaggccactcccaagaagccccccttcacgatccaccctttcaggctaaggagctccctatctaccctcaccccacgaagacagccccttcaggatttccactggaccttgcccaaatagcaccttaggccactgcccctaagctggggtggaaccggaatttgggtcaatacatccttttgtctcccaagggaagagaatgggcagcaggtatgtgtgtgtgtgtgcatgtgtgcatgtgtgtgcatgtgtgtgcaggggtgtgtgtgtggggggggttcccagatattcagggcaagaccagtcggaaggatctgctattggggacccagagacagggaggcagcctgtccatctgtgcataaggagaggaaagttccagggtgtgtatgttttcaggggccttcacatggaggagctgcagatagatatgtgtttctccggaa

SEQ ID NO: 337 - DNA, 3114 bp, Homo sapiens
  Genbank Accession No. AB001466
ctccaggcaacttggggcaagcgtctcagttctcgctctcccttcctcccagcggggtcgccgcagaccccagccctgggagcaccgctctgcagcgcggccggcgggtggagacggttggcccctaaactcgctcgtccagcccaaccgccccggcggcttctcccagccctcgaggctctcctgagcggcctggagaggcgtcgagcgcagcccagcgcccgcctgctcacccgccccggcccgggaagggaattttcggatcctgcgagcccggggcgcccccgcggcctagggcgggcagctcccggggcctggccgagccggtggcgcccgggaggccgcggggacagcacgcagcgcgcgcccttggatgccgtcccgcagcgacgccccggcccgccccgctcctcctcctgcctggctagcctgcctctcatttgggaagttttgtgggttttctttctcctcctccaaccttggcggaggccacgactcaggcgccacagctgggggctagaggccgcggaccatggtgcggggcagccaccgctgaagtcagcaaaaccgagcctggcctgaggcaggctgcgcgggaggccaaagccatggccattgccacgtcgacccagctggcccgggcactgtatgacaacaccgctgagtccccccaggagctgtccttccgccgaggggatgtcctacgggtcctgcagagagagggcgctggtggactggacggctggtgcctctgctccctacacggccagcagggcattgtgcccgccaacagggtgaagctcttgcctgctggcccagcacccaagcccagcctctctcctgcgtccccagcccagcctggctcaccatatccagccccagatcacagcaatgaggaccaggaggtgtatgtggtgccgcccccagctcggccctgtccaacctcaggacctccagctggaccttgcccaccctctcctgacctcatctacaaaatccccagagctagtgggacccagctggctgctcccagagatgccttggaggtctacgatgtgccccccaccgccctccgggtgccctccagtggcccctatgactgccctgcctccttttcccaccctctgacccgggttgccccgcagccccctggagaggatgatgctccctatgatgtgcctctgaccccaaagccacctgcagagctggaaccagatctggagtgggaaggaggccgggagccggggccccccatctatgctgccccctccaacctgaaacgagcgtcagccttactcaatttgtatgaagcacccgaggaactgctggcagacggggagggcgggggcactgatgaggggatctacgatgtgcctctgctggggccagaggctcccccttctccagagccccctggagccttggcctcccatgaccaggacaccctggcccagcttctggccagaagccccccacccccacacaggccccggctcccctcagctgagagcctgtcccgccgccctctgcctgccctgcctgtccctgaggcccccagcccctccccagtgccctctcctgccccaggccggaagggcagcatccaggaccggcctctgcccccacccccaccccgcctgcctggttatggaggccccaaggtcgagggggatccagagggcagggagatggaggatgacccagcaggacaccacaatgagtacgagggcattccgatggccgaggagtatgactatgtccacctgaagggcatggacaaagctcagggatctaggcccccggatcaggcctgcacaggggatcctgaactgcccgagagggggatgccggcgccgcaggaggccctgtccccaggggagccactggttgtgtccaccggagatctgcagctcctgtacttctatgctgggcaatgccagagccactactcagccctgcaggcagccgtggcagccctgatgtccagtacccaggctaatcagcccccgcgccttttcgtgccccacagcaagagggtggtggtggctgctcatcgcctggtgtttgttggggacaccctgggccggctggcagcctctgcccctctgagagcacaggtcagggctgcaggtacagcactgggccaggcattgcgggccactgtgctggctgtcaagggagctgccctgggctacccatccagccctgccatccaagagatggtgcagtgtgtaacagaactggcagggcaggccctgcaattcactaccctgctcactagcctggctccatgaaggtcctttggcacagctctgctcctcccctgcctgccaaagcccccctttaggccttgggtggctggaaggctttgttaagggactaggagaaatgggggtatctttcccctttcctgccctttctgctcatctcaacctctcacagaggtgtcttctccccctaacctacagctttttgtacaagccattttgtgtaaattatttatatttaatattattccctgctttgtcaggagcaggtactaggctctggggcagtgaggaactagatccttctctcctcagcctagggtggaggtcactgcactaccacccacctctggaagactggctgtgaaaagtcaggtggcagaaacctggggccacatagagcctctctcttttcctgtttcttggctctagaagatcagcactgcactgttagctgagagtgcgggcaagacataaactgtccagagtttgaaggttctcggaaagaccggagggcttctccccacagaaggcggagagagctggggctcagacatgggtgtgcaccttaataaaccctgctgtctgcctccctgactctgcttcttgggagcatggtgagcagccctggtgctcagcagccatacctatgggacacacactacgaaaaggatgcctttagggtttgggggagattttactcctttcttcaacaactattcactggacaagttctctgctcccatgacgcgccaggcacagttctgcaagtatattgtgaatgtattgttctagtgggatacacaaataagtcagttaaaatacataaataaaaacataaacctgc

SEQ ID NO: 338 - DNA, 1500 bp, Homo sapiens
  Genbank Accession No. AB002134
gagtgggaatctcaaagcagttgagtaggcagaaaaaagaacctcttcattaaggattaaaatgtataggccagcacgtgtaacttcgacttcaagatttctgaatccatatgtagtatgtttcattgtcgtcgcaggggtagtgatcctggcagtcaccatagctctacttgtttactttttagcttttgatcaaaaatcttacttttataggagcagttttcaactcctaaatgttgaatataatagtcagttaaattcaccagctacacaggaatacaggactttgagtggaagaattgaatctctgattactaaaacattcaaagaatcaaatttaagaaatcagttcatcagagctcatgttgccaaactgaggcaagatggtagtggtgtgagagcggatgttgtcatgaaatttcaattcactagaaataacaatggagcatcaatgaaaagcagaattgagtctgttttacgacaaatgctgaataactctggaaacctggaaataaacccttcaactgagataacatcacttactgaccaggctgcagcaaattggcttattaatgaatgtggggccggtccagacctaataacattgtctgagcagagaatccttggaggcactgaggctgaggagggaagctggccgtggcaagtcagtctgcggctcaataatgcccaccactgtggaggcagcctgatcaataacatgtggatcctgacagcagctcactgcttcagaagcaactctaatcctcgtgactggattgccacgtctggtatttccacaacatttcctaaactaagaatgagagtaagaaatattttaattcataacaattataaatctgcaactcatgaaaatgacattgcacttgtgagacttgagaacagtgtcacctttaccaaagatatccatagtgtgtgtctcccagctgctacccagaatattccacctggctctactgcttatgtaacaggatggggcgctcaagaatatgctggccacacagttccagagctaaggcaaggacaggtcagaataataagtaatgatgtatgtaatgcaccacatagttataatggagccatcttgtctggaatgctgtgtgctggagtacctcaaggtggagtggacgcatgtcagggtgactctggtggcccactagtacaagaagactcacggcggctttggtttattgtggggatagtaagctggggagatcagtgtggcctgccggataagccaggagtgtatactcgagtgacagcctaccttgactggattaggcaacaaactgggatctagtgcaacaagtgcatccctgttgcaaagtctgtatgcaggtgtgcctgtcttaaattccaaagctttacatttcaactgaaaaagaaactagaaatgtcctaatttaacatcttgttacataaatatggtttaacaaacactgtttaacctttctttattattaaaggttttctattttctcc

SEQ ID NO: 339 - DNA, 6629 bp, Homo sapiens
  Genbank Accession No. AB002301
tggaatttgatccggaagaattttactacctattggaagcagcagaaggccatgccaaagaaggacagggtattaaaaccgacattcccaggtacatcattagccaactgggactcaataaggatcccttggaagaaatggctcatttgggaaactacgatagtgggacagcagaaacaccagaaacagatgaatcagtgagtagctctaatgcctccctgaaacttcgaaggaaacctcgggaaagtgattttgaaacgattaaattgattagcaatggagcctatggggcagtctactttgttcggcataaagaatcccggcagaggtttgccatgaagaagattaataaacagaacctcatccttcgaaaccagatccagcaggcctttgtggagcgggatatcctgacttttgcagaaaacccctttgttgtcagcatgtattgctcctttgaaacaaggcgccacttgtgcatggtcatggaatatgtggaagggggagactgtgctactttaatgaaaaacatgggtcctctccctgttgatatggccagaatgtactttgctgagacggtcttggccttggaatatttacataattatggaattgtacacagggatttgaaaccagacaacttgttggttacctccatggggcacataaagctgacagattttggattatctaaggtgggactaatgagcatgactaccaacctttacgagggtcatattgagaaggatgctagagagttcctggataaacaggtctgtggcacacctgaatacattgcaccagaagtgattctgaggcagggttatggaaagccggtggactggtgggccatggggattatcctctatgaatttctggttggatgcgtgccattctttggggatactccagaggagctatttggacaagtcatcagtgatgagatcaactggcctgagaaggatgaggcacccccacctgatgcccaggatctgattaccttactcctcaggcagaatcccctggagaggctgggaacaggtggtgcatatgaagtcaaacagcatcgattcttccgttctttagactggaacagtttgctgagacagaaggcagaatttattccccaactggaatctgaggatgacacaagttattttgatactcggtctgagaagtatcatcatatggaaacggaggaagaagatgacacaaatgatgaagactttaatgtggaaataaggcagttttcttcatgttcacacaggttttcaaaagttttcagcagtatagatcgaatcactcagaattcagcagaagagaaggaagactctgtggacaaaaccaaaagcaccaccttgccatccacagaaacactgagctggagttcagaatattctgaaatgcaacagctatcaacatccaactcttcagatactgaaagcaacagacataaactcagttctggcctacttcccaaactggctatttcaacagagggagagcaagatgaagctgcctcctgccctggagacccccatgaggagccaggaaagccagcccttcctcctgaagagtgtgcccaggaggagcctgaggtcaccaccccagccagcaccatcagcagctccaccctgtcagttggcagtttttcagagcacttggatcagataaatggacgaagcgagtgtgtggacagtacagataattcctcaaagccatccagtgaacccgcttctcacatggctcggcagcgattagaaagcacagaaaaaaagaaaatctcggggaaagtcacaaagtccctctctgccagtgctctttccctcatgatcccaggagatatgtttgctgtttcccctctgggaagtccaatgtctccccattccctgtcctcggacccttcttcttcacgagattcctctcccagccgagattcctcagcagcttctgccagtccacatcagccgattgtgatccacagttcggggaagaactacggctttaccatccgagccatccgggtgtatgtgggagacagtgacatctatacagtgcaccatatcgtctggaatgtagaagaaggaagtccggcatgccaggcaggactgaaggctggagatcttatcactcacatcaatggagaaccagtgcatggacttgtccacacagaagttatagaactcctactgaagagtgggaataaggtgtcaatcactactaccccatttgaaaacacatcaatcaaaactggaccagccaggagaaacagctataagagccggatggtgaggcggagcaagaaatccaagaagaaagaaagtctcgaaaggaggagatctcttttcaaaaagctagccaagcagccttctcctttactccacaccagccgaagtttctcctgcttgaacagatccctgtcatcgggtgagagcctcccaggttcccccactcatagcttgtctccccggtctccaacaccaagctaccgctccacccctgacttcccatctggtactaattcctcccagagcagctcccctagttctagtgcccccaattccccagcagggtccgggcacatccggcccagcactctccacggtcttgcacccaaactcggcgggcagcggtaccggtccggaaggcgaaagtccgccggcaacatcccactgtccccgctggcccggacgccctctccaaccccgcaacccacctccccgcagcggtcaccatcccctcttctgggacactcactgggcaattccaagatcgcgcaagcctttcccagcaagatgcactccccgcccaccatcgtcagacacatcgtgaggcccaagagtgcggagccccccaggtccccgctgctcaagcgcgtgcagtccgaggagaagctgtcgccctcttacggcagtgacaagaagcacctgtgctcccgcaagcacagcctggaggtgacccaagaggaggtgcagcgggagcagtcccagcgggaggcgccgctgcagagcctggatgagaacgtgtgcgacgtgccgccgctcagccgcgcccggccagtggagcaaggctgcctgaaacgcccagtctcccggaaggtgggccgccaggagtctgtggacgacctggaccgcgacaagctgaaggccaaggtggtggtgaagaaagcagacggcttcccagagaaacaggaatcccaccagaaatcccatggacccgggagtgatttggaaaactttgctctgtttaagctggaagagagagagaagaaagtctatccgaaggctgtggaaaggtcaagtacttttgaaaacaaagcgtctatgcaggaggcgccaccgctgggcagcctgctgaaggatgctcttcacaagcaggccagcgtgcgcgccagcgagggtgcgatgtcggatggcccggtgcctgcggagcaccgccagggtggcggggacttcagacgggcccccgctcctggcaccctccaggatggtctctgccactccctcgacaggggcatctctgggaagggggaaggcacggagaagtcctcccaggccaaggagcttctccgatgtgaaaagttagacagcaagctggccaacatcgattacctccgaaagaaaatgtcacttgaggacaaagaggacaacctctgccctgtgctgaagcccaagatgacagctggctcccacgaatgcctgccagggaacccagtccgacccacgggtgggcagcaggagcccccgccggcttctgagagccgagcttttgtcagcagcacccatgcagctcagatgagtgccgtctcttttgttcccctcaaggccttaacaggccgggtggacagtggaacggagaagcctggcttggttgctcctgagtcccctgttaggaagagcccctccgagtataagctggaaggtaggtctgtctcatgcctggagccgatcgagggcactctggacattgctctcctgtccggacctcaggcctccaagacagaactgccttccccagagtctgcacagagccccagcccaagtggtgacgtgagggcctctgtgccaccagttctccccagcagcagtgggaaaaagaacgataccaccagtgcaagagagctttctccttccagcttaaagatgaataaatcctacctgctggagccttggttcctgccccccagccgaggtctccagaattcaccagcagtttccctgcctgacccagagttcaagagggacaggaaaggtccccatcctactgccaggagccctggaacagtcatggaaagcaatccccaacagagagagggcagctcccctaaacaccaagaccacaccactgaccccaagcttctgacctgcctggggcagaacctccacagccctgacctggccaggccacgctgcccgctcccacctgaagcttccccctcaagggagaagccaggcctgagggaatcgtctgaaagaggccctcccacagccagaagcgagcgctctgctgcgagggctgacacatgcagagagccctccatggaactgtgctttccagaaactgcgaaaaccagtgacaactccaaaaatctcctctctgtgggaaggacccacccagatttctatacacagacccaggccatggagaaagcatgggcgccgggtgggaaaacgaaccacaaagatggcccaggtgaggcgaggcccccgcccagagacaactcctctctgcactcagctggaattccctgtgagaaggagctgggcaaggtgaggcgtggcgtggaacccaagcccgaagcgcttcttgccaggcggtctctgcagccacctggaattgagagtgagaagagtgaaaagctctccagtttcccatctttgcagaaagatggtgccaaggaacctgaaaggaaggagcagcctctacaaaggcatcccagcagcatccctccgccccctctgacggccaaagacctgtccagcccggctgccaggcagcattgcagttccccaagccacgcttctggcagagagccgggggccaagcccagcactgcagagcccagctcgagcccccaggaccctcccaagcctgttgctgcgcacagtgaaagcagcagccacaagccccggcctggccctgacccgggccctccaaagactaagcaccccgaccggtccctctcctctcagaaaccaagtgtcggggccacaaagggcaaagagcctgccactcagtccctcggtggctctagcagagaggggaagggccacagtaagagtgggccggatgtgtttcctgctaccccaggctcccagaacaaagccagcgatgggattggccagggagaaggtgggccctctgtcccactgcacactgacagggctcctctagacgccaagccacaacccaccagtggtgggcggcccctggaggtgctggagaagcctgtgcatttgccaaggccgggacacccagggcctagtgagccagcggaccagaaactgtccgctgttggtgaaaagcaaaccctgtctccaaagcaccccaaaccatccactgtgaaagattgccccaccctgtgcaaacagacagacaacagacagacagacaaaagcccgagtcagccggccgccaacaccgacagaagggcggaagggaagaaatgcactgaagcactttatgctccagcagagggcgacaagctcgaggccggcctttcctttgtgcatagcgagaaccggttgaaaggcgcggagcggccagccgcgggggtggggaagggcttccctgaggccagagggaaagggcccggtccccagaagccaccgacggaggcagacaagcccaatggcatgaaacggtccccctcagccactgggcagagttctttccgatccacggccctcccggaaaagtctctgagctgctcctccagcttccctgaaaccagggccggagttagagaggcctctgcagccagcagcgacacctcttctgccaaggccgccgggggcatgctggagcttccagcccccagcaacagggaccataggaaggctcagcctgccggggagggccgaacccacatgacaaagagtgactccctgccctccttccgggtctccaccctgcctctggagtcacaccaccccgacccaaacaccatgggcggggccagccaccgggacagggctctctcggtgactgccaccgtaggggaaaccaaagggaaggaccctgccccagcccagcctcccccagctaggaaacagaacgtgggcagagacgtgaccaagccatccccagccccaaacactgaccgccccatctctctttctaatgagaaggactttgtggtacggcagaggcgggggaaagagagtttgcgtagcagccctcacaaaaaggccttgtaacggggagggcccaggggcaggactgtggagacccgtcctgaacgggcgactgtgtcttgactacctttcaaaaccagcactgtgtgggaatgtccgccaggcagagctcggagcctcattgagacaggggagagagaaagacaaagaggggaccttcttccagatgccttcccagttgtaaccggtaaaactgttaccagatagtgtttgtac

SEQ ID NO: 340 - DNA, 5956 bp, Homo sapiens
  Genbank Accession No. AB002308
ggggagaacacttctttgtctgggattccaaccagctctgtccttagcttgtctctgcctagcagtgttgcccaaagtaattttccacaaggttctggtgcttccgaaatggtttctaatcagcctgctaatttgctggttcaaccaccatcccagccagttccagagaacttggttccagaaagtcaaaaggatcgtaaggcaggaagtgctcttcccggatttgctaatagccctgctggaagcacaagtgtggtgttagttccacctgcacacggcaccctggtgcctgatggtaataaggcaaaccattccagtcatcaggaagacacttacggagccctagactttgccttaagcaggactttggaaaatcctgtaaacgtgtacaacccgtcccattctgacagcctcgcttctcagcaaagtgttgccagtcatcccagacaatctgggcctggggcgcctaaccttgaccgtttttatcagcaggtcacgaaagatgcccagggccagcctggcctcgaaagagcccagcaggagctggcgccaccccagcaacaggcttctcccccacaactacccaaagccatgttttcggagctgtcaaatccagaaagtctgcccgcacagggacaggcccagaactcagcacagtcaccagcaagtctggttctggtcgacgcgggtcagcagctgccccctcggcctcctcagtcctctagcgtgtctctggtgtccagtggctccggccaggcagctgtgccgtcagagcagccgtggccacagccagtgcctgcacttgcccccggcccaccgcctcaggacctggccgcctactactactaccggcctttgtacgatgcctaccagcctcagtactctttgccgtacccaccggagcctggcgcagcctccctctattaccaggatgtctacagcctctatgagcctcgatacaggccctatgatggtgctgcgtctgcttacgcccagaactaccgctatcccgagcccgagcggcccagctcccgagccagccactcctcggaacggccacctcccaggcaaggatatcctgaaggatactatagttccaaaagtggatggagcagtcagagcgattactatgcaagctattactccagccagtacgattatggagatccaggtcactgggatcgttaccactacagtgctagagtcagggacccccgcacctatgaccggaggtattggtgtgatgcagagtatgacgcatacaggagagagcactctgccttcggggacaggcccgagaaacgtgacaacaactggaggtacgatcctcgcttcacggggagttttgacgatgaccccgatccgcacagagacccttatggggaagaggtggaccggcgcagcgtccacagcgagcactcggcacggagcctgcacagcgcacacagcctggccagccgccgcagcagcctcagctcccactcgcaccagagtcagatttacagaagccacaatgtggctgccggttcctacgaggccccgcttcctccaggctcctttcacggcgattttgcctacggcacctaccgcagcaatttcagcagtggccccggcttcccagagtatggctaccctgccgacaccgtctggcctgccatggagcaagtttcatcaagaccaacttctcctgaaaaattttcagtgcctcatgtctgtgccaggtttggccctggcggtcagcttatcaaagtgattcccaatctgccttcagaaggacagccggccttggtggaggtccacagcatggaggccttgctgcagcacacgtctgagcaggaggagatgcgggcgttcccgggacccctggccaaagacgacacccataaggtggatgtcattaattttgcacagaacaaagctatgaaatgtttgcagaatgaaaacttaattgacaaagagtctgcaagtcttctttggaattttattgttctcttatgcagacaaaatgggaccgtggtagggaccgacattgcggagcttctgttacgagaccacagaacagtgtggcttcctgggaagtcgcccaatgaagcaaacctgattgatttcacgaatgaggcagtggagcaggtggaagaggaggagtctggtgaggcccagctctctttcctcactggtggtccggcggctgccgccagctcgctcgagagagagaccgagaggttcagggagctgttgctgtatggccgtaagaaggatgctttggagtctgcaatgaagaatggcctgtggggtcacgctctgctacttgcaagtaagatggacagccggacacacgcccgagtcatgaccaggtttgctaacagcctcccaatcaacgaccctctgcagacagtctaccagctcatgtccggacggatgcctgccgcgtccacgtgctgtggagacgagaaatggggagattggaggccgcacctcgccatggtcttgtccaacttgaacaacaacatggacgtcgagtccaggacgatggctaccatgggcgacactctggcttcaaggggcctcttggatgcggcccacttctgctacctcatggcccaggcgggatttggtgtttacacgaagaaaactacaaagcttgtcttaatcggatccaatcacagtttgccattcttaaagttcgcaaccaacgaagcaatccagaggacggaagcctatgagtacgcccagtccctgggtgccgagacctgccccctgcctagtttccaggtgtttaagttcatctactcctgccgcctggcggaaatggggctggccacgcaagccttccactactgtgaggccatcgcgaagagcatcctgacgcagccgcacctgtattccccggtgttgatcagccagcttgtgcagatggcttcccagttacgactcttcgatccccagctgaaagagaagccagaagaggagtccttggccgcacccacgtggctggttcacctgcagcaggtggagcggcagattaaggagggggctggagtatggcatcaggatggagccctcccgcagcagtgtcctggcactccgagttccgagatggagcagttggacaggccaggactcagtcagccaggagccctggggatcgccaaccctctgctggcggtgcctgcaccgagccctgagcactcgagcccgagcgtgcggctgctgccctcagctccgcagacgctccctgacggcccattggccagtcctgccagagtgccgatgttcccagtgccactgcccccggggcccctggagccgggtcctggctgtgtgaccccagggcctgcacttggcttcctggagccctccgggcctggcctcccacctggtgtgccacctctgcaggaaaggagacacttgctccaggaagccaggagcccagacccagggatagtgccgcaggaggcgcctgttggaaactcactttccgagctaagcgaagaaaattttgatggaaaatttgctaatctgaccccctcgaggacggtgccagactcggaggcccccccagggtgggatcgtgccgactcgggtcccacgcagccacctctgtctctctcacccgctcccgaaacaaagagacccggacaggcagccaagaaagaaacgaaggaacctaagaagggtgaatcctggttctttcgttggctacctggaaagaaaaagacagaagcttatttgccagatgacaagaacaaatcgattgtttgggatgaaaagaaaaaccagtgggtgaatttaaatgagccagaagaggagaagaaagccccgcccccacctccaacctcgatgcccaagactgtgcaagctgccccgcctgccctcccagggcctcctggagcccccgtgaacatgtactctagaagagcagcaggaaccagagctcgctacgttgacgtcctgaacccaagcgggacccagcggagcgagccggctctcgctcctgcggactttgtcgctccactcgcgccactcccaattccttctaacttgttcgtgccaaccccagatgcagaagaaccacagcttccagacgggactggcagggaagggcctgcagcagctaggggcctggccaatccagagcctgccccagagcccaaggctcctggcgacctccctgctgcagggggccctcccagcggggccatgcccttctacaaccctgctcagctggcacaggcctgcgccacctccgggagctcaaggctagggaggattggccagaggaagcacctggtgctgaactaggcttgccctgctgtgaacttgcacttggagccctgacgctgctgttctccccgaagaacccgaccgacctccgcgatctccgtcccgcccccagggagacacagcagtgactcagagctggtcgcacactgtgcctccctcctcaccgcccatcgtaatgaattattttgaaaattaattccaccatcctttcagattctggatggaaagactgaatctttgactcagaattgtttgccgaaaagaatgatgtgactttcttagtcatttaggatgatttaaggatatagtattcctggtcatttaagaatgttcattcattgaagccggagctgtctctgccacgggagagccacatggtcggtagtaaccagggcctctccaagcccagctgtgagtcactgcccagtgagtcccgcgcttcctttaaggtgctgggagcaaagagagggtgactgaggcagaccccaacccctgctctgcaccatctgggccctcgccgtgtttgaacctggctgaatgagtggagggcgctgtgttctcaatcagcgcctccgaggagccgtggggttccttcggcattagttcacggtttttgagagaggccctagttactgcagtgaatttctttcctgttgcagagacgcttccagcctcactttactttctgtggcctgatgaggaccatgggtgattttgtgtacccaaagcgctggggactgcccaccgtgtggcccagtcactgggaaggagccccagagagccggctgtctgacatgatggctcagggtggtcatccaggttgaaaactgaccgtgtgatgtttgatttgggcttcatttcgtgtgtaggagcacggttagactcactgttaaggaagctggatgcacttctctaaaaggctgcactttccgtgagcacttttcgtggtacaatccacatgacccactttctcccctgggggacgttggttcagaggttggtagcacttggggagagtatcttaacacagtttcttgacagcagctctggaacttagtatttctgccccgagttttgccacactgagactttgagtagctcctggtggactcaaccctgttcaactcagagacgggcctcctctcactgatgcaaagctttaaggcttctctgactgttctgaaactcttcgtattcttgtcaagtctaaagagactgaagaaaagatttaaatactaataaaaatcagtagataatttctgtaggttctgctggaggaatacaaactgtttggtgttttaaatttaagtgtagaaattgtagaatgtggaattagcacagatccttcctggctttctgtttcacttgatcatttagcccagaccacccaggatgttttccaaaatgttccacaggcgtgtcccgctggatccatttgtccttgtcacttggagaaaggccagtccctgtgacggggcagccctctctgtccctcggtcagctcgtgtgaatcctgggacctcttccggtcggctctgcccgctgttctggggtcgactgccacgacttttgattcaagaagcttcctccaggcgggagcggctatttttcctaaatgagaattgttacattgcaaattgttgaataaaatattttgcgctccttcaagcac

SEQ ID NO: 341 - DNA, 6651 bp, Homo sapiens
  Genbank Accession No. AB002351
ggccgagtcgtggcgggagacggtgcagctgtacgaggacgaggtgcgcgagctggaggaggcgctgcggcgcggccaggagagcagactccaggcggaggaagagacgcggctgtgcgcgcaggaggcagaggcgctgcggcgcgaggcgctcgggttggagcagctgcgcgcgcggctggaggacgcgctgctgcggatgcgcgaggagtacgggatacaggccgaggagcggcagagagcgattgactgcctggaggatgagaaggcaaccctcaccttggccatggctgactggctgcgggactatcaggacctcctgcaggtgaagaccggcctcagtctggaggtggcgacctaccgggccttattggaaggagaaagtaatccagagatagtgatctgggctgagcacgttgaaaacatgccgtcagaattcagaaacaaatcctatcactataccgactcactactacagagggaaaatgaatggaatctattttcaaggcagaaagcacctttggcaagtttcaatcacagctcggcactgtattctaacctgtcagggcaccgtggatctcagacgggcacatctattggaggtgatgccagaagaggcttcttgggctcgggatattcttcctcggccactacccagcaggaaaactcatacggaaaagccgtcagcagtcaaaccaacgtcagaactttctctccaacctatggccttttaagaaatactgaggctcaagtgaaaacattccctgacagaccaaaagccggagatacaagggaggtccccgtttacataagtgaagattccacaattgcccgcgagtcgtaccgggatcgccgagacaaggtggcagcaggtgcttcggaaagcacacggtcaaatgagaggaccgtcattctgggaaagaaaacagaagtgaaagccacgagggagcaagaaagaaacagaccagaaaccatccgaacaaagccagaagagaaaatgttcgattctaaagagaaggcttctgaggagagaaacctaagatgggaagaattgacaaagttagataaggaagcgagacagagagaaagccagcagatgaaggagaaggctaaggagaaggactcaccgaaggagaagagtgtgcgagagagagaggtgccgattagtctagaagtatcccaggacagaagagcagaggtgtccccgaaaggtttgcagacgcctgtgaaggatgctggtggtgggaccggtagagaggcagaagcaagagagctacggttcaggttgggcaccagtgatgccactggttctctgcaaggcgattccatgacagaaaccgtagcagaaaacatcgttaccagtatcctgaagcagttcactcagtctccagagacagaagcatctgctgattcttttccagacacaaaagtcacttacgtggacaggaaagagcttcctggggaaaggaaaacaaagactgaaatagttgtggagtctaaactgactgaggatgttgatgtttccgatgaagctggcctggactaccttttaagcaaggatattaaggaagtggggctgaaaggcaagtcagccgagcagatgataggagacatcatcaacctcggcctgaaagggagggaggggagagcaaaggtcgtcaacgtggagatcgtggaggagcccgtgagttatgtcagcggggagaagccggaggagttttccgtcccattcaaagtggaggaggtcgaagatgtgtcgccaggcccctgggggttggttaaggaggaggaaggttatggagaaagcgatgtcacattctcagttaatcagcatcgaaggaccaagcagccccaggagaacacgactcacgtggaagaagtgacagaggcaggtgattcagagggcgagcagagttattttgtgtccactccagatgaacaccccggggggcacgacagagatgacggctcggtgtacgggcagatccacatcgaggaggaatccaccatcaggtactcttggcaggatgaaatcgtgcaggggactcgaaggaggacacagaaggacggtgcagtgggcgagaaggttgtgaagcccttggatgtcccagcgccctctctggagggggacctgggttccactcactggaaagaacaagctagaagcggtgaatttcatgccgaacccacagtcattgaaaaagaaattaaaataccccacgaattccacacctccatgaagggcatctcctccaaggagccccggcagcagctggtggaggtcatcgggcagctggaggaaacccttcccgagcgcatgagggaggagctgtccgccctcaccagagaggggcagggtgggccggggagcgtttccgtggatgtcaagaaggtccagggtgctggtggcagttccgtgaccctggttgctgaagtcaacgtctcacaaactgtggatgccgatcggttagacctggaggagctgagcaaagatgaggccagtgagatggagaaggctgtggagtcggtggttcgggagagcctgagcaggcaacgcagcccagcgcctggcagcccagatgaggaaggtggagcggaggccccggctgctggcattcgcttcaggcgttgggccacccgggagctgtacatcccttcaggcgagagcgaggttgctggtggggcctctcacagctcgggacagcgcactccccagggcccagtgtcggccactgtggaggtcagcagccccacaggctttgcccagtcacaggtgctggaggatgtgagccaggctgcaaggcacataaaactcggcccctctgaagtctggaggactgagcgaatgtcatatgaaggacccactgcagaagtggtggaggtaagtgcgggaggtgacctaagtcaggcagcgagcccgaccggagccagccggtctgtgaggcatgtcacgctgggtcccggtcaaagtccactgtccagagaagtcatcttcctaggccctgcccctgcctgtccagaggcatggggctcgccagaacctggcccagcagagtcttctgcagatatggacggatcagggaggcacagcacatttggctgcagacaatttcatgctgaaaaggagattatttttcagggccccatttctgctgcagggaaggttggtgattattttgcaacagaagagtcagtgggtacccagacttctgtcaggcaactccagttaggccctaaagaagggttcagtgggcaaatccagttcacagctccactttcagacaaggtggagttgggtgtcataggagattctgtacacatggaagggttgccagggagcagcacatccatcaggcacatcagcattgggcctcagaggcatcagaccacccagcagatagtttaccatgggctggttccccaactgggggaatctggtgactcagagagcactgtgcacggagagggctcagcagatgtgcaccaggccactcacagtcatacctcgggtagacaaaccgttatgactgaaaagagcaccttccaaagtgtcgtttctgaatctccccaggaggatagtgcaggggacacatcaggggcagaaatgacatcgggtgttagcagatcctttaggcacattcgactaggtcctacagaaacggaaacctctgaacacattgccatccgtggacccgtgtccagaacatttgtgcttgctggttcagcggactcccctgagctaggcaagttagcagacagcagcagaacgctaaggcacattgcaccagggcccaaagaaacttcgtttacctttcagatggatgtgagtaacgtagaggcgatccgcagccggacacaggaagcgggagctctcggtgtgtctgaccgtggttcctggagagacgcggacagtaggaatgaccaggcagttggtgtgagctttaaggcctctgctggggaaggagaccaggcccacagagaacagggcaaggagcaggccatgtttgataagaaggtgcagctccagagaatggtagaccaaaggtcggtgatttcagatgaaaagaaagttgccctcctctatctagacaatgaggaggaggagaatgatgggcattggttttaataagcagaaacattttgttttaatggcagcctgttggcgacgtgccaacatccaaaggccttaacttattttaagaggccgagggagtctatgaaaatctccccttttttacttttttaaagagtactcccggcatggtcaatttcctttatagttaatccgtaaaggtttccagttaattcatgccttaaaaggcactgcaattttatttttgagttgggacttttacaaaacacttttttccctggagtcttctctccacttctggagatgaatttctatgttttgcacctggtcacagacatggcttgcatctgtttgaaactacaattaattatagatgtcaaaacattaaccagattaaagtaatatatttaagagtaaattttgcttgcatgtgctaatatgaaataacagactaacattttaggggaaaaataaatacaatttagactctaaaaagtcttttcaaaaagaaatgggaaataggcagactgtttatgttaaaaaaattcttgctaaatgatttcatctttaggaaaaaattacttgccatatagagctaaattcatcttaagacttgaatgaattgctttctatgtacagaactttaaacaatatagtatttatggcgaggacagctgtagtctgttgtgatatttcacattctatttgcacaggttccctggcactggtagggtagatgattattgggaatcgcttacagtaccatttcattttttggcactaggtcattaagtagcacacagtctgaatgcccttttctggagtggccagttcctatcagactgtgcagacttgcgcttctctgcaccttatcccttagcacccaaacatttaatttcactggtgggaggtagaccttgaagacaatgaagagaatgccgatactcagactgcagctggaccggcaagctggctgtgtacaggaaaattggaagcacacagtggactgtgcctcttaaagatgcctttcccaaccctccattcatgggatgcaggtctttctgagctcaagggtgaaagatgaatacaataacaaccatgaacccacctcacggaagctttttttgcactttgaacagaagtcattgcagttggggtgttttgtccagggaaacagtttattaaatagaaggatgttttggggaaggaactggatatctctcctgcagcccagcaccgagatacccaggacgggcctggggggcgagaaaggcccccatgctcatgggccgcggagtgtggacctgtagataggcaccaccgagtttaagatactgggatgagcatgcttcattggattcattttattttacacgtcagtattgttttaaagtttctgtctgtaaagtgtagcatcatatataaaaagagtttcgctagcagcgcattttttttagttcaggctagcttctttcacataatgctgtctcagctgtatttccagtaacacagcatcatcacactgactgtggcgcactggggaataacagtctgagctagcaccaccctcagccaggctacaacgacagcactggagggtcttccctctcagattcacctggaggccctcagacccccagggtgcacgtctccccaggtcctgggagtggctaccgcaggtagtttctggagagcacgttttcttcattgataagtggaggagaaatgcagcacagctttcaagatactattttaaaaacaccatgaatcagatagggaaagaaagttgattggaatggcaagtttaaacctttgttgtccatctgccaaatgaactagtgattgtcagactggtatggaggtgactgctttgtaaggttttgtcgtttctaatacagacagagatgtgctgattttgttttagctgtaacaggtaatggtttttggatagatgattgactggtgagaatttggtcaaggtgacagcctcctgtctgatgacaggacagactggtggtgaggagtctaagtgggctcagtttgatgtcagtgtctgggctcatgacttgtaaatggaagctgatgtgaacaggtaattaatattatgacccacttctatttactttgggaaatatcttggatcttaattatcatctgcaagtttcaagaagtattctgccaaaagtatttacaagtatggactcatgagctattgttggttgctaaatgtgaatcacgcgggagtgagtgtgcccttcacactgtgacattgtgacattgtgacaagctccatgtcctttaaaatcagtcactctgcacacaagagaaatcaacttcgtggttggatggggccggaacacaaccagtctttttgtatttattgttactgagacaaaacagtactcactgagtgtttttcagtttcctactggtggttttgatattgtttgtttaagatgtatatttagaatgacatcatctaagaagctgattttgctaaactcctgttccctacaatgggaaatgtcacaagaatgtgcaaaaataaaaatctgagg

SEQ ID NO: 342 - DNA, 1113 bp, Homo sapiens
  Genbank Accession No. AB006781
atctcccactcctgcagctcttctcacaggaccagccactagcgcagcctcgagcgatggcctatgtccccgcaccgggctaccagcccacctacaacccgacgctgccttactaccagcccatcccgggcgggctcaacgtgggaatgtctgtttacatccaaggagtggccagcgagcacatgaagcggttcttcgtgaactttgtggttgggcaggatccgggctcagacgtcgccttccacttcaatccgcggtttgacggctgggacaaggtggtcttcaacacgttgcagggcgggaagtggggcagcgaggagaggaagaggagcatgcccttcaaaaagggtgccgcctttgagctggtcttcatagtcctggctgagcactacaaggtggtggtaaatggaaatcccttctatgagtacgggcaccggcttcccctacagatggtcacccacctgcaagtggatggggatctgcaacttcaatcaatcaacttcatcggaggccagcccctccggccccagggacccccgatgatgccaccttaccctggtcccggacattgccatcaacagctgaacagcctgcccaccatggaaggacccccaaccttcaacccgcctgtgccatatttcgggaggctgcaaggagggctcacagctcgaagaaccatcatcatcaagggctatgtgcctcccacaggcaagagctttgctatcaacttcaaggtgggctcctcaggggacatagctctgcacattaatccccgcatgggcaacggtaccgtggtccggaacagccttctgaatggctcgtggggatccgaggagaagaagatcacccacaacccatttggtcccggacagttctttgatctgtccattcgctgtggcttggatcgcttcaaggtttacgccaatggccagcacctctttgactttgcccatcgcctctcggccttccagagggtggacacattggaaatccagggtgatgtcaccttgtcctatgtccagatctaatctattcctggggccataactcatgggaaaacagaattatcccctaggactcctttctaagcccctaataaaatgtctgagggtg

SEQ ID NO: 343 - DNA, 1394 bp, Homo sapiens
  Genbank Accession No. AB006867
ttaaggaggtgcagtcttatgggagggacaggggcggagtcagtctttaaaagctgttcccaggtctggcccgcctgccacaaacgctgagcccaggtgggagaggtctggcctatccgcgcctggcagctgtcggaactccggagaccacaaaggggtttatggtttaccccctccacggaaggtcggtctgatcgcagctgcgggtcggggagagggaccgggggtcccccagtcagtaggcctcagaacacctcttcagtgccggggcaccagacagcggattttgcattcgactctccccaaagtgtgccgaacaggttggaagcaaaggctccggtttaagctctgggcttggggataaaatacactttttaaggacccaagttcctcggcaacgactccagactgggaagacctttccattttcaggatcgacgcttcacgttgaggggagggcattcaggacgccctcttaaggcttctcccaacccatggcgctaccaggctcctcacaggaccaggcctggagcctggagcctccggctgccacggctgctgcctcctcatcttcgggaccccaggagcgggagggcgctgggagccccgcggcccccgggacgctgcccctggagaaggtgaagcggccgatgaacgcgttcatggtgtggagctccgctcagcgccgccagatggcgcagcagaaccccaagatgcacaactccgagatctccaagcgcctgggcgcgcagtggaagctgctggacgaggacgagaagcggcccttcgtggaggaggccaagcggctccgcgcccgacacctgcgcgactaccccgactacaagtaccggcctcggcgcaaggccaagagctcgggcgccggaccttcccgctgcggacagggaagaggcaacctggccagcggcggcccgctctgggggccggggtacgcgaccacccaaccgagcagaggctttgggtacagaccccccagctactcgacagcctacctgcctggcagctatggctcttcccactgcaaactggaagccccctcaccgtgctccctccctcagagtgaccctaggctccagggggaactgctgcccacctatacccactacctgccccctggctctcccactccatacaaccctccccttgctggtgcccccatgcccctaacccacctctaaccctcatggacgcagacctcacgggacgggcctcatcctccttttttaatccagcagcatcccctaccccaggctgtcaaccctttctcctgttggactacagttcagaggcagcctgcagtcctcccatgatagccagggagagccgcacaacatacaattatatttttggtagtattaaacagttttgtattattc

SEQ ID NO: 344 - DNA, 6588 bp, Homo sapiens
  Genbank Accession No. AB007935
aaactgttctctggagctataagtggattgccagaaatgagagattaggagctgggagaagaggaagcgccttgtgttgtgtctcctggaggctgccgacatgaagtgctttttcccggtgctgagctgtctggctgtgctgggtgtggtgtcagcacagcggcaggtcaccgttcaggaaggacccttgtaccgcacggagggctcccacatcactatctggtgcaatgtgagtggctaccagggaccttctgagcagaatttccagtggtccatttacctgccttcgtcgccagagcgagaggtgcagatcgtcagcaccatggactcttccttcccctatgccatctacacccagcgcgtccgcggagggaagatcttcatagaaagagtccaggggaactcaaccctattgcacatcacagatcttcaggcccgggatgccggggagtatgaatgccacacacccagcactgataagcaatactttgggagttacagtgcaaagatgaacctagtggtgatcccagactccctgcagaccactgccatgccccagactctgcacagagtggagcaggacccgctggagctcacttgtgaggtggcctcagagaccattcagcacagccacctgtctgtggcctggctccggcagaaagttggcgagaagcccgtggaggtcatctccctgagccgagatttcatgcttcactccagcagcgaatatgcccagaggcagagcctgggggaggtgcggctggacaagctggggaggaccaccttccgcctcaccatcttccacctgcagccttctgaccagggcgaattctactgcgaggccgccgagtggatccaggatccggatgggtcgtggtatgctatgacccgaaagcgttccgagggagccgtggtcaacgtccagccaactgacaaagaattcactgttcggctggagacagagaagcggctgcacacggtgggcgagccggtggagttcagatgcatcctggaggctcagaatgttcccgaccgttactttgctgtctcctgggccttcaacagctcgctcatcgccaccatgggtcctaacgctgtgcctgtcctcaacagcgaatttgctcaccgggaagccaggggacagcttaaggtggccaaagagagcgacagtgtctttgtgctgaagatctaccacctccgccaggaagatagcgggaaatacaactgccgggtgactgagcgagagaaaaccgtgaccggggaattcattgataaggagagcaagcgtcccaagaacatccccatcatagtcctccccctcaagagcagcatctccgtggaggtggccagcaatgccagcgtcatccttgagggcgaggacctgcgcttctcctgcagtgtccgcacggcaggcaggccgcagggtcgcttctctgtcatctggcagcttgtggacaggcagaaccgccgcagcaatatcatgtggctagaccgggatggcaccgtgcagccaggctcgtcctactgggagcgcagcagctttgggggcgtccagatggagcaggtgcagcccaactcgttcagcctgggcatcttcaacagcaggaaggaggacgagggccagtatgaatgccatgtgactgaatgggtgcgggcagtggatggcgagtggcagattgttggggagcgccgggccagcactcccatctccatcacagctcttgaaatgggcttcgcagtcacagccatctcccggacaccgggggtgacctacagcgactcctttgacttgcagtgtatcatcaaaccccactaccctgcctgggtccccgtgtcggtgacatggcggttccagccggtgggcacggtggagttccatgacttggtgaccttcacccgggacggaggggtccagtggggggacaggtcctccagcttccgaacccgaactgccatcgagaaggctgagtccagcaacaacgtccgcctaagcatcagccgagccagtgacacggaagcaggcaagtaccagtgtgtggcagagctgtggcggaagaactacaacaacacctggacgcgactggcggagaggacctccaacctgctggagatcagggtgctgcagccagtgacaaagctgcaggtgagcaaatcgaagaggaccctcaccctggtggaaaacaagcccattcagttgaactgctcagtcaagtctcagactagccagaactcccactttgcggtgctctggtatgtccacaagccctcggatgccgatggcaagcttatcctgaagaccacccacaactccgcctttgaatacggtacttacgccgaggaggagggcctgagagccaggctccagtttgagaggcatgtgtcggggggcctgttcagcctcaccgtccagagagccgaggtcagcgacagcggcagctactactgccacgtggaggagtggctgctgagccccaactacgcctggtacaagctggcagaggaggtttctgggcgcacagaagtcactgtgaaacagccagacagccgcctgaggctcagccaagcccaggggaacctgtcggttctggagacccggcaggtacagctggagtgtgtggttctcaaccgcaccagcataacctcccagctcatggtggaatggtttgtatggaagcccaaccaccctgagcgggagactgtggcccgcttgagccgtgacgccaccttccactatggagagcaggcagccaagaacaatctgaaggggcggctgcatttggagagtccttcccccggcgtgtaccgtctcttcatccagaacgtggctgtgcaggacagcgggacctacagctgccatgtggaggagtggctgcccagccccagtggcatgtggtataagcgggcagaggacaccgctgggcagacagctctgacagtcatgcgaccagatgcttccctgcaggtggacacagtggtccccaatgccacggtctctgagaaggcagctttccagctggactgtagcatcgtgtcccgctccagccaggactcccgcttcgctgtggcctggtattccctgaggactaaagctggggggaaaaggagcagccctggcctggaagaacaggaagaggaaagggaggaggaggaggaggaggacgacgacgacgacgacgacccaacagagcggacggccctgctgagcgtgggcccagatgctgtctttggcccagagggcagtccttgggagggcaggcttcgcttccagaggctctccccggtgctctaccggctcacagtgctgcaggcaagcccccaagatacaggcaattactcctgccatgtggaggagtggctgcccagccctcagaaggaatggtaccggctgacggaggaggagtcagcccccatcggcatccgtgttctagatacaagtcccaccctccagtccatcatctgctccaacgacgcactcttctacttcgtcttcttctaccctttccccatctttggcattcttatcatcaccatccttctggtgcgtttcaagagccggaactccagcaagaactctgatgggaagaatggggtgcctctgctgtggatcaaagagccacacctcaactactcccctacttgcctggagccccctgttctcagtatccatccaggggccatagactaagcgggtgatgccccagcggatgttggccacggaggagctgaggctctccctttctctgtgattggacagttgacagcacccaaactctggggtgcatgtgtgtggaaagttgtcagacttgaaaagtgttccaagttcccagtcagtcacagagacagactgcctctcggtggcagtcttggttggttagctatttgcgcgcaaatgttgtgatcctgccattatagatttcttgtttctgtttttagtaatgtagtgagtagctccaggtgccacatctactcacagatttatctagtattctcagatagatgttacagggcttcttattctttgtaatgtactctttttaaatccctttagtttaccctttttggattccttaatgtggacgaatttctcttacgtacaactgacagcaaaaggaagggcgaactttctagtgacaaggaatctcttccaagactttgtttttgcacatttgaaaatgccacccatggatcaaaatatacccaaacgttttttactttcttaacaagacttaagaattgtgtgtagtgtgggcaaaatttgtatgttgtcttttccctcagctggagttattggaaccactttgtagtcaagacgaaagcactgaattttgcttcaaagaactgtgtatgtacaagagaaatcctgcataaccccattaggagtagatggtgcccggcctatctgtcagggaggcaaaaaaggcttcatcccatccttgccaaaaaataagaaaactgtcttggagaatgggtcagaagccccaaacggcacacactttccaaattaaagtgggcaggggctgcttttagcagctgctgacctgcagatttgtcaaagccagtgactagagaaggaagggagaaaggctggctgttggcttgctctgagctgcaaggatggtctctaactgattaactgtgagcaggtgggcctgtgtcttcaggtgctttgccaaactcttaaaagaaagtgtccagtgaacttggaagtgggcccctgagctgagcacagggccaaagcagccatggcagacacctgacggagggcacggggctggctgacactaagtttggtgggacagtgaggggtgggaggggggtttccagggcctggtgttggagagtgcagagaaatatctacctccctggaggtgtgaagactaggtttttcttcttccttccaattagattttccttaattatagtgatgtcttccttattcatttttctctccctgcctctcactgccataagaatatcagcctgggggcagtccagacgcagccctttgtcatcctttctgtttgcctagtctcagcagactgtgatcacaaggcattgtctgtgggatttttcctttccctttcttgatctctcttgtggttctaggttgtttggttgttcattgttatggtggctttttattttaacgccccttgagccccatgatggctggtgtcaccctgttcttttacactgttgggccaggtgctgcttgtccttcttagggcatcatcaattgcaaatatttccttttgctccctttatgaagatgttcttatacccttgctttcccatatttttctggccaagcatgccatctcctttactctgggaacttacatcctgaatcccaagagggggtcacagtttggaaaaagtcatcagggattctggaactaagtctgataaaagattccagtgaagccctgttctgagaacgagcagactgcaggggaggccatgggattccccaggccagtgtctgtgctgatccttcaagggtctgcaggtatgcaggtggcctgggctgctcggcagatactttgctgattcccagctgaggggagcatggtggcgattgctcagccattttctgacagacacacagacctgccttttctcccccaagtataccgtaccctcctgtgagacagtgtgtgcaggcaccaccaccttaatcctgctgttgcctgacatgctgattctcatttattatgctgcatcaacacattagaggtacaggagcggctcagtcatgaaaaaagaaggtcttttgccccatttctttatttcagagatgtgggctttcagtgggaatttgctgactcctactttataggctgagtcaatgagggaagatgactggcgtttcctctgtctaaatgggaggttgccagagcgctggctgggactaggatgtgtaactaagatttcagtttgaaatcttagatttcagttcacggcgataaagaagtaggtgctgcacacaaatatgtaaagcaattgtaggaaatttgaaaggaaaaaaagaaaccgaagccagtattttaataattgctttttctgtgtattttgtattgggctgggggatagcatcaaaggttgaactttttgagctttctatgaaaaaccccaggaccttctttctttggccatttctatggaaatgcgatgtcagatggatggtaatggtgccctccagtggctgtgagacctcattgcgcattgtctactggagctttagtcttctgagacggaggaaaactgctgaatactctggattcatctatgtctacaatgttgcatttatgaaaaactacactgtgctaggcgcattctaggacatgaatatgaccacaccctctttcaccgggtgtttctgtagcaagttttcatattcttttcaaacaatggtttctctgcgttaattattgaggaaaaaaaaagatggggtaagaaaactacccatgcatgatgtagagagctgttgatttgtttctgtttttttaaaggaaaactatttgtaagatgttgcactaaaacattttatatacacttcagagacctgtagtaaattatgttgaaaat

SEQ ID NO: 345 - DNA, 2076 bp, Homo sapiens
  Genbank Accession No. AB008109
agacagttttgaagttttcaaagactggctctgctgttaagaagttgtacttaaagcggaggagctaagccacctgccaaaatgtgcaaaggacttgcagctttgccccactcatgcctggaaagggccaaggagattaagatcaagttgggaattctcctccagaagccagactcagttggtgaccttgtcattccgtacaatgagaagccagagaaaccagccaagacccagaaaacctcgctggacgaggccctgcagtggcgtgattccctggacaaactcctgcagaacaactatggacttgccagtttcaaaagtttcctgaagtctgaattcagtgaggaaaaccttgagttctggattgcctgtgaggattacaagaagatcaagtcccctgccaagatggctgagaaggcaaagcaaatttatgaagaattcattcaaacggaggctcctaaagaggtgaatattgaccacttcactaaggacatcacaatgaagaacctggtggaaccttccctgagcagctttgacatggcccagaaaagaatccatgccctgatggaaaaggattctctgcctcgctttgtgcgctctgagttttatcaggagttaatcaagtagtaatttagccaggctatgaaatcatcctgtgagttatttcctccataataaccctgcatttcccattaatctacatatcttcccacagcagctttgctcagtgatacccacatgggaaaaatcccaggggatgttgcttactctttttgcccacactgctttggatacttatctactgtccgaaggccttctttccccactcaattcttcctgccctgttattaattaagatatcttcagcttgtagtcagacccaatcagaatcacagaaaaatcctgcctaaggcaaagaaatataagacaagactatgatatcaatgaatgtgggttaagtaatagatttccagctaaattggtctaaaaaagaatattaagtgtggacagacctatttcaaaggagcttaattgatctcacttgttttagttctgatccagggagatcacccctctaattatttctgaacttggttaataaaagtttataagatttttatgaagcagccactgtatgatattttaagcaaatatgttatttaaaatattgatccttcccttggaccaccttcatgttagttgggtattataaataagagatacaaccatgaatatattatgtttatacaaaatcaatctgaacacaattcataaagatttctcttttataccttcctcactggccccctccacctgcccatagtcaccaaattctgttttaaatcaatgacctaagatcaacaatgaagtattttataaatgtatttatgctgctagactgtgggtcaaatgtttccattttcaaattatttagaattcttatgagtttaaaatttgtaaatttctaaatccaatcatgtaaaatgaaactgttgctccattggagtagtctcccacctaaatatcaagatggctatatgctaaaaagagaaaatatggtcaagtctaaaatggctaattgtcctatgatgctattatcatagactaatgacatttatcttcaaaacaccaaattgtctttagaaaaattaatgtgattacaggtagaggccttctaggtgagacacttttaaggtacactgcattttgcagaaaaaaaaaaaaaaaagtaatcttttagcaaccccagtattccttcactatttcgcttcctgcattagcaaattttacttacagtcaaaagtgcagatttatactcctgacgtgtctcattcacagctaaataataggccataggacttttggtaggtttaaacttttaattctgtatttcatgattataagtcttgctagaattttttctaatctttagtagatttgattaaataatgattcacagaatttagtaacagaatcaaactaagccatgtatgagggtaatcgagatgaggatattaactcaaaagaaatagggtgatttttaaaggattaataaaattctgaaatgttaagtag

SEQ ID NO: 346 - DNA, 2375 bp, Homo sapiens
  Genbank Accession No. AB008375
agctcatcaacgcaattgcaactccggctggagccccggacctgcaagcctgggtgtccgtgggtccgtctgcccagccatctgctggtggcacctctccctcctgccgcctccctcggtgaaccccaccttgcaaaagtgcagctcgcccggagcagcccagaagctcagcatgcgtcccccaggcttcaggaacttcttgctgctggcgtcctcccttctctttgctgggttgtcagctgttcctcaaagcttctcgccatctctgaggagctggccgggcgccgcctgcaggctgtcccgggccgagtcgcagcggcgtctgcatctgccacgtgactgagccgggcatgttcttcgggcccctgtgtgagtgccatgagtgggtgtgcgagacctacgacgggagcacctgtgcaggccatggtaagtgtgactgtgggcaagtgcaagtgtgaccagggatggtatggggatgcttgccagtacccaactaactgtgacttgacaaagaagaaaagtaaccaaatgtgcaagaattcacaagacatcatctgctctaattcaggtacatgtcactgtggcaggtgtaagtgtgataattcagatggaagtggacttgtgtatggtaaattttgtgagtgtgacgatagagaatgcatagacgatgaaacagaagaaatatgtggaggccatgggaagtgttactgtggaaactgctactgcaaggctggttggcatggagataaatgtgaattccagtgcgatatcaccccctgggaaagcaagcgaagatgcacgtctccagatggcaaaatctgcagtaacagagggacttgtgtatgtggtgaatgtacctgtcacgatgttgatccgactggggactggggagatattcatggggacacctgtgaatgtgatgagagggactgtagagctgtctatgaccgatattctgatgacttctgttcaggtcatggacagtgtaattgcggaagatgtgactgcaaagcaggctggtatgggaagaagtgtgagcacccacagtcctgcacgctgtcagctgaggagagcatcaggaagtgccagggaagctcggatctgccttgctctgggaggggtaaatgtgaatgtggcaaatgcacctgctatcctccaggagatcgccgggtgtatggcaagacttgtgagtgtgatgatcgccgctgtgaagacctcgatggtgtggtctgtggaggccacggcacatgttcctgtggtcgctgtgtttgtgagagaggatggtttggaaagctctgccaacatccgcggaagtgtaacatgacggaagaacaaagcaagaatctgtgtgaatcagcagatggcatattgtgctcggggaagggttcttgtcattgtgggaagtgcatttgttctgctgaggagtggtatatttctggggagttctgtgactgtgatgacagagactgcgacaaacatgatggtctcatttgtacagggaatggaatatgtagctgtggaaactgtgaatgctgggatggatggaatggaaatgcatgtgaaatctggcttggctcagaatatccttaacaattacatgagagaggtctggattcttattttttctgggccattagaacatataaatgcgaaggaaaccatgtatattcaccactaggacaggttaaaaagaccattgtatgtttttctatttctgaattacgaatgaaatccgagtacctattagaaatgagttatgcaaatttagatgcaaataacattagaaaaaaaagattcttccataattaacataagtggttcctaacgagagcaatttttccacccaaaagtcatttggcaacatctacagacaattttgattgtcacactgggtcgggtaggaaggtatgctgcagacatttggtgggtagaggccagggatgctgctgagcatcccgcagtgtacaggacagcccccaaacaaggaattatccagccccaaatgccaatagggctcaaactgagaaacattgagttatatggctattagaaatccacattcttacacaagaaagaccatattagaatctaaggaaaacatgcatattcacattaattaatcgatcagatttttccagaattccgtatcagtcaccattttaatatggggacaatgaagacaagcacacaggaggtagaatatcagagtggggctggatcaagggcaaaaactggtcattaagtcatctgacattaaatcatttagccactaagttatttgtctactctcactttaaactcaccaaagaagattctcttaaagaaattatgaaaaatgtacaatttaacattttaaataaatagtgacagaagtt

SEQ ID NO: 347 - DNA, 905 bp, Homo sapiens
  Genbank Accession No. AB008390
cactgggtccgaatcagtaggtgaccccgcccctggattctggaagacctcaccatgggacgcccccgacctcgtgcggccaagacgtggatgttcctgctcttgctggggggagcctgggcaggacactccagggcacaggaggacaaggtgctggggggtcatgagtgccaaccccattcgcagccttggcaggcggccttgttccagggccagcaactactctgtggcggtgtccttgtaggtggcaactgggtccttacagctgcccactgtaaaaaaccgaaatacacagtacgcctgggagaccacagcctacagaataaagatggcccagagcaagaaatacctgtggttcagtccatcccacacccctgctacaacagcagcgatgtggaggaccacaaccatgatctgatgcttcttcaactgcgtgaccaggcatccctggggtccaaagtgaagcccatcagcctggcagatcattgcacccagcctggccagaagtgcaccgtctcaggctggggcactgtcaccagtccccgagagaattttcctgacactctcaactgtgcagaagtaaaaatctttccccagaagaagtgtgaggatgcttacccggggcagatcacagatggcatggtctgtgcaggcagcagcaaaggggctgacacgtgccagggcgattctggaggccccctggtgtgtgatggtgcactccagggcatcacatcctggggctcagacccctgtgggaggtccgacaaacctggcgtctataccaacatctgccgctacctggactggatcaagaagatcataggcagcaagggctgattctaggataagcactagatctcccttaataaactcacaactctctggaaaaaaaaaaaaaaaaaaaa

SEQ ID NO: 348 - DNA, 3193 bp, Homo sapiens
  Genbank Accession No. AB011535
aggttcagtggtcagagctatgtgcggtacagggccccagcggctcggaactggcacatccatttctatctgaaaacactccagccacaggccattcttctattcaccaatgaaacagcgtccgtctccctgaagctggccagtggagtgccccagctggaataccactgtctgggtggtttctatggaaacctttcctcccagcgccatgtgaatgaccacgagtggcactccatcctggtggaggagatggacgcttccattcgcctgatggttgacagcatgggcaacacctcccttgtggtcccagagaactgccgtggtctgaggcccgaaaggcacctcttgctgggcggcctcattctgttgcattcttcctcgaatgtctcccagggctttgaaggctgcctggatgctgtcgtggtcaacgaagaggctctagatctgctggcccctggcaagacggtggcaggcttgctggagacacaagccctcacccagtgctgcctccacagtgactactgcagccagaacacatgcctcaatggtgggaagtgctcatggacccacggggcaggctatgtctgcaaatgtcccccacagttctctgggaagcactgtgaacaaggaagggagaactgtacttttgcaccctgcctggaaggtggaacttgcatcctctcccccaaaggagcttcctgtaactgccctcatccttacacaggagacaggtgtgaaatggaggcgaggggttgttcagaaggacactgcctagtcactcccgagatccaaaggggggactgggggcagcaggagttactgatcatcacagtggccgtggcgttcattatcataagcactgtcgggcttctcttctactgccgccgttgcaagtctcacaagcctgtggccatggaggacccagacctcctggccaggagtgttggtgttgacacccaagccatgcctgccatcgagctcaacccattgagtgccagctcctgcaacaacctcaaccaactggaacccagcaaggcctctgttccaaatgaactcgtcacatttggacccaattctaagcaacggccagtggtctgcagtgtgccccccagactcccgccagctgcggtcccttcccactctgacaatgggcctgtcattaagagaacctggtccagtgaggagatggtgtaccctggcggagccatggtctggccccctacttactccaggaacgaacgctgggaatacccccactccgaagtgactcagggccctctgccgccctcggctcaccgccactcaaccccagtcgtgatgccagagcctaatggcctctatgggggcttccccttccccctggagatggaaaacaagcgggcacctctcccaccccgttacagcaaccagaacctggaagatctgatgccctctcggccccctagtccccgggagcgcctggttgccccctgtctcaatgagtacacggccatcagctactaccactcgcagttccggcagggagggggagggccctgcctggcagacgggggctacaagggggtgggtatgcgcctcagccgagctgggccctcttatgctgtctgtgaggtggagggggcacctcttgcaggccagggccagccccgggtgccccccaactatgagggctctgacatggtggagagtgattatggcagctgtgaggaggtcatgttctagcttcccattcccagagcaaggcaggcgggaggccaaggactggacttggcttatttcttcctgtctcgtagggggtgagttgagtgtggctgggagagtgggagggaagccctcagcccaggctgttgtcccttgaaatgtgctcttccaatcccccacctagtccctgagggtggagggaagctgaggatagagctccagaaacagcactagggtcccaggagaggggcatttctagagcagtgaccctggaaaaccaggaacaattgactcccggggtgggcgagagacaggagggctccctgatctgccggctctcagtccccggggcagagcctgattgactgtgctggctcaacttcaccaagatgcattctcatacctgcccacagctccattttggaggcaggcaggttggtgcctgacagacaaccactacgcgggccgtacagaggagctctagagggctgcgtggcatcctcctaggggctgagaggtgagcagcaggggagcgggcacagtcccctctgcccctgcctcagtcgagcactcactgtgtctttgtcaagtgtctgctccacgtcaggcactgtgctttgcaccggggagaaaatggtgatggagggcaacaaggactccgaggagcaccaccaggcctcgggccccagaggtcccactcctcagcctacacgcagaggaacgggcccacctcagagtcacaccactggctgccagtcagggcctgccaggagtctacacagctctgaaccttctttgttaaagaattcagacctcatggaactctgggttcttcatcccaagtttcccaggcacttttggccaaaggaaggaaggaactaattcttcattttaaaaattcttaggcactttttgaccttgctgtctggatgagtttcctcaatgggatttttcttccctagacacaaggaagtctgaactcctatttagggccggttggaagcagggagctggaccgcagtgtccaggctggacacctgccattgcctcctctccattgcagacgcctgcccatcaagtattactgcggcgactcaaccctatgcatggagggtcaatgtgggcacatgtctacacatgtgggtgcccatggatagtacgtgtgtacacatgtgtagagtgtatgtagccaggagtggtggggaccagaagcctctgtggcctttggtgacctcaccactccctcccacccagtccctccctctggtccactgccttttcatatgtgttgtttctggagacagaagtcaaaaggaagagcagtggagccttgcccacagggctgctgcttcatgcgagagggagatgtgtgggcgagagccaatttgtgtgagtggtttgtggctgtgtgtgtgactgtgagtgtgagtgacagatacatagtttcattggtcattttttttttaacaataaagtatctttttttactgtt

SEQ ID NO: 349 - DNA, 1186 bp, Homo sapiens
  Genbank Accession No. AB012917
aggaatctgcgctcgggttccgcagatgcagaggttgaggtggctgcgggactggaagtcatcgggcagaggtctcacagcagccaaggaacctggggcccgctcctcccccctccaggccatgaggattctgcagttaatcctgcttgctctggcaacagggcttgtagggggagagaccaggatcatcaaggggttcgagtgcaagcctcactcccagccctggcaggcagccctgttcgagaagacgcggctactctgtggggcgacgctcatcgcccccagatggctcctgacagcagcccactgcctcaagccccgctacatagttcacctggggcagcacaacctccagaaggaggagggctgtgagcagacccggacagccactgagtccttcccccaccccggcttcaacaacagcctccccaacaaagaccaccgcaatgacatcatgctggtgaagatggcatcgccagtctccatcacctgggctgtgcgacccctcaccctctcctcacgctgtgtcactgctggcaccagctgcctcatttccggctggggcagcacgtccagcccccagttacgcctgcctcacaccttgcgatgcgccaacatcaccatcattgagcaccagaagtgtgagaacgcctaccccggcaacatcacagacaccatggtgtgtgccagcgtgcaggaagggggcaaggactcctgccagggtgactccgggggccctctggtctgtaaccagtctcttcaaggcattatctcctggggccaggatccgtgtgcgatcacccgaaagcctggtgtctacacgaaagtctgcaaatatgtggactggatccaggagacgatgaagaacaattagactggacccacccaccacagcccatcaccctccatttccacttggtgtttggttcctgttcactctgttaataagaaaccctaagccaagaccctctgcgaacattctttgggcctcctggactacaggagatgctgtcacttaataatcaacctggggttcgaaatcagtgagacctggattcaaattctgccttgaaatattgtgactctgggaatgacaacacctggtttgttctctgttgtatccccagccccaaagacagctcctggccatatatcaaggtttcaataaatatttgctaaatgagtg

SEQ ID NO: 350 - DNA, 6754 bp, Homo sapiens
  Genbank Accession No. AB014520
ccgggctgcgcggcgaggctgagccgggcccgggcgccggggccgggggcggctggcgcgggcaggaagcgcctcgcggacccgggcccgccccccgcctcccgccgcctccgggctcccggctcccggccgcgcctcgccccatgcactcgccgcgccgcgcagcccgcgcacgcccggatggctcctcgcgccgcgggcggcgcaccccttagcgcccgggccgccgccgccagccccccgccgttccagacgccgccgcggtgcccggtgccgctgctgttgctgctgctcctgggggcggcgcgggccggcgccctggagatccagcgtcggttcccctcgcccacgcccaccaacaacttcgccctggacggcgcggcggggaccgtgtacctggcggccgtcaaccgcctctatcagctgtcgggcgccaacctgagcctggaggccgaggcggccgtgggcccggtgcccgacagcccgctgtgtcacgctccgcagctgccgcaggcctcgtgcgagcacccgcggcgcctcacggacaactacaacaagatcctgcagctggaccccggccagggcctggtagtcgtgtgcgggtccatctaccagggcttctgccagctgcggcgccggggtaacatctcggccgtggccgtgcgcttcccgcccgccgcgccgcccgccgagcccgtcacggtgttccccagcatgctgaacgtggcggccaaccacccgaacgcgtccaccgtggggctagttctgcctcccgccgcgggcgcggggggcagccgcctgctcgtgggcgccacgtacaccggttacggcagctccttcttcccgcgcaaccgcagcctggaggaccaccgcttcgagaacacgcccgagatcgccatccgctccctggacacgcgcggcgacctggccaagctcttcaccttcgacctcaacccctccgacgacaacatcctcaagatcaagcagggcgccaaggagcagcacaagctgggcttcgtgagcgccttcctgcacccgtccgacccgccgccgggtgcacagtcctacgcgtacctggcgctcaacagcgaggcgcgcgcgggcgacaaggagagccaggcgcggagcctgctggcgcgcatctgcctgccccacggcgccggcggcgacgccaagaagctcaccgagtcctacatccagttgggcttgcagtgcgcgggcggcgcgggccgcggcgacctctacagccgcctggtgtcggtcttcccagcccgggagcggctctttgctgtcttcgagcggccccaggggtcccccgcggcccgcgctgctccggccgcactctgcgccttccgcttcgccgacgtgcgagccgccatccgagctgcgcgcaccgcctgcttcgtggaaccggcgcccgacgtggtggcggtgctcgacagcgtggtgcagggcacgggaccggcctgcgagcgcaagctcaacatccagctccagccagagcagctggactgtggagctgctcacctgcagcacccgctgtccatcctgcagcccctgaaggccacgcccgtgttccgcgccccgggcctcacctccgtggccgtggccagcgtcaacaactacacagcggtcttcctgggcacggtcaacgggaggcttctcaagatcaacctgaacgagagcatgcaggtggtgagcaggcgggtggtgactgtggcctatggggagcccgtgcaccatgtcatgcagtttgacccagcagactccgtttacctttacctgatgacgtcccaccagatggccagggtgaaggtcgccgcctgcaacgtgcactccacctgtggggactgcgtgggtgcggcggacgcctactgcggctggtgtgccctggagacgcggtgcaccttgcagcaggactgcaccaattccagccagcagcatttctggaccagtgccagcgagggccccagccgctgtcctgccatgaccgtcctgccttccgagatcgatgtgcgccaggagtacccaggcatgatcctgcagatctcgggcagcctgcccagcctcagtggcatggagatggcctgtgactatgggaacaacatccgcactgtggctcgggtcccaggccctgcctttggtcaccagattgcctactgcaacctcctgccgagggaccagtttccgcccttcccccccaaccaggaccacgtgactgttgagatgtctgtgagggtcaatgggcggaacatcgtcaaggccaatttcaccatctacgactgcagccgcactgcacaagtgtacccccacacagcctgtaccagctgcctgtcggcacagtggccctgtttctggtgcagccagcagcactcctgtgtttccaaccagtctcggtgcgaggcctcaccaaaccccacgagccctcaggactgcccccggaccctgctctcacccctggcacccgtgcctacgggtggctcccagaacatcctggtgcctctggccaacactgcctttttccagggtgcagccctggagtgtagttttgggctggaggagatcttcgaggctgtgtgggtgaatgagtctgttgtacgctgtgaccaggtggtgctgcacacgacccggaagagccaggtgttcccgctcagcctccaactaaaggggcggccagcccgattcctggacagccctgagcccatgacagtcatggtctataactgtgccatgggcagccccgactgttcccagtgcctgggccgcgaagacctgggtcacctgtgcatgtggagtgatggctgccgcctgcgggggcctctgcagcccatggctggcacctgccccgcccccgagatccgcgcgattgagcccctgagtggcccgttggacggtgggaccctgctgaccatccgaggaaggaacctgggccggcggctcagtgacgtggcccacggcgtgtggattggtggtgtggcctgtgagccactgcctgacagatacacggtgtcggaggagatcgtgtgtgtcacagggccagccccaggaccactctcaggtgtggtgaccgtgaacgcctctaaggagggcaagtcccgggaccgcttctcctacgtgctgcccctggtccactccctggagcctaccatgggccccaaggccgggggcaccaggatcaccatccatgggaatgacctccatgtaggctccgagctccaggtcctggtgaacgacacagacccctgcacggagctgatgcgcacagataccagcatcgcctgcaccatgcctgagggggccctgccggctccggtgcctgtgtgtgtgcgcttcgagcgtcggggctgcgtgcacggcaacctcaccttctggtacatgcagaacccggtcatcacggccatcagtccccgccgcagccctgtcagtggcggcaggaccatcacagtggctggtgagcgtttccacatggtgcagaatgtgtccatggccgtccaccacattggccgggagcccacgctctgcaaggttctcaactccaccctcatcacctgcccgtcccccggggccctgagcaacgcatcagcgccagtggacttcttcatcaatgggcgggcctacgcagacgaggtggctgtggctgaggagctactggaccccgaggaggcacagcggggcagcaggttccgcctggactacctccccaacccacagttctctacggccaagagggagaagtggatcaagcaccaccccggggagcctctcaccctcgttatccacaaggagcaggacagcctggggctccagagtcacgagtaccgggtcaagataggccaagtaagctgcgacatccagattgtctctgacagaatcatccactgctcggtcaacgagtccctgggcgcggccgtggggcagctgcccatcacaatccaggtagggaacttcaaccagaccatcgccacactgcagctggggggtagcgagacggccatcatcgtgtccatcgtcatctgcagcgtcctgctgctgctctccgtggtggccctgttcgtcttctgtaccaagagccgacgtgctgagcgttactggcagaagacgctgctgcagatggaggagatggaatctcagatccgagaggaaatccgcaaaggcttcgctgagctgcagacagacatgacagatctcaccaaggagctgaaccgcagccagggcatccccttcctggagtataagcacttcgtgacccgcaccttcttccccaagtgttcctccctttatgaagagcgttacgtgctgccctcccagaccctcaactcccagggcagctcccaggcacaggaaacccacccactgctgggagagtggaagattcctgagagctgccggcccaacatggaagagggaattagcttgttctcctcactactcaacaacaagcacttcctcatcgtctttgtccacgcgctggagcagcagaaggactttgcggtgcgcgacaggtgcagcctggcctcgctgctgaccatcgcgctgcacggcaagctggagtactacaccagcatcatgaaggagctgctggtggacctcattgacgcctcggccgccaagaaccccaagctcatgctgcggcgcacagagtctgtggtggagaagatgctcaccaactggatgtccatctgcatgtacagctgtctgcgggagacggtgggggagccattcttcctgctgctgtgtgccatcaagcagcaaatcaacaagggctccatcgacgccatcacaggcaaggcccgctacacactcaatgaggagtggctgctgcgggagaacatcgaggccaagccccggaacctgaacgtgtccttccagggctgtggcatggactcgctgagcgtgcgggccatggacaccgacacgctgacacaggtcaaggagaagatcctggaggccttctgcaagaatgtgccctactcccagtggccgcgtgcagaggacgtcgaccttgagtggttcgcctccagcacacagagctacatccttcgggacctggacgacacctcagtggtggaagacggccgcaagaagcttaacacgctggcccattacaagatccctgaaggtgcctccctggccatgagtctcatagacaagaaggacaacacactgggccgagtgaaagacttggacacagagaagtatttccatttggtgctgcctacggacgagctggcggagcccaagaagtctcaccggcagagccatcgcaagaaggtgctcccggaaatctacctgacccgcctgctctccaccaagggcacgttgcagaagtttctggatgacctgttcaaggccattctgagtatccgtgaagacaagcccccactggctgtcaagtactttttcgacttcctggaggagcaggctgagaagaggggaatctccgaccccgacaccctacacatctggaagaccaacagccttcctctccggttctgggtgaacatcctgaagaacccccagtttgtctttgacatcgacaagacagaccacatcgacgcctgcctttcagtcatcgcgcaggccttcatcgacgcctgctccatctctgacctgcagctgggcaaggattcgccaaccaacaagctcctctacgccaaggagattcctgagtaccggaagatcgtgcagcgctactacaagcagatccaggacatgacgccgctcagcgagcaagagatgaatgcccatctggccgaggagtcgaggaaataccagaatgagttcaacaccaatgtggccatggcagagatttataagtacgccaagaggtatcggccgcagatcatggccgcgctggaggccaaccccacggcccggaggacacaactgcagcacaagtttgagcaggtggtggctttgatggaggacaacatctacgagtgctacagtgaggcctgagacacatggagagttggtcaggctgctgctgggagaaatggacgcccactgggcctcaacttgatcttctaccccgtgcctgtgactcagactgggaaatactgagcagagacggctggggcgggggcaggaggaggggctgctctctgagacaggggcgcccccgccttgacccctgggcacctccatcccctcccacctgtccccagatcagtctctgggatggaggccagagagctggtcaggctcccccatctgcccagcacggcctgcactgtgcccacccacttgctccacaacgtccagttggtcctgctgccaagagccccgtgcatccaggcggccaagcacaaactgggggagaggaggccgccagcccggaggctgcagcccagaaactctacctcatccacactggtgcagggagccctccttgaactgacctttgattggtttctgcttcaactaccaaaatgttatctccacttccccctcacccgtagaggatcctggccacagacagtttcaagtagtgtcagatttttgttgcttgggcggctgttggtagagtgggcagtgcccgcgccatggggtgctctgtgggcttctccaggagcagggagggtggaggggagggatggggggcacaggagctgggagccccgtctccaggaaaaggagaggggttaagatgcaccgaggctgtagctgggctacttgatcttgctgaaagtgtttctaaagatagcaccacttttttttttaaagcttttatatattaaaaaacgtatcatgc

SEQ ID NO: 351 - DNA, 2125 bp, Homo sapiens
  Genbank Accession No. AB016247
gatcccccgggctgcaggaattcccgggtcgacccacgcgtccggtgcggacgggcgcggaccacctccaggggctaagtgatggatcttgtactccgtgttgcagattactatttttttacaccatacgtgtatccagccacatggccagaagatgacatcttccgacaagctattagtcttctgattgtaacaaatgttggtgcttacatcctttatttcttctgtgcaacactgagctattattttgtcttcgatcatgcattaatgaaacatccacaatttttaaagaatcaagtccgtcgagagattaagtttactgtccaggcattgccatggataagtattcttactgttgcactgttcttgctggagataagaggttacagcaaattacatgatgacctaggagagtttccatatggattgtttgaacttgtcgttagtataatatctttcctctttttcactgacatgttcatctactggattcacagaggccttcatcatagactggtatataagcgcctacataaacctcaccatatttggaagattcctactccatttgcaagtcatgcttttcaccctattgatggctttcttcagagtctaccttaccatatatacccttttatctttccattacacaaggtggtttatttaagtctgtacatcttggttaatatctggacaatttccattcatgacggtgattttcgtgtcccccaaatcttacagccatttattaatggctcagctcatcatacagaccaccatatgttctttgactataattatggacaatatttcactttgtgggataggattggcggctcattcaaaaatccttcatcctttgaggggaagggaccgctcagttatgtgaaggagatgacagagggaaagcgcagcagcccttcaggaaatggctgtaagaatgaaaaattattcaatggagagtttacaaagactgaatagattattgcccagttattcttaagtaaggacaaagaaggaaatatcatcgtatttcttttttttaataaggaaaaaataatctccatacagtcaagatacatagtaaatggtatcatttggaaatcagcatcgtgggcactgctgaggaatgatcctagtggtaggtcagaagaagatgctgtgaacaccaggactttaatcttatgcttaaaatgccagatgttgttcgggccccaacttgtatttctagcagcagatctgtagtttgtatagcctcaacaacaattttaaataagatggagaataaattattgaggggactaggctatatgcatttgccttcatccacccatgtttattaagaatcattgtgcttaataataccaagactaagcaccataaccaagaaatactaatgtaaagattgtttcttgtttcaggaatggttaattcttcaacgttggtatgataatgataacttgttttgacttgaataaagtactacatcagtgtggaaaaaaattctgatacattagcagctatgtaaatgacctaattgatagcaggtgtaataagactatcgtcttcctacacataggaggctcattctctggacacactatcacctattacattttactgattaacaaataaattggaatttaaaaatatcgatatcaccatgatttaatccagatctgggattatgtagctaaacattgtgatgattattatttaaaaccattatttaataagagtaaaaatatgtgaatctggatatatttaaaaaaagaaatttgattgcccagataatatattaggcactactgattttttagttaaattgatgcactacacttttgatgtttgaagttacaacctgtaatttttttgtaaaggaaataattgccaaatacctaggcccattgctgacgattagttctaaaatcttattcctcctcttctcccctcacttttccctacttcctctgcaaaaagatttaacaaatacattcataaggaaatgtgtgttgtaacaaatatattgcaaaaacatagtttgtaaaggcattctataagctatttatgtaaaatcaataaaagttgatcataattaaactgtaaaaaaaaaaaaaaaggcggc

SEQ ID NO: 352 - DNA, 4086 bp, Homo sapiens
  Genbank Accession No. AB018289
atttatgctctcagccttgtgttgtcaatttggaagcagttgtttcatctgagttcagaagtagcattcccgtgtacaaaaaaaggtggaagaatgagaaacatcttcacaccagcaggacacaaatagtacatgtgaaatttccaagcattatggtttacagagatgattatttcatcagacattccatctctgtatctgcagtgatagtacgcgcctggattactcacaaatacagtggcagagactggaatgttaaatgggaggaaaacttgctccatgctgtagcaaagaattataccctcctgcagaccatcccgccttttgaacgccctttcaaagatcatcaagtgtgccttgagtggaacatgggttatatttggaaccttcgggcaaacaggattccacagtgtcctctggaaaatgatgtggttgccctgcttggctttccttatgcctccagtggagaaaacacaggcattgtcaagaagttcccgaggtttcggaaccgagagctggaggccactcgacgccagaggatggattacccagtgtttactgtttcattgtggctttatttactccattattgcaaggccaacctctgtgggattctgtactttgttgactctaatgagatgtacggcacaccttctgtatttcttacggaagagggctatttgcatattcagatgcatcttgtcaaaggggaagaccttgctgtaaaaactaaattcatcatacctttgaaggagtggtttcgactggatatctcttttaacggaggccagatagtagtaaccactagcattggacaggatttgaaaagctaccacaatcagaccattagcttccgggaggatttccattataatgacacagctgggtacttcattattggagggagcaggtatgtggctggcattgaagggttttttggacccctgaagtactatcgccttcgcagtctgcaccccgcccagatttttaatcccctccttgagaagcaacttgctgaacaaatcaagttatattatgaaaggtgtgctgaggttcaagaaatagtatctgtgtatgcatctgcagcaaagcacgggggcgagagacaagaagcatgccacctccacaactcctacctggacctccagcgcaggtatgggagaccctcgatgtgcagagccttcccctgggagaaggagctgaaagacaaacaccccagcttgttccaggcattgctggagatggatctgctgaccgtgccaaggaaccaaaatgaatctgtatcagaaatcggtgggaagatatttgagaaggctgtaaagagactctctagcattgatggtcttcaccaaattagctctatcgtcccctttctgacggattccagctgctgtggataccataaagcatcctactaccttgcagtcttttatgagactggattaaatgttcctcgggatcagctgcagggcatgttgtatagtttggttggaggccaggggagtgagaggctgtcttcaatgaatcttgggtataaacactaccagggtattgacaactaccccctggactgggaactgtcgtatgcctactacagcaacattgccaccaagacaccccttgaccagcacacactgcaaggagatcaggcatatgttgaaacaattagactaaaagatgatgaaatactcaaggtacaaaccaaagaagatggagatgtctttatgtggttgaagcatgaagctacccgaggcaatgcagcagctcagcaacgattggcccagatgctgttctgggggcagcaaggtgtggccaagaatcccgaagcagcaattgagtggtacgccaagggcgccctggagacggaggatcctgcgttaatctatgactatgccattgtgctattcaagggtcaaggagtaaaaaagaacagacggcttgccttagagctgatgaagaaagcagcttccaagggattgcatcaggcagtcaatggcctgggatggtattaccacaaattcaagaaaaattacgccaaagcagcaaagtactggttaaaagcagaagaaatggggaacccagatgcgtcatacaatcttggagtcctgcatttggatggcatcttccctggagttcctggaaggaatcaaactttagctggtgaatatttccataaggctgcgcaaggtggacacatggaagggaccttgtggtgttctctctactatatcacaggcaacctggagacattccctagagatcctgagaaagctgttgtatgggcaaaacatgtagctgagaaaaatggctacttgggccatgtcatccgcaaaggcctcaatgcctacctggaaggttcatggcatgaagctttgctgtattatgttttagcagcagaaactggaattgaagtgtcacagacaaatttagcacacatctgtgaggagaggccagacctggccaggagatacttgggtgttaactgtgtttggagatactataatttctctgtttttcaaatcgatgctccttcctttgcatatttgaagatgggagacctttactactatggccaccaaaaccagtcacaagacctggagttgtctgtgcagatgtacgcccaagccgccctggatggagactcccagggattttttaacctggccctgctaatcgaggaaggtacgataatcccacaccatatcttggatttcttggaaattgactcaactctccattctaataacatctccattctccaggaactgtacgaaaggtgctggagccacagtaacgaggagtccttcagcccctgctccttggcctggctttacctgcacttgcggcttctctggggtgctatcctgcactcagccctgatctactttctgggaacctttctgctatccatattgatcgcctggactgtgcagtatttccagtctgtctcagcaagcgatccccctccaagaccatcccaggcctccccagacactgccacgtccactgcaagtccagctgtgactccagctgcagatgcctctgaccaagaccagcccacagtaactaataacccggagccacgtgggtgaactgtgcactccagttctctccagatgagagagaatcttttcaacagctggtattgggaagctggggccagggcatgatcctgataaacaccttaaatgtcttgtcaactggatgcaaattttgcaattggtgtcattttttttaaagtcaaattacaaggaagtacccagatcaggcagtggtaataccaaaggtcatcaaacacatacaaggaacatcttgatcatagggcatgtggggaagtttactgggccatcacagacttttgttctagtgattgtatgtattaggagtcatagcatgccctacggcagatctggattcttatacactaagatgtgtcttaagaatcacagtgcgtgcttcatccctttattgaagaacagaaaattatgactactctacaaggtggataatattttggtacctgtgcttgccacagccctgttcctcaaagctgaattgatagatttctctttgacttccaagacctagcagttataaggcaccttgaaataaattgtttgtgcctggaaatgcagggagggcaatagctttgtaaattggtttacatttttctccttgaatttttctagggtcctagtgcttccgaatcatttaatggcattgtcggatatcttttacatttcaattgcaatccatgaaattacatttagaagattcttagtacttaactgtagtcttctccatgaattacacgttagaatagactggcagcaacggaatatgcagcaagtaagcctctagcttatagtttcatccctacccctcatgcctgcgtgagtctgtacagggatatgtgtgtgtgtgtgtgtgtgtgtgtgtgtgtgtgttagagaggaagaggaagagcagaatgtctgtatactacatgctgctaaggtagtgaataaatcagtaatgcaatattgtgggtccaaactactctttgcactactttatttacagtagtaaataaaattatttttatac

SEQ ID NO: 353 - DNA, 4074 bp, Homo sapiens
  Genbank Accession No. AB018335
cacgccccgcgctgctgggtcccgccagacacgccgccgccgcaggaaagtctacagtttggtaccccaggactcgctggtcaggaaagccctgcaggacatgagtgttaggcccgacgcctggcccttggcagcttgggaggtggctggggctgcttttgcctttgccagagacagctccaactgaggacctctccaacgggcccatccacagtccttccttcccctagtgtctgggaagacaggcgcgatgatggactccccgttcctggagctgtggcagtccaaggcagtgtccatcagggagcagctgggactcggggaccggcccaacgactcctattgctacaactcggccaaaaacagcaccgtgctccagggggtcacctttggtggcatccccactgtcctgctcatagacgtcagctgcttcctgttcttaatcttggtgttttctattataagaagaagattctgggactatggccgcattgccctggtgtcagaagcagacagcgagtccagatttcagagattgtcatcgacttcctcctcaggtcaacaagactttgaaaatgagctgggatgctgtccctggctgactgccatcttccgtctgcatgatgaccagatcctggaatggtgtggggaggacgccatccactacctgtccttccagaggcacatcatcttcctgttggtggtggtcagctttttgtccctgtgtgtcatcctgcctgtcaacctctcaggggatttgctggacaaagacccgtatagttttgggaggacaacaatagcaaacctacagactgacaatgacctcctttggctgcacaccatctttgctgtcatttacctcttcttcactgtgggtttcatgcggcaccacactcagtccattaagtacaaagaggagaacctggtgaggcggaccctgttcatcacaggactccccagagatgccaggaaggagactgtggagagccacttccgggacgcgtatcccacgtgtgaggtggttgatgtgcagctgtgctacaacgtggccaaactgatctacctgtgcaaggagaaaaagaagactgagaagagcctgacctattacacaaacctgcaggtgaagacaggccagcggaccctcatcaaccccaagccctgtggccagttttgctgctgtgaagtgctgggctgtgagtgggaagacgccatctcttactacacacggatgaaggacaggctgctggagaggatcacagaggaagaacgccacgtccaggaccagcccctgggaatggccttcgtcaccttccaggagaagtccatggccacctacatcctgaaagatttcaatgcctgcaagtgtcagagccttcagtgcaaaggtgagccccagccgtcctcccatagcagggagctctatacctccaagtggacagtcacctttgctgctgaccctgaggacatctgctggaagaacctctctatccagggcctccgctggtggctacagtggctgggcatcaacttcaccctcttcctggggctatttttcctgaccacaccctccatcatcctgtccaccatggacaagtttaatgtcaccaaacccatccatgcgctgaataacccgatcatcagccagttcttccccaccctcctgctctggtccttctcggccctgctcccctccattgtctactactctacactgctggagtctcactggaccaagtcgggggaaaaccagatcatgatgaccaaagtctacatattcttgatcttcatggtgctgatcctgccctccctgggtctcaccagtctagattttttcttccggtggctctttgacaaaacttcctcggaggcctccatcaggttggagtgcgtcttcctgcctgaccagggtgccttctttgtgaactatgtcatcgcctcggccttcatcggcaatggcatggagctgctgcggctgccaggtctcatcctctataccttccgcatgatcatggccaagacggctgctgaccgcaggaatgtcaagcagaaccaggccttccagtacgagtttggagccatgtatgcatggatgctgtgtgtcttcactgtcatcgtggcctacagcatcacttgtcccatcatcgcgccatttggcctcatctacatcctgctcaagcacatggtggaccggcacaacctctacttcgtctacctcccagccaagctggagaaggggatccactttgccgctgtgaaccaggccttggcagcccccatcctgtgcctcttctggctctacttcttttccttcctgcgcctgggtatgaaggcccccgccactctgttcaccttcctggtgctgctgctcaccatcctggtctgcctggctcacacctgctttggatgcttcaagcacctcagccctctgaactacaaaacagaagagcctgcaagtgacaaaggaagtgaggcagaggcccacatgcccccaccgttcacaccctacgtgcctcggattctgaacggcttggcctcggagaggacagcactgtctccgcagcagcagcagcagcagacctatggtgccatccacaacatcagcgggactatccctggacagtgcttggcgcagagcgccacgggcagtgtggctgctgccccccaggaggcctgaggctgggtctcactgctctgaaaagacacaaccagaatggcctggggctcaggcccttggctgagtgggaatgcgttgggactgcccagctgagctatcaggtgcccatcttttctggtcccagcagtggtgaggagagcacaggcaggcctcgcccctcccttgctcacccagtttcccctccggcacaagcttccagctctgcagctggggtgacatccccagtggtttgtcgccaagaccatgtggtggacttttcgccccccaaactgatgagtccgggagaatatatggagagagagatgtaacaaggggaaggcctcctcccttctgagcacacacacaaccgataaccaaagagatgctgcagtccaggtctgaggtcccgctggcatccagctccctgctccatggccagtccctccccagcccagcagtccctccaggctacatccaggagtaagctatggggaacaggttgggaggtggccagtgctcctgccagctgtgcacacatctctgtatcccgctagagttctgtgtttttgtatcatgttgtcagggacgctagctgggtcagggttaccccatagcaggcagggacaaggaccactcataatatgcccattggaccacagttaagatccagcctctctcacctcttcagggctgagtgcatgagtctgcacctccaggcaggctctgtgcagtactcaccccctccgtctgctccctccaaggtgtgggggtgggcagtgctcagggcctcctcggagccaaaggacagcatggtcggcacagaggaaggggtacctgggctgggtgcagggccatcccactgcccttgagctgtggctctggcaggaaggaggggcagcccatccctcttctccctcctggggattctggggaatgggatgcaacttaagacttctgcctgagaagcctcctccctgctgcctccagggggcaccaaggcacaagcctgtgcagtaggggcgggatgggggtgtggaagagcaggtccaggctcctagcacaactggcctggggccttggcacctctgtaggccctgcctgtgcctgtccgctggcctggggggcctgggcttatctgggccttctcactcagggactctcttgacgctgacttgcccccgcagcggtggccagtgctgcctctgctccaagctgcccctgcgctgggaggggtgggggcggtgccattggtctggtgcagcatagccctggccagtggcctcatccccagcaggcctcccgtgcctctgccagcaaggaggggccggccagctctgcttgcacagggggccccatgtggggtcagcgcacgctcatgtcactgagttccagccgcttttagagtaaagtcgtttatcatc

SEQ ID NO: 354 - DNA, 5613 bp, Homo sapiens
  Genbank Accession No. AB018342
attgattctgtgtgtgcctctgacagccctgatagacccaactcgtttgtgatcatcacggccaaccgggtgctgcactgcaacgccgacacgccggaggagatgcaccactggataaccctgctgcagaggtccaaaggggacaccagagtggagggccaggaattcatcgtgagaggatggttgcacaaagaggtgaagaacagtccaaagatgtcttcactgaaactgaagaaacggtggtttgtactcacccacaattccctggattactacaagagttcagagaagaacgcgctcaaactggggaccctggtcctcaacagcctctgctctgtcgtccccccagatgagaagatattcaaagagacaggctactggaacgtcaccgtgtacgggcgcaagcactgttaccggctctacaccaagctgctcaacgaggccacccggtggtccagtgccattcaaaacgtgactgacaccaaggccccgatcgacacccccacccagcagctgattcaagatatcaaggagaactgcctgaactcggatgtggtggaacagatttacaagcggaacccgatccttcgatacacccatcaccccttgcactccccgctcctgccccttccgtatggggacataaatctcaacttgctcaaagacaaaggctataccacccttcaggatgaggccatcaagatattcaattccctgcagcaactggagtccatgtctgacccaattccaataatccagggcatcctacagacagggcatgacctgcgacctctgcgggacgagctgtactgccagcttatcaaacagaccaacaaagtgccccaccccggcagtgtgggcaacctgtacagctggcagatcctgacatgcctgagctgcaccttcctgccgagtcgagggattctcaagtatctcaagttccatctgaaaaggatacgggaacagtttccaggaaccgagatggaaaaatacgctctcttcacttacgaatctcttaagaaaaccaaatgccgagagtttgtgccttcccgagatgaaatagaagctctgatccacaggcaggaaatgacatccacggtctattgccatggcggcggctcctgcaagatcaccatcaactcccacaccaccgctggggaggtggtggagaagctgatccgaggcctggccatggaggacagcaggaacatgtttgctttgtttgaatacaacggccacgtcgacaaagccattgaaagtcgaaccgtcgtagctgatgtcttagccaagtttgaaaagctggctgccacatccgaggttggggacctgccatggaaattctacttcaaactttactgcttcctggacacagacaacgtgccaaaagacagtgtggagtttgcatttatgtttgaacaggcccacgaagcggttatccatggccaccatccagccccggaagaaaacctccaggttcttgctgccctgcgactccagtatctgcagggggattatactctgcacgctgccatcccacctctcgaagaggtttattccctgcagagactcaaggcccgcatcagccagtcaaccaaaaccttcaccccttgtgaacggctggagaagaggcggacgagcttcctagaggggaccctgaggcggagcttccggacaggatccgtggtccggcagaaggtcgaggaggagcagatgctggacatgtggattaaggaagaagtctcctctgctcgagccagtatcattgacaagtggaggaaatttcagggaatgaaccaggaacaggccatggccaagtacatggccttgatcaaggagtggcctggctatggctcgacgctgtttgatgtggaggtgagaactggctgccatgtgttggggtgggctgggtgctggcatctgagaacatggatcacggccaagttcatgtggagagaagacaagatggagcattttgctctctcaacctctttttttcgagcccccaaaattgtaccattaacgcctcccttctcctcacagtttctcttctcctgtgtagtaaatgcatctgtaatattaggaatgaatgcaaaattaagatgtcatctattcttctacccttccttagggaagctatagatctaattttttaaacactgataaaaatctacatttaaaaaaatgttatagctgtatatacaaattagaaactttggatatacttgcattttactttgttttttctttacagccatctgtttgaaaggaagaatgtctatctcgtaatggaatttagccattggcatcaacccagtactgatttttgttttgttttaagtagaccgcttattgaaaagaaatcttactaattgtctagatgagagtttggcaaactggtctgtgggtcagatcttgcctgcctcctttttttctaaacaaagttttattggaacacagccaagctcattcctttagatatattccctggctgtttttgtacagagttgagtagttgtgacagagaccatgtgatccacaaagtctaaaaatctttactatgcagcccttaacagataagtgtgccagctcatcgtctagattagcttccattttttatgatcacagtaattcagcgtatatctgatgactttatattgaggctgtataaaattctaaatattataaattctagaatccgtgggtggcttttcattaggtgatgtttttgattggtttggttggttcaattatgcctgtttttaagtataaaaaaatcaggtgctttgtacaaagccataattccatttctccctgacaaggaatagataatagcagttaaactcttggcttcctgcaaaacgtgagctgtgaattagcatagaaagctactggcttggccgggcgcggtggctcatgcctgtaatcccagcgctttgggaggccaaggcgggcggatcatgaggtcaggagatcgagaccatcctggctaacacggtgaaaccccatctctgcaaaaaattagctgggcgtggtggcatgcacctgtaatcccagctactcgagaggctgagacaggagaatcgcttgaactcaggaggtggaggttgcagtgagccaggatcacgccactgcactccagcctgggcgacagagtgagactccgtcaaaaaaaaaaagaaaaaaagaaagctactggcttttgcatggaggatgcagagaatgtctggttattagggatataaactagagactcttttcagcgtctccaatttatagccctcctgcttgtccaggtttggatcagccctgtgttgttagccccttcatatggggtcttattttcttccaccaatctgtacaggaaagtctacagttaaactggtaaagtccctgttcccactctgcatatggaaggccattgctgctccttgtgaagaggagccagaactgctcagcatgcgtgatttggagaattttcctctgtgatcctagattttgtatttgaagactaaccatccgcaaagaggattggaggcagaactggagatattaatacaagagtagacttggcttgggttgcagggaagctttcttaagtcccccggccaagcatgtacgtttccaggccacttccacgtagctaatccaaacagctagtagaataatgctgagaagtggagagtcaaagcaagatgttagactctgccagttagtgaggttttcccaaaagcgtgagattaactagttagaaatcaagatagccagagaggtgccatttttcatatttcaggcccctccatgcatgcatgcacatcgaatatatttaatcttctgcacagaggacttcactcaaagcctgtcttatggtttagatgctttctgttgccaaccacttcatgacttaactcttctgttgactcttgcccaccagtgcaaggaaggtggcttccctcaggaactctggttgggtgtcagcgcggacgccgtctccgtctacaagcgtggagagggaagaccactggaagtcttccagtatgaacacatcctctcttttggggcacccctggcgaatacgtataagatcgtggtcgatgagagggagctgctctttgaaaccagtgaggtggtggatgtggccaagctcatgaaagcctacatcagcatgatcgtgaagaagcgctacagcacgacacgctccgccagcagccagggcagctccaggtgaaggcgggacagagcccacctgtctttgctacctgaacgcaccaccctctggcctaggctggctccagtgtgccatgcccagccaaaacaaacacagagctgcccaggctttctggaagcttctggtctgagggaggtgtctccgaggatccttttgcctgccgccttcattgatcctgtattaagctgtcaactttaacagtctgcacagtttccaaagctttactactcttagaggacacatgccttaaaaaaggaggggaggaaccacgctgccaccaaagcagccggaagtgccttaacttgtggaaccaacactaatcgaccgtaactgtgctactgaagggaactgcctttcccccttctgggggagacttaacagagcgtggaaggggggcattctctgtcaatgatgcactaacctcccaacctgatttccccgaatctgagggaaggtgagggagtgggaagggggatggagagctcgaggggacagtgtgtttgagctggagtgctgcgggcagcctttctcatggaatgacatgaatcaacttttttctttgtttcatcttttaagtgtacgtgcttgcctgttcgtgcatgtgttcataaactcaacaccttaatcatggtttcatgagcattaaaaagcaaagggaaaaaggatgtgtaatggtgtacacagtctgtatattttaataatgcagagctatagtctcaattgttactttataaggtggttttattaacaaacccaaatcctggattttcctgtctttgctgtattttgaaaaacacgtgttgactccattgttttacatgtagcaaagtctgccatctgtgtctgctgtattataaacagataagcagcctacaagataactgtatttataaaccactcttcaacagctggctccagtgctggttttagaacaagaatgaagtcattttggagtctttcatgtctaaaagatttaagttaaaaacaaagtgttacttggaaggttagcttctatcattctggatagattacagatataataaccatgttgactatgggggagagacgctgcattccagaaacgtcttaacacttgagtgaatcttcaaaggaccctgacattaaatgctgaggctttaatacacacatattttatcccaagtttataatggtggtctgaacaaggcacctgtaaataaatcagcatttatgaccagaagaaaaataatctggtcttggactttttatttttatatggaaaagttttaaggacttgggccaactaagtctacccacacgaaaaaagaaatttgccttgtccctttgtgtacaaccatgcaaaactgtttgttggctcacagaagttctgacaataaaagatactagct

SEQ ID NO: 355 - DNA, 3800 bp, Homo sapiens
  Genbank Accession No. AB020697
gtttcacatctgtaacaacaggaggaggcccagcctcgtgatgaggaatagcaaggagagaattcagctccagttcaaaagcctacaaaatctgagactgtcattgcttttataaggattccagctttccctcctggccagaaatgttcagcctggactcattcagaaaagatcgggcccagcacaggcagcgtcagtgcaaacttcccccaccccgccttccacccatgtgtgtcaaccctaccccaggagggaccatctctcgagcttctagggacctattaaaagagttcccacagcccaaaaatcttctcaacagtgtgattggaagagccctcggcatctcacatgcaaaagacaaactagtctacgtgcacacaaatggaccgaagaaaaagaaagtcacactgcacataaaatggcccaagagcgtggaggtagaaggctatggcagcaagaagatcgatgctgagcggcaggctgcagctgcagcctgccagctgttcaagggttggggtctgctaggtccccggaatgagttgtttgacgcagccaaataccgagtgctagctgatcgctttggctcccctgccgacagctggtggcgtccggaacccaccatgccccctacttcctggcggcagctgaatccagagagtattcgaccagggggacctgggggcctatcccgctctttaggccgggaagaagaggaggacgaggaggaagagctagaagaagggaccatagatgttaccgacttcttgtccatgacccagcaggattcccacgctccactcagggactcaagggggagttcctttgagatgacagatgacgacagtgccattagggctctgacccagtttccacttcccaagaaccttctggccaaggtgattcagattgcaacgtcatcctccacagctaagaacctcatgcagttccatactgtgggcaccaagaccaagctgtctacactcaccctgctctggccctgccccatgacctttgttgccaaagggcgccgcaaagcagaggctgagaataaggcggcagccttggcctgcaagaaactgaagagcctgggcctggtggacaggaacaacgaaccgcttacacacgccatgtataacctggcctctttgcgtgagctgggtgagacccagcgccgaccatgcaccatccaggtgcccgagcccatcctccgcaagatagagaccttcctgaaccattaccctgtggagagttcatggatcgccccagaactccggctgcagagtgatgacatcttgcccttgggcaaggactcagggcctctgagtgaccctatcacaggcaagccctatgtgcccctgttggaagcagaggaggtacgtctcagccagagtctgctagaactgtggcggcggcgagggccggtctggcaggaggccccccagctacctgtggacccacatcgggacaccatcctcaacgccattgagcagcacccggtggtggtcatctctggggacacgggctgtgggaagaccacgcgcatcccccagctgttgctggagcgctatgtgaccgagggccgaggtgcccgctgcaatgttatcatcacccaacctcgccgcatctctgctgtgtctgtggcacagcgggtcagccacgaactgggcccctccctgcgccggaatgtgggcttccaggtgcggttggaaagtaagcccccatcccgaggcggggccctgctcttctgcactgtgggtatcctgctgcgtaagctgcagagcaaccccagcctggagggcgtgagccacgtcatcgtggatgaggtgcatgagcgggacgtgaacacagactttctgctgatcctgctcaagggcctgcagcggctcaacccggccctgcggctggtgctcatgagtgccacaggggacaatgagcgcttctcccgatactttggtggctgccccgtcatcaaggtgcctggcttcatgtacccagtcaaggagcactacctagaggacatcctggccaagttgggcaagcaccagtacctgcaccggcaccggcaccatgagtctgaggatgaatgcgcactcgatttggaccttgtgactgatctggttctgcacatcgatgctcgcggggaaccaggtgggatcctgtgcttcctgcctgggtggcaggagatcaaaggagtgcagcagcgcctccaggaggccctgggcatgcacgagagcaagtacctcatcctgccagtgcactccaacatccccatgatggatcagaaggccatattccagcagcctccagttggggtgcgcaagattgtcttggccaccaacattgctgagacttccatcacaatcaatgacatcgtgcatgtggtggacagtgggctgcacaaggaagaacgctatgacctgaagaccaaggtgtcctgcctggagacagtgtgggtatcaagagccaatgtgatccagcgccggggccgggcgggccgctgccagtccggctttgcctaccacttgttccctcgaagccggctggagaaaatggtccctttccaagtgccagagatcctgcgcacacctcttgagaacctggtgctgcaagcgaaaatccacatgcctgagaagacggcggtggagttcctgtccaaggctgtggacagtccaaacatcaaggcagtggacgaggctgtgatcttgctccaggagatcggggtgctggaccagcgggagtacctgactaccctggggcagcgcctggctcacatctccaccgacccccggttggccaaggccattgtgttggctgccatcttccgttgcctgcacccactactggtggtcgtttcctgcctcacccgggaccccttcagcagcagcctacagaaccgggcagaggtggacaaggtgaaagcactgttgagccatgacagcggcagtgaccacctggcctttgtgcgggctgtcgccggctgggaggaggtgctgcgttggcaggaccgcagctcccgggagaattacctggaggaaaacctgctgtacgcacccagcctgcgcttcatccacggactcatcaagcagttctcagagaacatttatgaggccttcctggtggggaagccctcggactgcaccctggcctccgcccagtgcaacgagtacagtgaggaggaggagctggtgaagggcgtgctgatggccggcctctaccccaacctcatccaggtgaggcagggcaaggtcacccggcaggggaagttcaagcccaacagcgtcacatataggaccaaatcaggcaacatcctgctgcacaagtcgaccattaacagggaggccacacggttacggagccgatggctgacgtatttcatggcagtcaagtccaatggcagcgtcttcgtccgggactcctctcaggtgcacccgctagctgtgctgctgctgaccgacggggacgtgcacatccgtgatgacgggcgccgggccaccatctcactgagcgacagtgacctgctgcggctggagggtgactcgcgtaccgtgcggctgctgaaggagctgcggcgggccctgggccgcatggtggagcggagcctgcgcagcgagctggctgcacttccccccagcgtacaggaggagcacgggcagctgcttgcgctactggcagagctgctgcgaggaccctgtggcagctttgatgtgcgcaagacagctgacgactgagccctgcttctgctggggctgtgtacagagtgcaaatgtttatttaaaataaagttctatttatcccttgtg

SEQ ID NO: 356 - DNA, 4217 bp, Homo sapiens
  Genbank Accession No. AB020713
cttcccggccccagccaaggctgtcgtttacgtgtcggacattcaggagctgtacatccgtgtggttgacaaggtggagattgggaagacagtgaaggcatacgtccgcgtgctggacttgcacaagaagcccttccttgccaaatacttcccctttatggacctgaagctccgagcagcctccccgatcattacattggtggcccttgatgaagcccttgacaactacaccatcacattcctcatccgcggtgtggccatcggccagaccagtctaactgcaagtgtgaccaataaagctggacagagaatcaactcagccccacaacagattgaagtctttcccccgttcaggctgatgcccaggaaggtgacactgcttatcggggccacgatgcaggtcacctccgagggcggcccccagcctcagtccaacatccttttctccatcagcaatgagagcgttgcgctggtgagcgctgctgggctggtacagggcctcgccatcgggaacggcactgtgtctgggctcgtgcaggcagtggatgcagagaccggcaaggtggtcatcatctctcaggacctcgtgcaggtggaggtgctgctgctaagggccgtgaggatccgcgcccccatcatgcggatgaggacgggcacccagatgcccatctatgtcaccggcatcaccaaccaccagaaccctttctcctttggcaatgccgtgccaggcctgaccttccactggtctgtcaccaagcgggacgtcctggacctccgagggcggcaccacgaggcgtcgatccgactcccgtcacagtacaactttgccatgaacgtgctcggccgggtaaaaggccggaccgggctgagggtggtggtcaaggctgtggaccccacatcggggcagctgtatggcctggccagagaactctcggatgagatccaagtccaggtgtttgagaagctgcagctgctcaaccctgaaatagaagcagaacaaatattaatgtcgcccaactcatatataaagctgcagacaaacagggatggtgcagcctctctgagctaccgcgtcctggatggacccgaaaaggttccagttgtgcatgttgatgagaaaggctttctagcatcagggtctatgatcgggacatccaccatcgaagtgattgcacaagagccctttggggccaaccaaaccatcattgttgctgtaaaggtatcccctgtttcctacctgagggtttccatgagccctgtcctgcacacccagaacaaggaggccctggtggccgtgcctttgggaatgaccgtgaccttcactgtccacttccacgacaactctggagatgtcttccatgctcacagttcggtcctcaactttgccactaacagagacgactttgtgcagatcgggaagggccccaccaacaacacctgcgttgtccgcacagtcagcgtgggcctgacactgctccgtgtgtgggacgcagagcacccgggcctctcggacttcatgcccctgcctgtcctacaggccatctccccagagctgtctggggccatggtggtgggggacgtgctctgtctggccactgttctgaccagcctggaaggcctctcaggaacctggagctcctcagccaacagcatcctccacatcgaccccaagacgggtgtggctgtggcccgggccgtgggatccgtgacggtttactatgaggtcgctgggcacctgaggacctacaaggaggtggtggtcagcgtccctcagaggatcatggcccgtcacctccaccccatccagacaagcttccaggaggctacagcctccaaagtgattgttgccgtgggagacagaagctctaacctgagaggcgagtgcacccccacccagagggaagtcatccaggccttgcacccagagaccctcatcagctgccagtcccagttcaagccggccgtctttgatttcccatctcaagatgtgttcaccgtggagccacagtttgacactgctctcggccagtacttctgctcaatcacaatgcacaggctgacggacaagcagcggaagcacctgagcatgaagaagacagctctggtggtcagtgcctccctctccagcagccacttctccacagagcaggtgggggccgaggtgcccttcagcccaggtctcttcgccgaccaggctgaaatccttttgagcaaccactacaccagttccgagatcagggtctttggtgccccggaggttctggagaacttggaggtgaaatccgggtccccggccgtgctggcattcgcaaaggagaagtcttttgggtggcccagcttcatcacatacacggtcggcgtctcggaccccgcggctggcagccaagggcctctgtccactaccctgaccttctccagccccgtgaccaaccaagccattgccatcccagtgacagtggcttttgtgatggatcgccgtgggcccggtccttatggagccagcctcttccagcacttcctggattcctaccaggtcatgttcttcacgctcttcgccctgttggctgggacagcggtcatgatcatagcctaccacactgtctgcacgccccgggatcttgctgtgcctgcagccctcacgcctcgagccagccctggacacagcccccactatttcgctgcctcatcacccacatctcccaatgcattgcctcctgctcgcaaagccagccctccctcagggctgtggagcccagcctatgcctcccactaggccgcgtgaaggttcccggaggatgggtctcagccgagcctcgtgcacccccaagatggaacatccctgctgcattcacactggaacaagcccctccagatgagtgccccggccccaggccagcttcactgccgtctcttcacacagagctgtagtttcggctctgcccattagctcattttatgtaggagttttaaatgtgtgtttttttcctttcaagtcttacaaagctaagactttttggctcattcctttttgcatggttgtctagggtttctggacaatgtgctgttgcatttttattttcctagccttgctaaaatctttcccttctcaagactttgagcagttagaagtgctctttagaagttgtctgtgggtgatgttactgtagtggtctcagggaaaggattgtccagttactttagggggtttttggtggggtttttccccctgtgaaaacttactttgcccctagtctggctgctgctaggacttctgaggagcaatgggacatgagtgtccctgtatctgcgccactgccgcaagggaagcctcaggaaccagcacctggaggccaggatagccaagccctgggtgagcgagaggctggagaacacaggagctcacccagggctgctgcccaaccatgggccactgtgaacagacttcagtcctctgtttttgtttcataagccgttgagacatctgatggacttggcttaggccctgctgggacatcccacgtgtgatccctttcactccatcaggacaccaggactgtccttaggaaaatgtccttgagatggcagcaggagtcatattttctgtgtgtgtgtttcggaaagccgctgtgtcctgcctcagcacaaagacccagtgtcatttgctcctcctgttcctgtgccactccagaacctcagcagatctgagccaccgcctgccagtgtgagaggcggccactttcatggcagcttatcaggcgcagggccccagacagcttcccagccggccctagagcccggcctgggccaatgatggagggcggccaccagcccagggcctgcccatccagaagggactccccagggcctgggggaggagacccttggaaaagtcctctcttcccagctcctgattctggatctgagattctcagatcacaggcccctgtgctccaggccgaggctgggccaccctcagggagatccagagactcatgcccatggccatccatgcgtggacgctgtgtggagagtccaggatgacgggatcccgcacaagctcccttcagtccttcagggctgggccatgtggttgatttttctaaagctggagaaaggaagaattgtgccttgcatattacttgagcttaaactgacaacctggatgtaaataggagcctttctactggtttatttaataaagttctatgtgatttttt

SEQ ID NO: 357 - DNA, 5715 bp, Homo sapiens
  Genbank Accession No. AB023157
cataatcaacctgaaagaagaaaataaatactgtatacttttaaattttatcgattcttaaaaactggacactcaaagctgcgcaaaccatgcaggatgatttactgatggacaaaagcaaaacccagccccagccccagcagcagcagcggcagcagcagcagccccaacctgagtccagcgtatccgaagccccgtccacgcccctctcctcagagacccccaagccggaggaaaacagcgcagtgccggccctcagcccagccgctgcccccccggcccccaacggcccggacaagatgcagatggaatcaccgctcctgccaggcttgagtttccatcagcctcctcagcagccgccgccgcctcaggagcccgcggcaccgggcgcgtcgctgtcgccgtccttcggcagcacctggtccacgggcaccaccaacgcggtagaggacagcttcttccaggggatcaccccagtcaacgggaccatgctcttccagaacttcccgcaccatgtcaacccagtcttcggaggcactttctccccgcagatcggcctggcgcagacccagcaccaccagcagccgccgccgcctgcgcccgcgccgcagccggcacagccagcgcagccaccacaggcgcagcccccgcagcagcgccgctcacccgccagccccagccaggcgccctacgcgcagaggagcgccgccgcggcgtacggccaccagcccatcatgaccagcaagccgtcctcgtcttcggcggttgcagccgctgctgccgcagccgccgcctcgtcggcctcgtccagctggaacacgcaccaaagcgtgaatgcagcctggagcgcaccgtccaacccctggggcggcctgcaggcgggccgggaccctcgccgggcggtcggtgtgggcgtgggtgtgggtgtcggggtgccttccccgctcaaccccatctcgccgctcaaaaagcccttctccagcaacgtgatcgcgccgcccaagttccctcgcgcggcccctctcacttccaagtcctggatggaggataacgctttccggaccgataatggtaacaatctgttgccatttcaggaccggagtaggccctatgatacttttaacttgcactcgttggagaactccttaatggatatgataaggactgatcatgaacctctgaaaggacgcatggggataaatttccatcatccaggaacagataatattatggcacttaacagtcgatcttctctctttccctttgaagatgccttcctggatgatagccatggtgatcaagccttgtcatctggcttaagttctcccactcgctgtcaaaatggggaacgagtagaacgctactctagaaaggtgtttgttggaggacttcctcctgatattgatgaagatgagatcactgccagctttcgcaggtttggacctctcgtagtagactggcctcacaaagctgaaagcaagtcttattttcctcctaaaggctatgcctttctgctgttccaagaggaaagctcagtacaagctttgatagatgcctgcctagaagaagatgggaaactctacctgtgtgtgtcaagccccaccatcaaggacaagccagtgcaaattcgaccatggaacctaagtgacagtgactttgtaatggatggttctcagcctttggaccccagaaaaactatctttgttgggggagttccacgaccccttcgagctgttgaactggcaatgatcatggaccgtttgtacggtggtgtctgctatgctggcattgatacggacccagagctgaagtaccccaaaggtgctggccgcgtggcattctccaatcagcagagttacattgcagccatcagcgctcgttttgtgcagcttcagcacaatgacattgacaaacgggttgaagtaaagccatatgtgctggatgatcagatgtgtgatgagtgccagggcacacgctgtggtgggaagtttgccccgttcttctgtgccaacgtcacctgtctgcagtattactgtgaatactgctgggcgagcatacattcccgagccgggcgggagttccacaaaccgctggtgaaggagggaggcgaccgccctcgtcacgtcccgttccgctggagctgagccacgggccgacccagccacaagtactggagtagataacaaggagggaaaagagagggcactgcctcagggcttacagtgttctggaaatctgtgcattcgttctcgatttttaaagaagaattgggtctttttattattattattattatttacagtcatattactgaactcagtgtccagtataatgcagaattgcagagtgtagaatggtactgatttgcactttgattcacacctttgtctgcttggtaccttaattttttatacctgatttgtcactcgtgacagtatgtagactgccattctcatcagcggccgtcaggctactgtctgtgattcttttgtttgttgttgtggtgttgttctgattgttttgaactggagcatgcacttattttcagaaacttagagagttgcccctaggacaagacttaccaaaggtaatactcgtgagtaggtggcagatgtagcaaaaacttcacaacaattcagcaatcattagctcgggtcacttagagtaaggataacccttcatgaaaataagcctttagttgctctctattttgacttgtaaggatacctcataagctggatcttttatttttccttcatgtttgatttttgttttgccgaggattttggttagatcttttagtattatgtaaatttatgctgcaatagcttttgctgctattaaaatggtattattaataccataatactctattcaggctaggatatcaattaaacacaaaaacccaacaacacacttttgtgattttagggatagagtcagctgccgaacggagatcagaatagacttcagaaagcttcggtggaaggtcactatttctgactgcatgtttacttaatcaggttgctgcatgcaataaattttatatccaatgtctagtataaaacgttcccacaatgcacaaattaagaatctatataagctataaaaatactcattttttaaaaaaagtttttttcattcaaagaattggtaattgaccggaggaaggcatgcctcaataaatggaatgctctgaatgggaagagcccataacagaatgacctatattacaaccgacataaaacctaggtgtaggatattcttcaagcaaatttgtggatggtagatgaagtactttgcggtgctctgttatatattgtgaaatttattttatatagtaaagtgattatgtctaactgtgatcaaacttaactgtttaaagcctctgtcagacattaatgaacttgacagttcataactgatatattataaactaacacatgagctcttagttacaatctcttagtgcttgcaccattttacatagcttcagaccttgtccagaaaaccaaagagctcatcttagcttacaaacactaagaatatatacaggatatagagataagttgtcagattgacaaactaggcacatttttaagaaagttgtgtaatggtgatgctaaagaaatgtctgtacaaaataagatggcctgggcagagttggttgtctgagtgagaaactaactacttaattccctggatttatcctgttaagcttgagtagaatgaaggcctgctagcactagcgtggtctagaatgaaggcctgctagcactagcgtggacatttttctagcattcacccttgggctgcagatagtaatatataaacacacacaatgattgcaagactatgtaaatctttttttaatcttcttcctatgttttggaattctggggacaatctgactggatatgacactgcagaatagatttaagtcgctgtgttttctgtgctgtgatgtccttgtactgtcttaagttagtgttgcttgtttttgttttgttctcccatgtttagttgcaattactggctctcaagctatagtttgttttcaaaaaggaaaaacaaaatagttttttactggattaaaaatgcttattttagaatcctcccctttttgaggctttttggtaataattgcttttttccagcccaggtgtggttttgtttgtttttttctatgtttgtgggttttttttcatctgtacaagaaattttgttatgcactactactttttgtattctagacagttttcaaaagttggcagattttttttttttgtttttaaggaaaaaggcatgctttctgactgacatgatcttttgcaatacctcaattttgaaatataggaaagaaaatgatattttctaagtaagtttattcagaaaaatatatattaatttaattctgcaagaaaatgatttaacagatgggtaactttatttttttcatgcttatttgtgttttttgaaaatgaagaagttagagctttataactataatattaaagatcatatctaacctacagaaatctacctaattatgtgaaagaagcaaaactttttgaagaagcacccctctttcatgtattaaaataacactgagatttttttaaaagctggaagattgtacagcataaagctaaagtgaaggcaaaaaacattgtcctgaagaataggttacaaaaaataaactccatttggtgctgaaagttgtgaatagatggtggaaactactttcccttaatttgtatatttctaatcaagtgttgattgtgcgcgactgaccaggattgtgaaagagttcttctgtttgtatttttttaaagagaacttttttagtttattaaattataacatgttcccttttgttttgtaaataaatgtgcccccaagttgttaatgttatattaaaagagagggtccttcaaaaaaattattttttaaaacacagaggtgttctgacctgcaacttgactgggaagcccctgggtaacacaggtcctgctgtggcctttccttggtgtgacacttgaactagtcgattttttgaaggctataacctaacctcgactatttgttgttatgtgcaatactgtttgtactgtttgtataaaaaatagaaaaaaaaaagaaaagaaaaaaggcataaatctttattgcagatttattttcattgcaaactttagacattgtgattcactgaaatcatttttctactgtcaaatatgtaccttttcttcatgctggtattttttcaatagtaatgtagcctttgtactgagacaaattttcattgttatttttagaaagattttttgctaagaaaaaaattaaacatatttacatatttttcattttatttcgtattttctttaaggagtgctttctcaatcattaatagagttgtttctgggagggactttcatatctggtcaatgtcataatattattttgtatttttattggaataaattaattttatgatgctaattctttaaaagtttatttttttcattttcagttatttttgaagctaaaacctttgtaatattgttactaaagtgtctagttttttgaaatgcaaagctttatgtattaacttgctgatgtggtttacaatagtgtgacaacgatgaaaatgcttggttatgtaaagtgattggaaatgtaatggataattgggtaataaaatgacagaatgagcag

SEQ ID NO: 358 - DNA, 5057 bp, Homo sapiens
  Genbank Accession No. AB023171
ctctgaatccccccccagcaccctcaatgcccagatgctgaatggaatgatcaaacaggagcctgggaccgtgacagccctgcctctgcaccccactcgagccccatcgccaccctggcctccccagggtccgctctccccgggccctggttccttgcctctcagcattgcccgtgtccagacaccgccttggcacccgccaggtgccccctccccaggcctcctgcaggacagtgacagcctcagtggctcctacctggaccccaactaccagtccatcaagtggcagcctcatcagcagaacaagtgggcgaccctgtacgatgctaactacaaggagctgcccatgctcacctaccgcgtggatgcggacaagggcttcaacttttcggtgggcgacgacgcctttgtgtgccagaagaagaaccacttccaggtgacagtgtacatcggcatgctgggcgagcccaagtacgtcaagacgcccgagggcctcaagcccctcgactgcttctatctgaagctgcacggagtgaagctggaggccctgaaccagtccattaacatcgagcagtcccagtcagaccggagcaagcggcccttcaacccggtcacggtcaatctgccccctgagcaggtcacgaaggtgactgtggggcggctgcacttcagcgagaccaccgctaacaacatgcgtaagaagggcaagcccaacccggaccagaggtacttcatgctggtggtggccctccaggctcatgcacagaaccagaactacacgctggccgcccagatctcagagcgcatcattgtgcgggcctccaacccaggccagttcgagagcgacagcgatgtgttgtggcagcgggcacaggtgcccgacaccgtcttccaccacggccgcgtgggcatcaacacagaccggccggatgaggcgctggttgtgcacgggaatgtcaaggtcatgggctcgcttatgcacccctccgacctgcgcgccaaggaacacgtgcaggaggtggacaccaccgagcaattgaagaggatctcgcgcatgcggctggtgcactacagatacaagcccgagttcgccgccagcgcgggcatcgaggccaccgcgccagagacaggtgtcatcgctcaggaggtgaaggagatcttgcctgaggctgtgaaagacaccggagacatggtctttgccaatgggaaaaccatagagaacttcctggtggtgaacaaggagcgcatcttcatggagaacgtaggggccgtgaaggagctgtgcaagctgacagacaacctggagacgcgcattgatgagctggagcgctggagccacaagctggccaagctgcggcggctcgacagcctcaagtccaccggcagctcgggcgccttcagccatgcagggagccagttcagtcgggcgggcagcgtcccccacaagaagaggccccccaaggtggccagcaagtcatcgtccgtggttccggaccaggcctgcatcagccagcgcttcctgcagggaaccatcattgccctggtggtggtcatggccttcagcgtggtgtccatgtccacactgtacgtgctgagcctgcgcacagaggaggacctggtagacactgatggctcttttgccgtgtccacttcctgtctcctggccctgctccggccccagccccctggggggagtgaggccttgtgcccatggtccagccagagctttgggaccacgcagctccgacagtcccccttgaccacggggctaccaggcatacagccctctttgctgctggtgaccaccagcctcaccagctcggccccaggttctgctgtccgcaccttggacatgtgttccagccacccctgccctgtcatctgctgttcctcacccactaccaaccctaccactggtcctagtcttggccccagctttaaccctggccatgttctcagcccaagtcccagccccagcaccaaccgctcaggccccagccagatggcccttctgccagtcaccaacatcagagccaagtcctggggtctttcagtcaatggcattggccactccaagcatcacaagagtctggagcctctggccagccctgcagtccccttccctggggggcagggcaaagccaagaacagtcccagccttggtttccatggccgggcccgccgaggggccctccagtccagcgtgggccctgctgagcccacctgggcccagggccagtcagcctctctccttgcagagccagtgccctccctgacctccatccaggtgctggagaattcgatgtccatcacctcccagtactgtgctccaggggatgcctgcaggcctgggaacttcacctaccacatccctgtcagtagtggcaccccactgcacctcagcctgactctgcagatgaactcctcctcccccgtgtctgtggtgctgtgcagcctgaggtcaaaggaggaaccatgtgaggaggggagccttccacagagtctccacacccaccaggacacccagggcacctctcaccggtggccaataaccatcctgtccttccgtgaattcacctaccacttccgggtggcactgctgggtcaggccaactgcagttcagaggctctcgcccagccagccacagactaccacttccacttctaccgcctgtgtgactgagctgccctcctgaggcagcaccacaccagggaccaggggtgcccaggcaccccccaacactggatgcaatggtgttacactggagcccgctgcaggccagctctgctgttcactggccctacccgagactggtgaaactggaagtcttcacactggagttgctgttccagctggtcgcccctcacggcacagagggaacctgagagccagagacttcttgggccttcctgcctgccaccccctaggggccaggacaggaccagtttacctctttccagatatggtggttggagggctggttcaggtgccctggagggaaggggaagcctgtggccctgatttgttcagagcccattctcccttgcctccccttttgagactggagccaacccttttggagagaggacctgcccacctttgagatcagcagggggctcggatccagccctaagagacttgggtggacccccatgagtcaatggagggcagacggctctcccccttaaagctgttccctgggggatggcttggtagtggactttctggggtttgcctgttacgccagactcggacttctaagctttaagtgtggcccaggaggtttcttctccctgggagggcttggctcccaagaagtcccagggcagccgaggccagccctgcctgggttggagaaactgactttgtgccttaagtctactcagtgcctggtgaagccaccctcagcccttcacaggcctgaaccagtaggggccagtgggccaggtaagccctagagccttgaaccaggaatatccaggaagaggaaattccctttgagcccccagatggtattgcagcttcactgcctgcgttcctgggagcgtctggagctcacagtgatcagtgaccacatcattctctctgagcagaggagcaggaatccctcaagcagcagcctggtcttggctggtgggcagatgcaaatagcttttgctgttattaatgaagtaattactaaatgcacttaaaccagggcaggaaggaatggaaggatggagctagaaagctcagagtgggccagagcaggggtgtgacacttgcaaagacagggctctgactctgatccctcccagggagcctccgacacccatcccactcccaaccaccaagaccctgggttagggaagaagttgtatcttaagtgccaccttcaagtttcttagtggtgcctggtgcattccgaggctacatccaggctcatggaaggagtgtagtattcatttagccatgtctgccatgggtccagaaatgggaaagggaattgctgtccttgccctgtggtatgctgccacctctttgggaagcaggccttgcccctgtcccaccactcattctcagctttgaatgggaggcctttctatagtggaggcctttccttgaagcctatgaactgcaggcccccttttgccattgatctcaaagcacttgtcctcaggatagggaagagcagggggatgcaggaatagcagggatagcttgctcccagccccctccccaatttggttccgttgacataggaattttacgattcccaaaccatgcaggggctgagccttccttatgatgactttgttctccctcccactgggggaatcctccctatgccttaaaactgccgagccccactccatgtaataggattcctgggcttcctcaatgggggttcatgttcttggactgcgggccctcagtccttaactggaaagtgaccgtccactgccccatggagcccatctggacacagcacagccccaaaaccgttagcagctggctctgtttccaagcctggggaggggttcctcagtgcaggagttggggacaggctggggatccaagctgcttgagggggtcaaccttggaccaaagttgccttaagcctgtggtaaaagggcttcagggaaggtaagtgggccacctgctggaagctgccagctgcccggctggcaatggtgtgagtgtcttggccctgtccctgccctggggtccagcaggtcatccctcccttcttctctctcctttggcgtttgttcctgtagtcactgggctaatctccccctagcttcaagctgtacatagggcctcccagtgcaaatcctcctgcccataccgtgcacccttagaagcctgcgtgtgcatagagcgccccctacttcccagttaactcccagttcttctccctgagcttggtatttgtcatgtgccaactctgactctgaggtgggcagtgagggaagcagccccgggcctgcttgcttcctgtccccgaaatgttcgtttcttctgaagtaaatatacatatataaataaatgtataaatactgctttgtatctg

SEQ ID NO: 359 - DNA, 5524 bp, Homo sapiens
  Genbank Accession No. AB023227
tggatttcgaggtcggggataaaatccgaattctggcgaccttggaagatggctggctggaaggatccctgaagggcaggacaggcatctttccttaccggtttgtgaaattatgtcctgacacacgggtggaggaaaccatggctctgccccaggaaggcagccttgccaggatcccggaaacttctttggattgtttggagaacaccttaggagtagaggaacaaagacatgaaaccagtgaccatgaggccgaggagcctgactgcattatttctgaagcacccacttctcccctcggtcatctgacttcagagtatgacacagacagaaactcttatcaggacgaggacaccgcaggagggcccccgagaagcccaggcgtggagtgggaaatgcctcttgccacagactctcccacatctgaccctacagaagtagtcaatggtatttcctcccaacctcaggtcccttttcatcccaacttgcagaaaagccagtattattctacagtgggagggagccacccgcactcagaacagtaccccgaccttcttcccctagaagcaaggactagagactatgccagcctacctcccaaaagaatgtattcccagctaaaaactcttcagaagccagtgctccctctttacaggggctcttctgtttcagcttcaagggtagtcaaacccagacaatcaagtcctcagctccacaacctagcaagttatactaaaaagcaccacacgtccagtgtttactccatctcagagagattggagatgaagcctggtccgcaagcccaagggcttgttatggaagcagcaacacattcacagggagacggcagcactgacctggactcgaagctgacacaacagctgatcgagtttgagaagagcttggcagggcccggcacagagccagataaaattttacgccacttttcaatcatggactttaactctgagaaggatattgtccgaggttcctcaaagttaatcaccgagcaggagctgccggaaaggagaaaggccctaaggccaccgccacctcgtccctgtactccggtatccacttctccccatttgctggttgaccagaacctaaaacctgcaccacccttggtggtgcgaccctctcgcccagctcccctgcctccctcagcacagcagagaacgaatgcggtatcccccaagctcctatctcgacaccgtcctacctgtgagaccttagaaaaggagggccctggtcatatgggaaggagtctggaccagacctccccatgccccttagtgctggtgaggattgaggaaatggagcgggacttggatatgtacagtagagctcaagaagagctaaacctcatgctggaggagaagcaggatgaatcatcaagagcagagaccctcgaggatctcaagttctgtgaaagtaacattgaaagtttgaatatggaactccagcaactaagagaaatgacgctcctctcctcccagtcttcatcactggtggccccttctgggtctgtgtctgccgaaaatccagagcagaggatgctggagaagagagccaaggtcatagaagaacttcttcagacagaaagagactacattcgggatctggaaatgtgtattgagcggatcatggtacccatgcagcaggcacaggtaccaaacattgattttgagggactttttggaaatatgcagatggtgattaaggtctcgaagcaattattggctgctctggaaatcagcgatgctgtaggacctgtgtttcttggtcaccgggatgagcttgagggaacatacaagatttactgccagaatcatgatgaggccattgcgctgcttgaaatctacgagaaggatgagaagatccagaagcatcttcaggactccttggcagatctgaagagcctatacaacgaatggggatgcacaaattatattaacctgggctccttcctcatcaaaccagtacagagagtaatgcgttacccgctgttgctaatggagttgctgaattccaccccagaatcccacccagataaagtgcctttaaccaatgcagtccttgcggtcaaggaaatcaacgttaacattaatgaatataaacggcgaaaggacctggtcctcaagtaccgtaagggtgatgaagatagccttatggagaaaatttccaaactgaacatccactccatcatcaagaaatccaaccgagttagcagtcacctgaagcatctcactggctttgctcctcagataaaagatgaagtatttgaagaaacagaaaaaaacttccgaatgcaagaaagattgattaagtcttttatccgagacctgtctctctacctccagcacatccgggagtccgcatgtgtgaaagtggtggctgctgtgagcatgtgggatgtgtgcatggagagaggacaccgggacctggagcagtttgagagggtgcatcgctacatcagtgaccagctcttcacaaactttaaggagaggacagagcggcttgtcatctcccccttaaatcagttactgagcatgtttacagggccccataagctggtacagaaacgctttgacaagctcctggacttctataactgtacagaacgggcagaaaagctaaaggacaagaagaccctggaggagctgcagtcggcccggaacaactatgaggccctgaatgcacagctgctggatgagctgcccaagttccaccagtacgcccagggcctcttcaccaactgtgtccacggctatgctgaagcccactgtgactttgtgcaccaggctctggagcaattaaagccactgctttcgttactcaaagtggctggcagagagggaaaccttattgccatcttccacgaagagcacagcagagttctgcagcaactccaggtttttaccttcttcccggagtctcttccagctaccaagaagccatttgagaggaaaaccattgaccgccagtctgctcgaaagccactcctgggcctgccaagttacatgctacagtcagaagaactccgggcctccctcctggccaggtatccccctgaaaaactcttccaggcagaacggaacttcaatgctgctcaagacttggatgtctcacttttggaaggtgacctggtgggtgtgattaagaaaaaagaccccatgggcagccagaaccgctggctgattgacaatggagtcaccaaaggcttcgtgtacagctctttcctaaagccctacaatcctcgccgcagccactccgatgcctccgtgggtagccactcctccacagagtctgagcacggcagctcctcccccaggttcccacgccagaacagcggcagcaccctgaccttcaaccccagcagcatggctgtatcctttacctcggggtcttgccagaagcagcctcaagatgcatctcctccgccaaaagaatgtgaccaaggaactctcagtgcatccctaaatccgagtaattcagagagtagtccttccagatgcccttcagacccagactccacctcccagccaaggtcaggggactctgcagatgtagctagagatgtaaagcaacccactgccacgccgaggagctaccggaacttcaggcatccagaaatagttggctactccgtaccaggacgaaatgggcaaagtcaagacctcgtcaaaggatgtgcaagaacagcccaggctccggaagacagaagtacagagccagatggcagtgaggcagaaggcaaccaggtctattttgctgtctacaccttcaaggcacgaaacccaaatgagctgagcgtgtcagccaatcagaaactcaagatcctcgagtttaaagatgttacaggaaatacagagtggtggttagctgaggttaacgggaagaagggctacgttccctccaattatatccgcaaaaccgagtacacctgagcccacgttgcctgccacccagccttgctgcctttgctttcagtccgccgagggttctggcggcccaccgagagggcgcctgctcctgagacacaggccctgtctgcgttgcttaaccatggcatggtggagcacaccacagatcttgttctcctcgattgggttgtaaaccttgatgctcactagaatctctagaatttgaaatggaccctggggctttgcaaatgacttagtgactatgagaagagagacaagtcttagagctggcttttggaaaggagaaacttgcagtcagaagcccagtgtcctatgtatgcaggaagctgtgctctagcaatagacagtgttggtaatggttgtgctgtacggcgtttggggtggccccatgttccatgctcagctgaccggatgccaactcagatgaaaagaattcatggctctgggcaccccgtgaggcagtgcttgcacatggctgggagtttgtcgggattgaaccaaacctagtgcttcaaagctcctgggacacctccagtgtccagcacacattctcatacatactgcccctaatttctaaagtccctaaagcactacattctgtaaccttgtttcttttactccattcccagattagttatgcaaaattcaactgcgttctacttttagaagtgtttagggtctttattttctgttgacccttcatctgaaagattctcttcccttgttaggtacaatcactgcccccccgcttttttttttgagatggggtcttgctatgttgcccaggctggtcttaaacgcctgggctcaagcaaccctcccgcctccctgctgagattacaggtgtaagccaccataccgcaacctcaatgacacctttctgatggtctttacacagtctgtgatgtctggtggcccccctgccctggactcaataattgatagattttcctagagtaacagtatgagagctccagccattccattaaaagtattagttctgctttgagctgaaaccagttgagcctaatggaagactggatgtctttcttcttcatccaagcaccctaatgactgtttagttacatccatagatgcagacaacataacacctgtgacttacttgaattgggataagccattccagaagtagcttatcctagacttggaaataagatttttttcaccactaacttccatgcttcagagatgacattcaaagccagattcccaagtgcctgatcatacctcccagtctcaggaagatatttgcttaccccttagaccaagaatcttaagatcttccccagctatgaagcctatcttggaatgggaaaccatgaaatttgtcttttaaaagaaagggaagaaatagccttacagcccctgttcctccaagtgcacatttagccttaaaatcctgggagtcgggagacaccgtggagtccttacatccacagtgtctgctggtcgtggtcagaaggcagtaatgcaagagtccttttgtgaagagtgtttctatgtagagatgtttatatttaagtagttcttttataaataaaagcatttctaatggc

SEQ ID NO: 360 - DNA, 3604 bp, Homo sapiens
  Genbank Accession No. AB026833
  unsure (1)..(3604): n = a or c or g or t
gggcaggctcagtgtgagtgaactggaggcttctctacaacatgacccaaaggagcattgcaggtcctatttgcaacctgaagtttgtgactctcctggttgccttaagttcagaactcccattcctgggagctggagtacagcttcaagacaatgggtataatggattgctcattgccattaatcctcaggtacctgagaatcagaacctcatctcaaacattaaggaaatgataactgaagcttcattttacctatttaatgctaccaagagaagagtatttttcagaaatataaagattttaatacctgccacatggaaagctaataataacagcaaaataaaacaagaatcatatgaaaaggcaaatgtcatagtgactgactggtatggggcacatggagatgatccatacaccctacaatacagagggtgtggaaaagagggaaaatacattcatttcacacctaatttcctactgaatgataacttaacagctggctacggatcacgaggccgagtgtttgtccatgaatgggcccacctccgttggggtgtgttcgatgagtatatcaatgacaaacctttctacataaatgggcaaaatcaaattaaagtgacaaggtgttcatctgacatcacaggcatttttgtgtgtgaaaaaggtccttgcccccaagaaaactgtattattagtaagctttttaaagaaggatgcacctttatctacaatagcacccaaaatgcaactgcatcaataatgttcatgcaaagtttatcttctgtggttgaattttgtaatgcaagtacccacaaccaagaagcaccaaacctacagaaccagatgtgcagcctcagaagtgcatgggatgtaatcacagactctgctgactttcaccacagctttcccatgaatgggactgagcttccacctcctcccacattctcgcttgtacaggctggcgacaaagtggtctgtttagtgctggatgtgtccagcaagatggcagaggctgacagactccttcaactacaacaagccgcagaattttatttgatgcagattgttgaaattcataccttcgtgggcattgccagtttcgacagcaaaggagagatcagagcccagctacaccaaattaacagcaatgatgatcgaaagttgctggtttcatatctgcccaccactgtatcagctaaaacagacatcagcatttgttcagggcttaagaaaggatttgaggtggttgaaaaactgaatggaaaagcttatggctctgtgatgatattagtgaccagcggagatgataagcttcttggcaattgcttacccactgtgctcagcagtggttcaacaattcactccattgccctgggttcatctgcagccccaaatctggaggaattatcacgtcttacaggaggtttaaagttctttgttccagatatatcaaactccaatagcatgattgatgctttcagtagaatttcctctggaactggagacattttccagcaacatattcagcttgaaagtacaggtgaaaatgtcaaacctcaccatcaattgaaaaacacagtgactgtggataatactgtgggcaacgacactatgtttctagttacgtggcaggccagtggtcctcctgagattatattatttgatcctgatggacgaaaatactacacaaataattttatcaccaatctaacttttcggacagctagtctttggattccaggaacagctaagcctgggcactggacttacaccctgaacaatacccatcattctctgcaagccctgaaagtgacagtgacctctcgcgcctccaactcagctgtgcccccagccactgtggaagcctttgtggaaagagacagcctccattttcctcatcctgtgatgatttatgccaatgtgaaacagggattttatcccattcttaatgccactgtcactgccacagttgagccagagactggagatcctgttacgctgagactccttgatgatggagcaggtgctgatgttataaaaaatgatggaatttactcgaggtattttttctcctttgctgcaaatggtagatatagcttgaaagtgcatgtcaatcactctcccagcataagcaccccagcccactctattccagggagtcatgctatgtatgtaccaggttacacagcaaacggtaatattcagatgaatgctccaaggaaatcagtaggcagaaatgaggaggagcgaaagtggggctttagccgagtcagctcaggaggctccttttcagtgctgggagttccagctggcccccaccctgatgtgtttccaccatgcaaaattattgacctggaagctgtaaaagtagaagaggaattgaccctatcttggacagcacctggagaagactttgatcagggccaggctacaagctatgaaataagaatgagtaaaagtctacagaatatccaagatgactttaacaatgctattttagtaaatacatcaaagcgaaatcctcagcaagctggcatcagggagatatttacgttctcaccccaaatttccacgaatggacctgaacatcagccaaatggagaaacacatgaaagccacagaatttatgttgcaatacgagcaatggataggaactccttacagtctgctgtatctaacattgcccaggcgcctctgtttattccccccaattctgatcctgtacctgccagagattatcttatattgaaaggagttttaacagcaatgggtttgataggaatcatttgccttattatagttgtgacacatcatactttaagcaggaaaaagagagcagacaagaaagagaatggaacaaaattattataaataaatatccaaagtgtcttccttcttagatataagacccatggccttcgactacaaaaacatactaacaaagtcaaattaacatcaaaactgtattaaaatgcattgagtttttgtacaatacagataagatttttacatggtagatcaacaattctttttgggggtagattagaaaacccttacactttggctatgaacaaataataaaaattattctttaaagtaatgtctttaaaggcaaagggaagggtaaagtcggaccagtgtcaaggaaagtttgttttattgaggtggaaaaatagccccaagcagagaaaaggagggtaggtctgcattataactgtctgtgtgaagcaatcatttagttactttgattaatttttcttttctccttatctgtgcagtacaggttgcttgtttacatgaagatcatgctatattttatatatgtagcccctaatgcaaagctctttacctcttgctattttgttatatatatttcagatgacatctccctgctaatgctcagagatcttttttcactgtaagaggtaacctttaacaatatgggtattacctttgtctcttcataccggttttatgacaaaggtctattgaatttatttgtntgtaagtttctactcccatcaaagcagctttctaagtttattgccttgggttattatggaatgatagttatagccccntataatgccttacctaggaaa

SEQ ID NO: 361 - DNA, 4834 bp, Homo sapiens
  Genbank Accession No. AB029000
gatgtggagctggggtccctgcaagtcatgaacaaaacgagaaagattatggaacatgggggggccaccttcatcaatgcctttgtgactacacccatgtgctgcccgtcacggtcctccatgctcaccgggaagtatgtgcacaatcacaatgtctacaccaacaacgagaactgctcttccccctcgtggcaggccatgcatgagcctcggacttttgctgtatatcttaacaacactggctacagaacagccttttttggaaaatacctcaatgaatataatggcagctacatcccccctgggtggcgagaatggcttggattaatcaagaattctcgcttctataattacactgtttgtcgcaatggcatcaaagaaaagcatggatttgattatgcaaaggactacttcacagacttaatcactaacgagagcattaattacttcaaaatgtctaagagaatgtatccccataggcccgttatgatggtgatcagccacgctgcgccccacggccccgaggactcagccccacagttttctaaactgtaccccaatgcttcccaacacataactcctagttataactatgcaccaaatatggataaacactggattatgcagtacacaggaccaatgctgcccatccacatggaatttacaaacattctacagcgcaaaaggctccagactttgatgtcagtggatgattctgtggagaggctgtataacatgctcgtggagacgggggagctggagaatacttacatcatttacaccgccgaccatggttaccatattgggcagtttggactggtcaaggggaaatccatgccatatgactttgatattcgtgtgcctttttttattcgtggtccaagtgtagaaccaggatcaatagtcccacagatcgttctcaacattgacttggcccccacgatcctggatattgctgggctcgacacacctcctgatgtggacggcaagtctgtcctcaaacttctggacccagaaaagccaggtaacaggtttcgaacaaacaagaaggccaaaatttggcgtgatacattcctagtggaaagaggcaaatttctacgtaagaaggaagaatccagcaagaatatccaacagtcaaatcacttgcccaaatatgaacgggtcaaagaactatgccagcaggccaggtaccagacagcctgtgaacaaccggggcagaagtggcaatgcattgaggatacatctggcaagcttcgaattcacaagtgtaaaggacccagtgacctgctcacagtccggcagagcacgcggaacctctacgctcgcggcttccatgacaaagacaaagagtgcagttgtagggagtctggttaccgtgccagcagaagccaaagaaagagtcaacggcaattcttgagaaaccaggggactccaaagtacaagcccagatttgtccatactcggcagacacgttccttgtccgtcgaatttgaaggtgaaatatatgacataaatctggaagaagaagaagaattgcaagtgttgcaaccaagaaacattgctaagcgtcatgatgaaggccacaaggggccaagagatctccaggcttccagtggtggcaacaggggcaggatgctggcagatagcagcaacgccgtgggcccacctaccactgtccgagtgacacacaagtgttttattcttcccaatgactctatccattgtgagagagaactgtaccaatcggccagagcgtggaaggaccataaggcatacattgacaaagagattgaagctctgcaagataaaattaagaatttaagagaagtgagaggacatctgaagagaaggaagcctgaggaatgtagctgcagtaaacaaagctattacaataaagagaaaggtgtaaaaaagcaagagaaattaaagagccatcttcacccattcaaggaggctgctcaggaagtagatagcaaactgcaacttttcaaggagaacaaccgtaggaggaagaaggagaggaaggagaagagacggcagaggaagggggaagagtgcagcctgcctggcctcacttgcttcacgcatgacaacaaccactggcagacagccccgttctggaacctgggatctttctgtgcttgcacgagttctaacaataacacctactggtgtttgcgtacagttaatgagacgcataattttcttttctgtgagtttgctactggctttttggagtattttgatatgaatacagatccttatcagctcacaaatacagtgcacacggtagaacgaggcattttgaatcagctacacgtacaactaatggagctcagaagctgtcaaggatataagcagtgcaacccaagacctaagaatcttgatgttggaaataaagatggaggaagctatgacctacacagaggacagttatgggatggatgggaaggttaatcagccccgtctcactgcagacatcaactggcaaggcctagaggagctacacagtgtgaatgaaaacatctatgagtacagacaaaactacagacttagtctggtggactggactaattacttgaaggatttagatagagtatttgcactgctgaagagtcactatgagcaaaataaaacaaataagactcaaactgctcaaagtgacgggttcttggttgtctctgctgagcacgctgtgtcaatggagatggcctctgctgactcagatgaagacccaaggcataaggttgggaaaacacctcatttgaccttgccagctgaccttcaaaccctgcatttgaaccgaccaacattaagtccagagagtaaacttgaatggaataacgacattccagaagttaatcatttgaattctgaacactggagaaaaaccgaaaaatggacggggcatgaagagactaatcatctggaaaccgatttcagtggcgatggcatgacagagctagagctcgggcccagccccaggctgcagcccattcgcaggcacccgaaagaacttccccagtatggtggtcctggaaaggacatttttgaagatcaactatatcttcctgtgcattccgatggaatttcagttcatcagatgttcaccatggccaccgcagaacaccgaagtaattccagcatagcggggaagatgttgaccaaggtggagaagaatcacgaaaaggagaagtcacagcacctagaaggcagcgcctcctcttcactctcctctgattagatgaaactgttaccttaccctaaacacagtatttctttttaacttttttatttgtaaactaataaaggtaatcacagccaccaacattccaagctaccctgggtacctttgtgcagtagaagctagtgagcatgtgagcaagcggtgtgcacacggagactcatcgttataatttactatctgccaagagtagaaagaaaggctggggatatttgggttggcttggttttgattttttgcttgtttgtttgttttgtactaaaacagtattatcttttgaatatcgtagggacataagtatatacatgttatccaatcaagatggctagaatggtgcctttctgagtgtctaaaacttgacacccctggtaaatctttcaacacacttccactgcctgcgtaatgaagttttgattcatttttaaccactggaatttttcaatgccgtcattttcagttagatgattttgcactttgagattaaaatgccatgtctatttgattagtcttatttttttatttttacaggcttatcagtctcactgttggctgtcattgtgacaaagtcaaataaacccccaaggacgacacacagtatggatcacatattgtttgacattaagcttttgccagaaaatgttgcatgtgttttacctcgacttgctaaaatcgattagcagaaaggcatggctaataatgttggtggtgaaaataaataaataagtaaacaaaatgaagattgcctgctctctctgtgcctagcctcaaagcgttcatcatacatcatacctttaagattgctatattttgggttattttcttgacaggagaaaaagatctaaagatcttttattttcatcttttttggttttcttggcatgactaagaagcttaaatgttgataaaatatgactagttttgaatttacaccaagaacttctcaataaaagaaaatcatgaatgctccacaatttcaacataccacaagagaagttaatttcttaacattgtgttctatgattatttgtaagaccttcaccaagttctgatatcttttaaagacatagttcaaaattgcttttgaaaatctgtattcttgaaaatatccttgttgtgtattaggtttttaaataccagctaaaggattacctcactgagtcatcagtaccctcctattcagctccccaagatgatgtgtttttgcttaccctaagagaggttttcttcttatttttagataattcaagtgcttagataaattatgttttctttaagtgtttatggtaaactcttttaaagaaaatttaatatgttatagctgaatctttttggtaactttaaatctttatcatagactctgtacatatgttcaaattagctgcttgcctgatgtgtgtatcatcggtgggatgacagaacaaacatatttatgatcatgaataatgtgctttgtaaaaagatttcaagttattaggaagcatactctgttttttaatcatgtataatattccatgatacttttatagaacaattctggcttcaggaaagtctagaagcaatatttcttcaaataaaaggtgtttaaacttt

SEQ ID NO: 362 - DNA, 3800 bp, Homo sapiens
  Genbank Accession No. AB029035
gggaaggaggccagggtccgcgcggcttgggcacagtgccctggctcagggaccttcctgggagtgagaaccacatgccctgggaagaaccagcaggtgagaagcccagttgctctcacagtcagaaggcgttccacatggagcctgcccagaagccctgcttcaccactgacatggtgacatgggccctcctctgcatctctgcagagactgtgcgtggggaggctccttcacagcctaggggcatccctcaccgctcgcccgtcagtgtggatgacctgtggctggagaagacacagagaaagaagttgcagaagcaggcccacgtcgaaaggaggctgcacataggggcagtgcacaaagatggagtcaagtgctggagaaagacgatcattacctctccagagtctttgaatctccctagaagaagccatccactctcccagagtgctccaacgggactgaaccacatgggctggccagagcacacaccaggcactgccatgcctgatggagctctggacacagctgtctgcgctgacgaagtggggagcgaggaggacctgtatgatgacctgcacagctccagccaccactacagccaccctggagggggtggggagcagctggctatcaatgagctcatcagcgatggcagtgtggtctgcgctgaagcactctgggaccatgtcaccatggacgaccaggagctgggcttcaaagctggggacgtcatcgaagtgatggatgccaccaacagagagtggtggtggggccgggtcgccgatggcgagggctggtttccagccagcttcgttcggctgagggtgaatcaggacgagcccgcggatgacgacgcccctctggccgggaacagcggagcggaggacggcggggcggaggcgcagagcagcaaggaccagatgcggaccaacgtcatcaacgagatcctcagcactgagcgggactacatcaagcacctgcgcgacatctgcgagggctacgtccggcagtgccgcaagcgcgcagacatgttcagcgaggagcagctgcgtaccatcttcgggaacatcgaggacatctaccgctgccagaaggccttcgtgaaggccctggagcagaggttcaaccgcgagcgcccacacctgagcgagctgggtgcctgcttcctggagcatcaagccgacttccagatctactcggagtactgcaataaccaccccaacgcctgcgtggagctctcccggctcaccaagctcagcaagtacgtgtacttcttcgaggcctgccggctgctgcagaagatgattgacatctccctggatggcttcctgctgactccggtgcagaagatctgcaagtaccctctgcagctggccgagctgctcaaatacacgcacccccagcacagggacttcaaggatgttgaagccgccttgcatgccatgaagaacgtggcccagctcatcaacgagcggaagcggagacttgagaacatcgacaagattgctcagtggcagagctccatagaggactgggagggagaagatctcttggtcaggagctcagaactcatctactcgggggagctgactcgagttacacagcctcaagccaaaagccagcagcgaatgttctttctctttgaccaccagctcatctactgtaagaaggacctgctccgccgcgacgtgttgtactacaagggccggctggacatggacggcctggaggtggtggacctggaggacgggaaggacagagacctccatgtgagcatcaagaacgccttccggctgcaccgtggcgccacaggggacagccacctgctgtgcaccaggaagcccgagcagaagcagcgctggctcaaggcctttgccagggagagggagcaggtgcagctggaccaggagacaggcttctccatcactgaactgcagaggaagcaggccatgctgaatgccagcaagcagcaggtcacagggaagcccaaaggtaggcggacagcagccccacctcctcggctgcccggtccttaccctgctgacatcattcccttctctgaaccacaaagccaagccagctagccaccaggcctgaggggggcccactgccctttgcagctgtttgttcccaaaggttggtaataaggggccactggggaagcctgggtcagtatatggttgacattcttactctcaacaccttggctcccccagatcagggccattggtgacaatgcttgtttccccagggttccttcctgacaggcatctggggttggtgtagggatggagctgctttccccatttctacagagagccatgcccctgaaacatcacatgcctttgcacaggccacccccctcttcaggctgctgcaggaggccaggcccaggccagagaccccaggcagcctgagctcttggatgtggtcagctctccaggagcaagtcctgtgtggcaaaactgcctcctacggcggctctgaagcagagccctgggacggaccccatgctgtccccaacagctggggtggcactctgccctgggcacccatgaccctctgctgtctctccctgttcagctgttggccggccctgctacctgacgcgccagaagcacccagccctgcccagcaaccggccccagcagcaggtcctggtgctggcggagcccaggcgcaagccatctaccttctggcacagcatcagccggctggcacccttccgcaagtgaactggtccctgcctgacagcacctgctgggccttcctgccagtggcccccagtttttcttccccgaggcccactcggcctggccttcctctgcctgcaagtgagcagggatgggctggggagttgcttgtgccaccaagacgtgccaggtctgtactcctgttgtctttttccctgctcctggtgccctgaagagaccagcaagggggcagaccccgcactcgccacaccgccgctgcagcttgggccccatccgccctctggacctgtgtagggcctcactgctggagcggggaaaccgcagctcagcccaggcccagctggggagaaggcgctacctgcgtgggaccctcttctctggaaacctaatcctcctttcatttcctctgggcaggactctctggccttctgtggcctgcaatgccaggccatgtgcccctctgccctctagttctccaagtccccagcccggccagtggtgccaggcagcttgccacttgggagggcagaagccaggaattccacacccttgtgttgcgcccggagcccgcccttcgcctcccagcccctcaagacaccgctggctgctggacaccctcttcacttgtgtgtgcgtgtgtagcggaaaaggacaagacggtgcagtcggctgcatactcccagtcgggagtgtggtcagtctgcctgctgctgtgcggtagctccagaaccacctcgttcctggttttgtttggattttggcatcttgtttttctaacaacaaacaatggagaaaaagaattgattcttagtgacacagaagattgccttacgctcgtgagcgtgagaagccataagagagagaccgaattctgtggctcagcacacaggactgacccacagcccaggcagcgggtgtgtggagatggcgccctgtcctgccaaggggcgccaggagcagagccagggcctggcgagctggcgtggagcccacaggattcagcagcatggacagtcactcttgcactattccttctccaagccagaaaccacatttaatttcataaataaatttatgaaaagt

SEQ ID NO: 363 - DNA, 145831 bp, Homo sapiens
  Genbank Accession No. AF001548
aagctttaagtgcagagcaagaaggaattgaaccttttattatgattccttgagcacctaactaggtgctagactaatgattacaacctgctaacacagaggagtgatttttgtttttaaattgagttaacttaatatatcaaaaaaagaaatctgtttctggcattgctcgaaaaagcagaggacctgacactgcagaatgcagagtgcgagtagcagtccctgtgagatgggctttttgctctgcttttccgcagacctcaccactccctgtcgtctcccaggccatggtaaccattgaccgtggcacctcttttgttcactcacacacgccctgcttcactcatgccttacctgctttgtctctgtagacagtgggaccctccaccctataccaaacctctggggttgggaaaatcatgatccagagccaaggtggatgggcccccctgctcattggaactccaagcccaagtccctgaaccatgaaccccaaaggacatttttccagttctggttctgcttctggaatgcccagggggtcaggagaagccctccttccaaactttagcaggtgacaatttttccgccttagagacctggcccagcaatcttagcctactctggaagcagtgtccacccggggacacaaggaacaagcagattgtgaacagaggcctcctgggtgccagccactgcactggtccctagagggtagaaagacactgtaactggaagctgccctttgtcaagccccaagcattagcccttctgatctttttttttttttaacatggagtctcgctctgtcacgcaggctggagagcagtggtgtgatcctggctcactgcaacctccatttcctgagttcaagcgattcttgtgcctcagcctcccagtagctgggattacaggcacatgccaccacgcccagctaatttttgtatttttagtagagaagtggtttcaccatgttggccaggttggtcttgaactcctgaactcagatgatcctcccacctccgcctcccaacgtgctgggattacaggcatgagccactgcacccagccttctgatctttcaagtcattattgcttcaaagaacctcctccagtaatacaaggataatctatgcaaagacctcaggagaatatttaaaaataagtatgtatcacaaaaagcagccctcttccctggaggcaaacatgattcacaggttcatgtatgtacacacacacacacacacacacacacacacacaccccaaacataagaaaaagtcactccttgtatgttttgcagtatgattttttttccacttaaccctaccttatagttttttctgtctgttcataactatctagtcagacttcaaatatgtttttgaataggtaagacatgcaaatatgaaataaaatagtgtataagggaatatagaacttcccccttcgttcctatttctcgcccttccagttccccttcttagagacactgtggttgctggttacatatgtagccctccagtcatgttatttatttatttatattatttttcgagatggagtctcactctctcacccagactggagtgaagtggcatgatcttggctcactgcaacagccccctcccaggttcaagcaattctcctccctcagcctcccaagtagctgagactacaggcgtgtactaccacacccagctgatttttgtatttttagtagagagggggttttgccatgttggccaggctggtctcgatctcctgacctcaggtgatccacctgcctcggcctgccaaggtgctgggattacaggcttaagccactgtgcccagcctattgctttttttgtgataaagtctcactctgtcacccaggctggagtgcaatggtgcgatctcggctcctgcaacctatgccttctggattcaagcgatcatcccgccccagcctcctgagtagctgggattacaggtgtgcatcaccacacccagataatttttgtattttttgtaaagatgggtttttgccatgttagccaggctggtcttgaactcctgacctcaagtgatccacccacctcagcctcccaaagtgctacaattacaggtgtgagctgctccatccagcctccagtgatgttttatacacatgcagccacatagagagcccctcctgcacccctccaaaatggcagcacaggccccggctgttgtgcgtctcaatctttgcatctaactgtgtattttggccattcatccatggtagtagagagagggccactgcacagtcttctgctatagggatgaaccataatgattaagcctgtctgctattgacaggtatttaggttgtttctagtctttttgctcttaaaagcaaggctgcagcaaaagcacgtgcttggtggaccacgtctgtctctaggttgggtatttagaaagccgtgatattgcactgcagcttcataaagaagccgtgattatccatcactttactgaggaagctcaggggtaggtctgtatgcacaagtcaggcaggtgataaggcaaagccaacactctgcccaggcctgtgtgtctttttttttttgagaccaagtctcgctgtatcacccaggctggagtggagtggcacaatctcagctcactgcaacctctgccacctgagttcaagcagttctcctgcctcagcttcccgagtagctgggattacaggcacgcgccaccacaccttgctaatttttgtatttttagtagagatgaggtttcactgtgttggccgggctggtctcgaactcttgacctcaggtgatccacccaccttggcctcccaaagtgccgggattacaggtgtgagccactgcgcccggccatccctgtgtgtctgaaagccagtgttccttccacttccctcccttccctccctgttcctcatttctgctgcaggccccgggagcaccccctgctcagggctctgtggctgaccatataaagcgtcagagaaaaactggagctgcttcctaatacggtcacaagagggaaatcctgggcctgcagctgggacttgctggtggcacagggcccatgagatgccggctgggacacaggaggctgggatgttgaaacctctgaatttaaccagctggagaggggctcgtggggccagagaggcagaaacacagccaactatggttgggctgggtcgaggtgaaggagaagtggctgaataatgtgggaggaagagcccgatgctgaagccccacgaccctgccgtgagatgtgcggctgcctgcaccagtcttaccttcactccatcgtcataccctggcttgcttagaaagcttttacagaactcagcagagattcagatctacctggaagtatggattaagtgcttgttgtgtgcacggcactgggagagatgtcccaaacaaagaggatggaagtcatattcctctttcagaagctagtgatggagttgaaaaggcagtgtggtccttccttctttttaaaaattcattttattctttttttttttttctttgagacagtctcactttgtcacccaggctggagtgtggtggcatgatctcggctcacataacctctgcctccttggttcaggtgactctcctgcctcagactcctgagtagctgggattacaggcatgcgccaccacacccagctaatttttgtatttttagtaaagacggggttttgccatgttagccaggctgttctcaaactcctgacctcaagtgatctgacctcctcgatttcccaaagtgctggcattaaaggtgtgagccaccatgcccggcctcttccttctttttaaaaattccttttattcttttcttttctctatctctcatctctctttcttcctttctttcttactttccttccttccttccttcttttttttttttttttagagtctcactctgttgcccaggctggagtgcagcaccatgatctcagctcactataacctccacctcctgggttcaagtgattctcctacctcggcctcccgactagctgggattacaggcgcctgccatcatgcctggctaatttttgtatttttagtagagacggggttttgccatgttggccaggctggtctcgaactcctgacctcaagtgatctgacctccttggccacccgaagtgctgggattacagctgactgagtgtctaccctgtccctggcactgtgcggggtgcaggagatacagtagtgtgtgggtcacagtccaggaggtaacatttaggcagagctctaaaagaggagagggaaccagctgtgggaagatgaggggaaaagtgttccaagtggagagaacagcatattgaaggctctaaggtggcaagacttccctctcgtgaaatgaagggagcatagtaagagtcactaaataacattgattgagcacctactacataccagccgccatgctaaatgcttttcgagcattatctcgcagcacatctatgaagggcttgttcgtatgcctccctgttttgtagatgaggataagtgagactcagagaggttaagggacttgcccagggtcacacagcgaagaagtagcaaagtgaaggttcaaattcaagtaccccatacccagttctgagcccttagccactgccctttactgcctccaggtcaagggcttgagtgaggacaggttgggctgtaaatgatacctacattcaaaaggggcgtggcagtggacatggccccagaggagctggagatggagtcgaggcctgaaggagggtggggcttgattgacctttgttcaggtgaccacagactgggctcttctctttgggaggcttgtcctggggacaggggacactgattgaacaggaaatagcccctggcctggctcagtgtagtccactgagtacctactgccgccgtgcaaggcccccaggtcacggaggtgaagtcaggctgtccctgctcccaggaagctgtatcattaatttattcccctggcatgcatttagcaagcatttagttagcacctattctataccaaggcctgtgctgggactgaagaggagaaagggggttccccggactcaaggcacttgcagctggtgtttgcaggatgggtgggagggtcctgggtgatggaatggggaagaggggtgtccaggcaggcagccccccactcccagccccaccaggctggatgttgctcctgggccccgcttacctctaacccttgctttgcttctccatttcggtccgatggagccgcttataccaagctgcttatagttcacccccacggaccccgtgtcctgtttttctgcccatgtccctgctttgtcttgagctggttaacaccttgttgtcctttaagactcagtgcagggaatacctccccacctggaggtttccctgaccacccccaatgtgggttagggccttcccttccttgttcctatcattctctgttcttacgacgtgttttaatgtacttgtctccccctctgatttaagttctttaagggcaggagctatcattgatttctttatctccagcctctgacacagatgtggtatatagtaggtgctcagtaaatggttgatggctatttagacaggcatatgttgactcattcattctccttttaggggatggtgagaacctccgtctccatcaatcctgtttccttttttttttttttttttttttttttgagatgggttctccctctgtcacccaggctggagtgcaatggcaccaccttggctcactacaacctccctccacctcccaggttcaagtgattctcctgcctcagcctgccgagtagctgggactacaggcatgtgccaccatgccctgctaattttttgtatttttggtagaaacagggtctcactgtgttgcctaggttggtcttgaactcctgagtgtgagcaatctgccctccttggtctcccaaagtactgggatcataggtgtgaaccactgcgcccaacaatcctgtaccttcaaagaatattcctctgcagcacccccagacattacataccattgtccctgagtggactgagccctggaaggaccttcccactctctctttttctttctttttcttttttgagacaaggtctcaccgtgtcacacaggctggagtgcatggcacaatcacggcttactgcaacctcaacctcccaggcttaagcaaacctcccacctcagcctcccaagtggctgggactacaggtgaatgccaccatgcccagctaatttttaaatttcttatagagatgggggtctcactgtgctgcccaagctggtctcagacttctgggctcaagcaatcttcctgccttgacctcccaaagtgctgggattacagttgtgagccaccacacccagccagactttcccactctctaattggctccagcccttgactaaaaggcccttgagggctgggatcctgtgtttttttaatgttctaatgtagtcccagcaccttttgcatggcatctgggacgtacagaatgaatgaatgaatgaatgaatgaatgaatgaatgaacgaacgatcagtagtttctgtttctgttggatgggcctaggctggatagcataatggaccatgctcatacctgggggcgggccaggctgggcttggtgctgccaggatcttctttggtgacctcggtcaagtcacttaaccctctgttgcttggttcaccctagctgtaactgagagatggatctgtggttctccctaagtcacttgcagggaagaggatacgctttatggccatcagagtcttgggcagtactgatgtttatcgtttggggaaagcagttcctgtgagacgggttggagcctgtctcctgaactgtgacctcaaccatgggaaaatctagtatccagtaaggaaaaatcatgacaatagtgccttaccacgtacagcatggcgggactcgccttgtgccttgactcctccgtccctgatctgattattttcagatgctcctattcacccagtaggagaggactgctattttttaaatggtaaagtgcatatgacataaaatttaccattttaaacattttaaagaaaacagtgccattaagtgcattcacaatgttgtacagctatcaatttcaagacagggtcttgctctgtcacccaggggctagagtgcaatggtacaatcatagctcactattaccttgagctcctgggatcaagcaatcctcctgactcagcctcccaagtagctgggactacaggtgatcaccaccatggccagctattttttttttttttttttttttgtagagagggggtccggctgttgttgcctgagctggtctcaaacacttagcctgaagcaatcctcccaccttggcctcccaaagtgctgggattacaggcatgagccactacacttggccccagagcatttttatagcctcaaaaggaaaccttatacccatgagcagttcctcctcatttcccacctctttccagcctctgggaaccacaagtctgttttctgtctccatggctttgcctactctagacacttcacataaatgagatgatagagtacgtgacttttcgtgcctggcttctttcactaggcatattttcaagcttcatccacattggagagctcatgtcagtgttggtctctgttttgcagatggggaaggtattaatgatcaggagcaggcgctgtggggtaaacaggagttctagttcccaacttccctccagctgtgtaacctggtgacaacctcaccatgcctcactttgccctcctgtcaaacaggcggtggggaaatcactgttactgagtagttgtgaagatgccacgaggagatgcctctgccatcttctagagactgagtcactggggtttcttcttagatatggacattgggaggtcccagaaagagatcagagggtggtgggaggagagagagcttggaggattattaccttttcctccctccctcctggaccacagttttggcagctgtgtttctgtatgactgcggatccctctggacagcccctttttaggggtgtgtggctttctatgcctccaatgttcagttaacgacattccctctctggctgagtgcggtggttcccacctgtaatcccagcactttgggaggctgagactggcgcatcacctcagctcaggagttcgagaccagcctgggcaatatggtgaaaccctgtctctacaaaaaacaaaataaaaattacctgggcatggttgtgcacacctgtggtaccacctacttgggaggctgaggcgagaggatcacttaagcccagaaactcaaggttgtagtgagccaagatcaccccactacactgcagcctgggcgacagagcaagaccctgtctcaaaaaaaaaaaaaagtaaacaacattctcttctgttcttgctcttcagacttaactgctcccgtcactggttgggtttctttaattctgcacacatatctgtaaacactttctttattaaatgttcctgagttaatatcttaagcacactgttcattttctgtgccacctgttaaatgatgagcatttaatatgattgtcagcatccaaaaaagatcctgcgtagtgcttagttcggtgcccaacacatagtaagtgctcaatgaacggtggctgttatttaagccagtgaggtccggggaggtaaagtggcaggtcggaggagtggagctgagatttgaacccagagctcttcaaaactccacagtttggccaggtgcaatggctcacaactataatcccagtgctttgggaggctgaaatgagagaattgcttgagcccaggaatttgagaccagcctgagcaacacagtgaaacccatgtctctacagaaaatataaacatcagccaggcctggtggcgcccgcctgtagtcctggctactcaggaggctgaggtaggaggatcacctgagtccagaaaggtcaaggtttcagtgagtcacgttcacaccaccgcactccagcctaggtgacagagtgagaccccatctcaaaacaaacacaaaaccccccacagttgcaaaataaaacataggcagcttggaaacccactctcgccctttctcctcttcccacgtacctggaatatcagtgaggcccagggtttccactaagactccaagctccagtttccccatctctaacatgagaatattgagtgcttctgtgcaatctgtctaccctggaggaggtctggaagtaagctgggttctctgtctgcagacgtactctggcctcttctgcgtggtggtcaacccctataaacacctgcccatctactcggagaagatcgtcgacatgtacaagggcaagaagaggcacgagatgccgcctcacatctacgccatcgcagacacggcctaccggagcatgcttcaaggtgagtgaactcagggctgcacggggccagctccagggagcccctcctgtcctgcttgtctgcagttcttgccaggaatgtggagtttggcaggcactgcgagggaccaggagttactgtggctgaaaaagggaaaaagcaaaaggaacatctgtgtttgcagcctgggagggtgagggagagccaagagcttgggcaaatacgggcatgggcccgctccagctccagctccggggctcgctgcccaaggtccccgtcgggccagctgtctgcaaaggatggaaagagggtggggaacagccctggggctgagccattgtggtctgtgttgacacctacctgtccctcaacccctgtgggactgtgggtaaatatcttttcctcttcagcctcagtttcctcatttgtcaaaaggggtgatagtctctatcttgtagcttcttgtgaagattgttaatgctggtttttccaaacttaagacttgtgcctattactttcatgtttatacgttattatttttactattgttttattatttttgagacagggtctcactttctcgcccaggctgaagtgcagtggtgccatctcggctccctgcaacctccgcctcctgggctcaagcaattctcctgcctcagcctcccaagtagctgggactataggtgtggactgtcatgtcaagctaattttaaaaaggtgggtttttttgttttgtttttgttttgttttgttttgtttttggaagtgacaggatcttgctatactggttggtctcaaactcttggcctcaggcgatcctcccactttggcctcccaaagttctgggattataggcatgagccactgcacccaggccttctcaccttctatttagaacactttggagcccctgaaatagccacccccaagtcaaacagagggactaggcagttaatgcaaacaagtgtaccaggtcaggcgaagagtacaagaaactcgaaaactcacaccccctctgaaagggcaccaacaggtgggaacccagggatctgagttgggagttgagaggagcccaattctggaagttcttgaggccggaatccaggtgtgcctgagagatgccacgaccccgcccccaagatagagggactcaggtataagtgccccaactttctgacagtgagccagactccacaggtaggaccagaatcttggcccttctaggcagggcctgccattacctccaaagaccagcaggtggagccttgcaaaggcaatcttggagctgtaatctcaggttgtaaagtgatggctcctggagtcaggtatctgtcttttttttttttttgagacggagtctcgctctgtcgcccaggccggactgcggactgcagtggcgcaatctcggctcactgcaagctccgcttcccgggttcacgccattctcctgcctcagcctcccgagtagctgggactacaggcgcccgccaccgcgcccggctaattttttgtatttttagtagagacggggtttcaccttgttagccaggatggtctcgatctcctgacctcatgatccacccgcctcggcctcccaaagtgctgggattacaggcataagccaccatacccagcaattcctggttcttttctggagctgaggtcccactaagcacattttaatctaaataccaaaaagaaagaaaattctgttagcaaaggagaaggagggggagcgacagatgggtaagcatttctacagtgctctgaaaaaatttatttgtaacttgaaaaagtctttaatattgtatattcattctagaaaaacttaaacatatatttaagtaaaagagaacttgctggcacctatgattctatcatccaaaactcatcaccattaacattttgttacgtgacctttcattacactaactgaactaaatggcatgaaatgaaggaaatttttactatctgaagataattcgttccagaaaaagatcacttaaaacagagaccaaagtttcactgtagatagtatgtgtgtggaggagggaaagagagtgggcaaaatatttgactgagcttgaaaaatgacattgcaggccaggcacagtggctcacgcctgtaatcctggcactttgggaagcccagatgggtggattgctcgaggtcatgagttcgagaccagcctgggcaatatggcgaaaccctgtctctacaaaaaatacaaaaattactttggtgtggtagcacatacctgtagtcccacttcttgggaggctgaggtgggaggatcgcttgagaccaggaagtggaggttgcagtgagccgagatcacgccactgcattccagcctgggtgagagagccagaccttgtctcaaaagaaaagaaaagaaaaccaacattgcaaattataaaaataggttaatttcagcttacatgtaataagaattttattttaattacaagtaggtgctaatttgtagattcagtataaaatgaattaagagtgggtgtggggtttttttctgtaactttttctgggctgagggatgaaatcatgtgagcataaaacgacatcttcatgtcatgcttgacttctgcagcccgagctaaaaaggatcattcttacagatttatttgatgggtcaccagttttcctaagggcttcttttacttctttagtgtttaagtctctcaaagcccctgtggtcttagcgttcattcagctgtgaattgccctgaatctttttctttcttttgtctttctttctttctttttttttttttttttccggatggagtttccctcttggtgcccaggttggagtgcaatggtgtgatctcagctcactgcaacctccacctcctgggttcaagcgattctactgcctcagcctcccaagtaactgggattataggcatgtgccaccacacccggctaattttgtatttttagtagagatggggtttcaccatgttacccaggatggtctcgatctcctgacattgtgatctgcccgcctcagcctcccatagtgctgggattacaggcatgcaccatcacaccaggctaattttgtatttttagtagagatggggctttaccatgttggtcagactggtcttgaactcctggcctcaggtgatcctcccacctcggcctcccaaagtggtgggattacaggtgtgcaccaccacacttggcccctgaatcttttttttggcctttccaaggccactgactttgccagtcactgcaccttgttttccagaactgccactttgttttgtgttcatatcatgatggtggctattgatacccaataattggcaaggtgaagccactgaatcgtcggagaaggaggtttcggtggagtttgatcgctcttgtagtcattgaagaatacttttgtgttgtggggacttttgctttcctagaccagcagtccccaacctttttgacaccagggaccagtttcatagaagtcagtttttccatggaccgcaggggagagatggttcgggatgattcgagcgcattacatttattgtgcactttatttctatgattacattgtcatatataatgaaatcattatacaactcaccatcatgtagaatcagtgggagccctgagcttgttttcctgcaactagacggtcccatctgggggtgatgggagacagtgacagatcatcaggcattagattctcataaggagcacacagcctggatccctcttatgtgcagttcacagtagggttggtggttctataagagtctaatgccgcctctgatctgagaggaagcagagctcaggcagtaattggagtgatagggagtggctgtaaatacagatgaagcccactactcacctcctgctgtgcagtaccagtcggtggtttgagatgcctgcgctagaccacctcttaactgtgaggcaatgttgtaattgacaaggacaccctgtgttcatatatttgattcctcatggtctctaggttttaacacaaaattgcatagtcagctctcttgaaactacttagaaatgctcacttgacacatagtaagctccaataggaaatgactatcatgattgagcacagcagcatgtcttcagtcctagcactttgggaggccaaggcaggaggatcacttgaggccaggagttagagaccagcctggccaacatagtgagctcttgtctctacaaaaaaataattagctggccacagtgcgtgagtctgtagtcctagctactctggaggctgaggcaggaggatggcttgagcccaggacttcaagaatgcagtgtgctatgatcgtgctatggtactccagccttggcaacagagtaagaccctgtcacgaaagaaagaaagaaaatgaaaaccgtgaatatgcacatccataaaagataaactctttacttaatttaaatgttaaccaacacctgctatgccctcgtctattttggcatgacctggtgctttctggcaaatcattgatggcggactccaaaaataaaaagaatcgggcacggtggctaacgcctgtaatcccagcactttgggaggccaaggtggggggatcatgagatcaggagatcgagaccatcctggctaacgtggtgaatctccgtctctactaaaaatacaaaaaaaactagccaggcacagtggcaggcgcctgtagtcccagctactcagggggtgctgaggcaggagaatggtgtgaacccaagaggcggagcttgcagtgagccgagatcacgccactgcactctagcctgggcaacaaagcgagactccatctcaaaataaataaataaataaaaaataaaaagaatgtcaaaaataatggagaaaaatttaagcttgggaagaattccgttcacctgcttaattttttctccattcccaagtaggaaattggtttttgtgaagaaacacgtaggcccagtgtgttgactccattgataaatggcacgatctcattctgttaagtcactgggctgcgatccacactaagcttaccatgaaggtggagagagaaagctagcacatgtggcttcttccttgagttcttcatggaaaagatggggtgtgaaaaggcgggattgaggagggatgggtaacacacatgcactgaatataagatgaagcattgcagttgtgtcacatagacagtaagttcctgaggacctataaactccatccttcttgcatgtgcatcattgtatctccagcacattttctggtgcctggcacatagtagctgctcagtatttgttgaatcaatgaattattagagttatttatagaaaagaacctaccagggtcaggatggatggggtgggttatttgagagaggtggggctttataagcctcgaagaatggtttgctaaggtgagagaagggggcagggatggctttctagccaagaataataaaagcataaatgtaggggtgagaatgggtatgatgagtgtggcaggagctggtttagaggggttgactagtatactgtggcagggagctcagagccagagctcagccctttgctgcctcacaggagttgggaaaatgggagggactttctaagagatacttcacaacatggcaccctcccaagtggaagccaagccccttgagggtatgggaagagaagctgatatttaaaatatgtatcttatatctgcatatgcataaattatgtcatgtttattttttaaattctccccccctttttttttgaggcagagtctcgccctgccacccaggctggagtgcagcagcacgatctcagctcagtggtatgatttctgctcactgcaacctctgtctcctgggttcaagcaattcttgtgcctcagcctcctgagtagctgggactacaggcacacaccaccatgcctggctaatttttgtatttttagtagagatggggttttgccatgttggccaggctggtttcaaactcctgacctcaggtgatctgcccgcctcaacctcccaaagtgctgagattacaggcatgagccactgcgcccggccgtggtttgtttttggaaagatgttacatacaaattcaaaaggtgaacttctcccttcaacccttgtgcattagacccttagcttccctcccaagagacaattatggtttctagtgtatgaggttttctcctagagatatttttgcaagtataagcaaataggtatctattttcttccctaagatttccctacaaatactagcattccatatatatacagtcctatattttgccagaggatgttacatatcagtgcatgtaggaattccttgttcccttttttaaaaaattggtttttatttttgttaaaagtattcatgcagacggcttagagtcaagtaatttttgaaggcttattaagaaaaatagccatcctctgctacttctcaactcctttaattgattttttttttttttggtatttaccaccatatctctgaaaacaacacttgatcattgtgctgctatcttaattttgttttcaattttaggtatcatctattgactttcctccatgaaagatgaaatttagctcattcaccctctggatttgcccctatttcctcgttccaacacacatgcctcatatcagagtcccagtataattttatcttagttttgacaaactcagtgttcagagtttccattattatgactatgtaatgctatctagagtttacattattatgattatgtagatgttattcaaagctgagctttgcactgctttgtgactatttttcttctttctgtatgacttttctttttcctggagttagcaattgccttttttttccccaatcttgttttccatgtatttaaccaccaattctgccccaaaatctctttctaaatgtgttaatctccttttaatatgtccagacatgtattggatatcatattgatatcatctccttgaatgtgatctctactatagccttctgatctgccctggctttctctatagctagtaactgtcatataggatctttttcaccatccttgaaattccccttagtgctttcatagtggattccttgtttcccagttttcatgtcttcctctttcttgctttactctcctgcttaaatcaagcactttgtccagtagcttcccaagaaagaatgtacgtgatcttgaggcattgagaacttccatatctgagaggcttgatgcttctctaacacttaaaggatagtttagttgggtttaaaatttcaggcaagaaagttgttttcagaaagttataaataactttttttgcctgagctttttaaggcatttgtgttgttgccttctagtttcagttttgagaagatgaaacccaatctgattcgtatgtgtgtatgtttgtgagtgtgtgtgtgtgtgattatattcaccttcctggctgggaatattcttgatcctttgtacatgaccagtttttgtttttcctccttctctagaagcttttagactgtctttgtacccctattcaggatgatgggacttgctatgagtccatttttatttgttatcctggacacttagtggcccaattaatctataaacgtgtgtccacaaattctgggaaatgttgcaaattatttcattgatgctgtctttctccctgtgttctctgtttctttttcttagaagtctttttatttccataatggaattcctagaccaatcctataatttaaatctctttcttttgtcattttcatcactttaatgtttttaatggtattttctgggcacttacctcaacttttttccctaacccttccattgcgttttaaatttctggtatatattttattaaattccaaaaattctattttatttttaaatgtttctttcatatgacattctttttctgtggttgcaatatcctgtttctcagaggatatttaatgcagagtctatttcctccaagatacatattttcctaattgttttaacttctgtctgtcatattagtggatttcttcagatgtcttgggattcttggctatccattcatcttggatgctttagtacacaggataccaaattgttgatggaagctcagtgcttataggatgggcttgctgatgtgcttggctataatatgaaagcactgggctaccccattaggacacttctgtttcgtctttcagtcttttgttcatgggctaatctgattcttcagagaaggtttgtagaaaaatcttctgcctggaggttaaagatttgtctagcatcattttgagggtctagttgaaaagaagctgagggtttcaaaatgtgcagtgaaatttgtacattataccttccttctttcagtatggttcctggtgtccccccaggacggagaccctctgtttaaccctcaccagagactaaacccaccaccttctgtggggtgtgagaagggcagtcacttggcttcagggagtgtagaagatatgggaggggtctaacagtgccttatatttgacccagtccttatgtttttgtctcctccttgatcttttcttccagaggcccctggcattgccagtttctgaggtttggggcagaaatggggaattcggtgttgaaattaggtcgtttcccacctttcctcactgctcacctagacttttttcttggtacctttttttttttttttttttttttttttttttgagatggagtttcactctcgttgtccaggctggagtgcaatggcatgatcttggctcactgcaacctccacctcccgggttcaagtgattctcctgcctcagcctcccaagtagctgggattacaggcatccgccaccacacccggctaatttttgtattttaaatagagatggggttcaaccatgttggtcaggctggtcttgaactcccgaccttaggtgatccacccaactcggcctcccaaagtgctgggattacaggcgtgagccacggtgtctggactttttcttggtacttttcaacgcttatcccattttctgtcttccaagatggctttgctgttctcccctctctagttctttttaaactgcctcatgtatttttacactttttggtttgtttgtttttttttgggggatggagtttccctcttgtcgcgcaagctggagtgcacgatctctgctcactgcagcctccacctcccaggatcaagcgattctgcagcctcagcctcctgagtagctgggattacaggtgcatgccaccatgcccagctaatttctgtatttttagtagagacgggttggccaggctcgtctcgagctcctgacctcaggtgatccactcacctcagcctcccaaagtgctgggattacaggcgtgaaccaccacgcccggcctttttacacttttttttttttgccttttcccccctcttttgtgtggagaatggggtcttgttatattttccaggcaggtcttgaactcctgggctccagctttcctcatgcctgtgccttcctaagagctgggattccaggcatgagccaccatgcccggctaaactggttcatgtatttttggaaagtcttttacagttattttagtaaggtttaggaaggaagagagctaaatgcatgcactcagcctaccatcttctcatgggaattctctcatgccttcttttacaaagaagtgataataataatcatggatttttattatatgcttcctataaagctcagggctttacagaaatattctcagttaatctttaccacaaacctacaaggtggacaggaccagattaggaattttaaaattaagccctgaaactattaaggtgcaggcatatgtcataaaaaaaaattaaattataaagtaaagaaggctgacaaaattgtttttgtttttgctttttttagagacagggtcttgctctgttgcccaggctggagtgtaatggtgcgattgtaactcactgcagcctcaaactcctgggttcagcaatcctgcctcagcttcccaagtagctgagactacagagatgtaccaccatgctcagctaattaaaaaaaaacaactgttttttgtttgtttgttttgagacagagtttcacccctgtcacccaggctggagtgcaatggcacgatctcagctcactgcaacctccacctcctgggttcaagtgattctcctgcctcagcctcctgagtagctgggattacaggcacatgccaccatgcccagctaatttttgtacttttagtagagatggtgtttcaccgtgttgaccagactggtcttgaactcctgacctcaggtgatccacccaccttggccttccaaagtgctgggattacaggcatgagccaccgtgcccagtcttttttatttttgagacaggttctcactttgtcacccaggctagagtgcagtggcacaaacacggctcactgcaggcttgacctcctaggctccagtgatcttctcacctcagctccccaagtagctgggactgcagccatgcaccaccacacccggctaatttttgtattttttgtggagacgggatttcaccatgttgcccaggctggtcttgaactcctgagctcaagtgatccacctgcctaggcttctcaaagtgctgggattacaggtgtgagcccactgtgcctagtgaaaaaactttttttttttttttttttttttttttttttagagataagatcttactgtgttgcccaggctggtctctcattcctggcctcaagtgatcctcctgccttgacctcccaaagtgctgggattatgggtatgagccaccgtgcccagcctaaagttgctatttttcccatgatgtttatcttcgtggtgcttatgaaatggcaactatggcattcttccttctcgtgcatgcctgtgtgggtgtgccctcagcatatgcttacaaggtttattgggtgatccaacgctagccgcaagagctattattagctcccttttacagctgggaaaacagactcagaggagtggagaacttgctgcagatttgttaagtgtcagagccaaatatacacttggattatcctgactccaaagccggagccctgctggtcagtcggtgacaccgggcaaccacagggatccccctcaatcccacggaaggctgtctactgtcttcatctcagagtgttgacagctcaaagcttaggaggctggagctaagttcaataaatgaacgtgatgaataggagaaaagcgccattaaagccctccagacaagaaccactttggagcccctccatgggtccctggggtgtaggaggggcaggaaagcagataagattccattctgagcctctgcacttgccctatgcaagatagccacaagtaatgttttgtcctcacctcattagcaacaaatggccacactcaggggattaaaaaaagaaataacagccagcctttatcagcttggggctcttggctaattcctctttaagcttaagacaactctgcgggtggagtgatccaaacgactttctccactttgcaagttcccacactcggctgtatccttctgcttgagattggcagccccctggggatggttcctgctcacccaactcccctgaggctgctccccagtagaggcagagagaggaagggcactgatgtcctcagggcccctgcaataggtcaggacctgggttcactgctccatcaatcccacattgctcggccctcactagcaccacacagggtgggtggcagcctccccatttgatcaatggggaaaactcagcacacctacttggccccagaactgagagtcaaacctggggacccagcttcgctgccctcagaatgttactcttccctcctgggtagcgtggtatagatagtgtagtattcttgtccccatataacggaagaggaaactgaggcccccagaaggctaagggactagcataggccttgtgtcttagcctgttaaggctgctatatcaaaataccatagactgggtggcttttaaacagatatttgtttctcgtggttctggaggctgggaagtccaagatcaagcttggtatctggtgagggcctagtgctgccttctcgctgtgtctcacatggtggaagggacctgctagctctctgggtctctcccccaatgaggattgaacccccatgatctcatcacctcccaaaggccccacctcctaatatcatcactttaggggtaaggattccagcatatgaatttgagggagacatgagcattcagaccatgacaccttgtaatcagaaaggggttaaatatctttggttgaatatcctgtcctgccgattcagaatcactgctgtctataacctcttccctagatcactgttttagatgatgatgataaagatgatattaacggcaattaccaagctcttaaatgtgctgtgggtaaaacaattttaagctctttctgaatccagtctctttcaatcatcttcatgcccttgaaaggtctggatttttgtcgatttccctggtgaggaaacgggccctgggggcagaggtgatagggtggagccaagaagtaattcccagctgtttctctgcagaggcagtgctgctacaaacacatctccaggaaggggtacagccaaatgcttctctgtctcttgtgggttttgcagtggctgtcagctatgtgtctggcccggttgggaatgatgggggactgtgtgtgggaatgaatggctctgtctggctggctcagtctttacagaggtgctaggagtgtctgtttggtgctctgactaatcatgaaaagttcacgtttttatctttattttatttttatttttggtacccatggtgcattacagggaagggagacagcaaaggagaattatttgttataaaatagtaaatattggccaggcacagtggttcacacctgtaatctcagcactttgggaggcagaggcaggcagatcatctgaggtcaggagttcgagaccagcctggccaatgtagtgaaaccccatctctactaaaaatacaaaaaattagccaggcatggtggtgggcgactataatcccagctactcgggaggctgaggcaggagaatcgcttgaacctgggaggtagaggttgcagtgagccgagattgccccactgcactccagcctgggcaacaagagcaaaactccgtctcaaaaaaaaacaaaaacaaaaacaaaaaccgtaaatattaaattgaaaaagggacatacttaagggagtgaacctgaaaagccccagctgacacttggcaacaccttccttgtttgttttgggcttttttgagacagagtctcactctgttgcccaggctggagtgtagtggtgtgatctcggctcacctgagcctcagcctctccaggctcaggtgatcctcccacctcagcctccagagtagctgcatacaggcatgcaccagtacaactggctaatttttgtattttttgtagagatgaggttttgctatgttgttcaggctggccttgaactcctgagcccaagcaatccacctacctcggcctcccaaagtgctgggattataggcgtgacccacagtgcctggccagcaccttccttgttaaattgcatgtgtcagccacctccctcggtgtcctcccagcctctgggcagtctggctccccattcctttctttatccaacagcatttttttgtgagacaaggccttgccctgttgcccaggctggagtggagtggcacactcatagctcactccagcctccaactcctgggctcaagtgatcctcccctctcagcctcccaagtagctgggaccacaggcacagatcatcacgcctggctaattttttgattttttgtagagatgaggtctcattatgttgcccaggctggtctcgaactcctggcctcaagcaatcctcccgcctcggtctcccaaagtgctggaattacagatgtgatccaccacgcccggtcattctaacaatattgattattagatgttgccctagacacagcctactgtgcgtatgtgtaaatacgaattgaatcatcccacaagtagctgctaagtagaggaggtccagagagtggggaagtgtagccctggggaccttgggaggacaggggaggcttccttggaaggtgaagtgtaggcttggctagggaacttgatataggttctatgaggctgctggggctggagcagagagaagggggagaatgtaggaggtaggagtggaggcccaagagggagagcgttggttttcctgtctcctacaccccttcactggccagttctgctttcatgtttttatttattatatattttttgagacagagtttcactctttcacccaagctagagcgcagtggcacaataatagctccctgtaacctcgaactcctaggctcaagcaattttcctgcctcagccttccaaatagctggggctacaggcacacacctctgtccacagctaattaaaaaaaatttttttttcatagagataggggtctcgctttgagtctcaaactcctcgcctcaagcaatccttctgcctcagcctcccaaagcactgggattacaggcatgagctcctatgcccagcccagttctgcttttacaataccagggcttcctgtaggtttggaaaacacctgttgggttgcagcaaaggctctcaaagtatctcttcttactcagcatgtcatcctaaccaactctgccgggagagtagagtggggagatgaaggctggagaaagagaagggccctcacttacagaatggcttaggtcatgggctctggagctgggttcacctcccagctctgccccggctattactttgtgcctcagtttcctcacttgtcccgtgaggatgatgactgtgcttactccagttgttacaagggtgattcggtcagtgtgtagggacacggtgcatggacaggacaagttcaacaggcattagcagtcagctgccgaggacccaccgtcaagggccatgcagtggccaccttcacagtcacaccacagaagatccagaacctctggcatctgcctccgtgcggggcattaggtagagagccacttttctgcaggcaatggaggctgagacctttcttctttactagcccaggggtattgatggccctgcagagacgggttttgattacctctcactggatcccccagcagcctgttaccagaaagaagggcagacgcagggagcctgggtctgtgctcagtccccgctgggttttctccttttatggtcagcctacagtgctctggcttcccagacagaatccaccagcttgtgtttgggcttgggccgaaatagctggtctgtggggagctgggtacctcctgggagtcctcaggcccacagcgggggaggaaccgctgaagccctttatcttctcaggaaacgtgcctggggccttacacatccgaggctgggtggggagtctggggaggaggaagggagagaggcatgtttaaggatggggtgtgaggtgacatgagccccagggatctgggctgggaagctcagccccaggcgggtcctgatgatggccggccgcccccagctccagccttcccagactccacggaggctcggtactgtgtccccgcccactttggagcttctgtcccaggccctctgcttgggatgctctgcctcgacctctccccaggagattctttcacatttttcttaatgctgttcagtggtcacctctgccgtgaaggcttcctgtcttgctcaggtcagtgtgaaaaaacaaacaaacaaaaaacctgacgtctatagcacttgggttcacatccatcgtagcactgctcatctcttacggtcatttctttgcccatctgactcccaccctgggtcatgaacttctcaaaagcaaggataagcaagtcatgaagctcggtgcattggcttgagcctgtgatttcagttacttgggaggccaaggcgggaggatcacttgaggccaggagtttgggaccagcctgggtaatattactaagttaccttactaggccctgtctctacaaaaaaaatgaaaacaaaaaacaaaaaaaccattagccaggcgtagtggcatgcacctgtagtcccagctgctcaggaggctgagatggaaggatctgttagcccaggagttccagactgcagttagctatgatcgtgctactgcacttcagcctgggcatcagagtgacacctcatctcttaaaaaagaaaagaaaaaaaaaagcagatcttattgacttttgtgctttcggtacctggctcaggactcgtttgttgaatgaatatgtgaacacgtgaatatgcattttccattgcttctaccttggttgcctctctgagccagagagcaattcaaaataacaagcatttcctgagcacctactgtgtgtcaggcattgttccttgtaccttcaggagctcattggttcaggggaaaagcattgaaaatgaacaattttgtaattgttggaaacctaatagagctgcatgaagtggaagaagtcagatttataatcattcagaggtggtataaaatgaacatcatttttaaaaaaggtttatgcggtataatttaaataaattcattttaaggatacagttcacacctaaaattgcagctatgtctgcataactgtctaaattcactcataatttacatggttatgcagccattgctgcaatataattttatatttctatcatcccccaaagaaatcttgtgcacatttttttgtcactccatattcctacccgcagctcctggcagccacgaattcacaaatctactttctgtctctatggatttgcctattctggacatttcatataaatggaatcatatgtgaccttttgtggctggcttcttttttttttttttttttttttttttttttttttttgagacagagtgtctcactgcactcgcccgggctggagtgcagtgatgtggtctcggctcaccacaaactctgcctcctgggttcaagtgattctcctgcctcagcctcccgagtagctgggactataggcacgtgccaccacacctggctaatttttgtatttttagtagagacggggtttcactgtattggccaggctggtcttgaactcctgacctcgtgatctgcccacctcagcctcccaaagtgctgggattacaggtgtgagccaccgtgcccagccggctagcttctttcacttagtataatgttgtcaaggttcatccacgttgtatcatggattcatactatttatatattttttaagacagggtctgtctctgtcaccccagctggagtaccgtggtgcagtcgtggcttactacaacctccacctcctgggctcaagccattgtcccacctcagcctcttgagtagctgagaccacagggattgtgccactatgcccagctaatgtttgcatttttttttgtagagatagggtttcaccatgttgcccaggctggtttcggactcccgggctcaagcaatccacctgcctcagcttcccaaagtgctggaatttcaggcatgagccatggccgccggccataacatcctttcttttcatggctgaatactatcccactgtctgggtagaccacattttgtttatccatctacccattgatgaacatttggttgtttctattttttggatattatgaataaagtccataatttttaccaatatggaaaagaaaaacaagaaaaactctgaatgccatatcatggatagatggcctattatcattccatatcatctgtacctttttccgccagaatgttttgagacatttattaagtaaggatcacaatgatgataattactaaaatggagagaacctgtggaccatgggaaccactaggccatgtgacactcatgtttatattagagaaaggcaccgttttctcaaagcacttttcctccatctgctgaaagattattacaataaatacacaatgcaatacaataaatgaccaatgcaaatagtttctccatagagttatgcagtgtacaacatgcaccacggtccatggccatcctgcaggtaggaggtcaagtggaaaggtctccaactcagctctagaaaagtgcagagttagagaaggtatcatagaagagttgactcccaagacgatgtttcagatacagattagggtatgtacccgaagaattgaaaaggtactcaaactaaaacttgtacaggaatgttcatagcagcactatgcagaatagccaaaaggtggaaataacccaaatgtccgtcaactgttgaatggataaacaaaatatgatccatccgtacaatgtgatatgactcagccacaaataggcataaagtctgggacctgctacaacatggatgaacttcagccacatgctgagtgaaagaagtcagacatgaaaggccgcacatgttataattccatttatgcaaaaatatctagaataggtaagaccatagagacagaaagcaaattggcggttgcaagggcttatgggggagtggctgcttaacgggtagagggtttcatttgggggtgacagaatattttagaactagataaaggtggtagttacgtaacattgtgaatgtactaaatgctcctgaattatgcactttagttatttttttatctttattactattttttgagatggagtctccctctgtcacccaggctggagtgcagtggcgcgatctcagctcactgcaaactccacctccctggttcacgcgattctcctgcctcagcctcctgagtagctgggattacaggtgtgcaccaccgcgcccagctaatttttgtatttttggtagagacggggttttgccgtgttggtctcaaactcccgactttaggagatccagctgtgtcggcctcccaaagtgctgggattacaggcataagccaccgcacctggcttgaattattcactttaaaatggttctttttatgtagtgtaaattttacctcaatggaaggaaaaaagagagagagagagagaatggattaggccagagaagaagtggtggtgggtgcactgggcagaagaaatcacttgtgcaaagcaaggagggagtgaaactgctttgtacggtggagaacactgcttttgagtccaacacaagctcaggcttggggaaggaatcagataaaaatttccaggatctcagagttccctgtgctccacacgggttggcagacagcacccacatggagtccttctgctcgtaaccagcaccctgcaagcttcccacgcctggaagtggtgtgtttttgatgggaacgtcaggccagaggtctcccagcagcccccagctcggagccgcgctggcagctcccaggccttctcctggagcccgctccctctcctgggggccctgtgagcatctgagcctataaatctctcctgctctgggcctaggattcacaaggctgccaggaaagcctgcctctctccctgaagtagtggatcaacacagcccatctgtctgtccatctcaaaatctttccttaagatagtggaggttgtctgggccggtcccaggaggttctctctgtctgggttctaatcacagggtacctggttcttctatccttcaccctcttttaaaaaatcactttttagtactttgggaggctgaggcgggcggatcacctgaggtcaggagttcgagaccagcctggccaacatggtgaaaccccgtctctacaaaaaatagaaaaattagccaggcgtggtggcacgcacctgtagtcccagctactcggggggccgaggtggaagaattgcttgaaaccaggaggcagaggttgcagtgagccaagatcgagccactgcactccagcctgggtgacagagcgagactccatttcagaaaaaaaaaaaaaattaaactggtttcccattttgctctgtcctcgagtgaatttctccccctgggtggaagctaaaggcacgggtatctgtctgtctccagagtataatggagagattaaagtttgattgcttttttcctgctttttttttctttgagatggggtcttgctctgttgcccaggctggagtgcagtggcaaaatctcaactcactgcaacctccacctcctgggttcaagtgattctcctgccttagcctcccgagtagctgggactacaggtgcctgccgccatgcctggctaattttttgtatttttagtagagatgggtttcaccatgttgcccaggctggtctcgaactcctgacctcaggtgatccacccacgtgctgggattacaggtgtgagccaccacgcccggcctcctttctcttataaatagggacaccattgatttaggtctcactccaagccaggatgacctcatctcaacatccttcccttaattacatctgcaagacccttattctaaataaaatcacaggtgggatacagtggctcacgcctgtaatcccagcactttgggaggctgaggcaggtgggtcacttgagcccaagagtgtgaaaccagcctgggcaacatagcaagacccaatctctacaaaaaatacaaaaattagccgggcatgctggcatgtgcctatagtcccagctacaggggaggccgaagagggaggattgcttgagcctgggaggttgaggttgcagtgagctgagatcacgccactgtacacccacctgggcgacaaagtgagaccccatctcaatcaattggttagtcaataacatcgcagtctgaggttctgagtgaacatagcttttgggagtcacagttcaacccaccctagtgaccttgggcaagttgcctcacttctgaacctcactctccttatttgtaaaatggaggcaatgccagtgcccaccccaggagctgctgagagaattcagtgggtcacttcaacacagaagttcagcatacgcctgcagtgcagtgagtgctcgggagatcggagctgttagtgggatcctaatgcggtggctctttcttttctgtctttttttagctttgtggtcatgatggtttcataaagaacaataccgactctttttctattgaccatttttggtgggatgaggaaaagattgtatgtgttcatagcacaaacataaccaggatagaagtagaatgggtgaaagtaggtcttcctcctgtcccttttctcaatacttcaggctcaggcctgtttgttggttttttttgtttgttttgttttgtttttggagtctcgctctgttgcccaggctggagtgtagtggcatgatctcacctcactgcaacctccacctcctgggttgaagtgattctcctgcctcagcctccggagtaccttggattacaggtgcatgctaccatgcccagctaatttttgtatttttagtagagacagcgtttcaccatgttggccaggctggtcttgaactcctgacctcaagtgatctgcccgcctcagccttccgaagtgctgggattacaagtgtgagccaccgcacccatcccaggtctgtttttagagatagggtctcactccattgcccaggctggagtgcagtggtgtaatcacagctcactgcaaccttgaactccttggctcaagggatcctactgtctcagcctcccaagtagctgggacaaggggtatgtctatcacacatagctaattaaaaaaaaatttttttttgtagagactgggtcttgctatgttgtccaggctggtctggaactcctggcctcaagtgatcctcccatctcagcctcccaaagtgttgagattacaggcatgaaccactgcatcctacctatatatctgtctttttaaaacacaaaaggtataacactatgctacctcatcttttatttttagcttaatatattttggatatttttctgtgtccatccacaaagctctgcctggttcttttcaatggctgcctattttatttatgtatttatatcttatttgtttttgaaacagagtcttgctctgttgcccagcctggcatgcagtggcacgatctcggctcactgcaacgtccgcctcctgagttcaagcaattttcctgcctcagccttctgagtagctgggattacaagcgtgtgccatgacacccaactaatttttgtatttttagtggagatggggtttcaccatgttagccaggctggtctggaactcctgaactcaagtgatccaccctccttggcctcccaaagtggtgagattacaggcatgagccactgcgcccggcctgcctatttttaaatgtgccattatataaacacaccagaattgaaaccccagagctgactagtctttaggccttttgtcttgaggatttcgttcaaccaggccacccaaacatccatctataatccgagggaagagagagagaactgattggagttgggcatagaatctgaggaacgtgcccacatccaatcagttctctcttaagattacagatggaagaaagagtcatctctttcaccttgccttcttcagtcccatccatcctcccattcatattcccatccatccatccatccatccatccatccatccatccatccatccaactcatttaccggcctatacactctgtcctccctcccattcacccacccatccactctctcatccactcactcatccttccctcctccgtccaaccatccgtccaaccagctatatacccacccatctacccatctacacacccttccctcctttcttctttctttcttcctatctatccatccatccttccttctttccatccatctattcgtccacctacccacccacccactcatccatttgtcttcctgtctctctacctgtccatctatccatccttccatccagccatctgtctgcctattcacccagcctcccatccatttatcctcccgtccatttacctatccatccattcttccatccacccatcctttcttccttccttctttcctttcttccttccttccactcacttgcccatccacctcttcttccatcctcccatccatctactcatctatccatccattttcccacccatctgcccatccacccacccacctactcacctactcatctgcttatccaccctcccgtccatctgtctattcatccacccacccacccatccatctacctacccatctacccacccttccattcacccatctacccttccttcctttcttccttccttccgtccactcatcttcccatccatctactcatccatccctcaatccatccatctaacaagcataattcagcacctaccatctatgtgccagtactagagatacaatgtaaaaccaagcctaggagatttttgatgaaatgaagcttgtgagagctgagcactgaactagtaggactgaagccagggagtggatttaagaaatgcttgccactgtggcattgtctaccagcagatatgatgctgggatttctacattgttaggtgaccattgaacgtattggtaactgttctcagatctctctttgggaaggaaatgggtcttcagagcctggctccacctcagaggcctctttaagagtagaaggtgatggataatgtctgcttaatcacatctagttctttgatgacctctgtatcttttgggtttctctggtggtaaacaagagagactgactctgtcatctagtagaggaaagggatttgtaggggagtatggaggagctcacagttgcagtgggaacactaggaatcaggctaggtaaatgacagaaactgggctgcttgggcccaggggcagaaaggaagtctgcctcagggctctgtccacctgctgtgcttccctgtccttgactgagcttggagttttaggccagagagtctgaccaatgcagcctggaacacattcttacctctttgttgaaggtacttatgaggcagtcccactaagactgtacatgacggtaggggtgatgggggaaacctcaaggaccacaggatgcttctggaagaagaggaaatggatgctggatttacaaaaaaacacaaatgtgcacaatactatattacagatgaaggaactgaggcatggagtttaagaatatttgcccaaggccacagagcggagaagtggctaagggggaccccaatctgtatagatccaacatctgcgtttggtccctaacctaatctgggtggggtgggcctcccgggacacctccagagctgatgtggctggatgctaatgactcctggatcagtcaggctccagcatctttctggggctgcctctgggactttggggctgcccttttggctttggtcgtggcccctgtagcctgggcaatgagcccagctgacctgttgtcacttccaatgaggccagcatggagaagctttagaatgggagggccctgggaggagccaagtccagacccttagctcagagctcattttaattcatggctcttttttcttctttctgtttgcagatcgggaggaccagtccattctatgcacgtaagtggaactgctttttcttctgttttttttttgtttttttttttttttaatctgtagtcgagatccaacctatgaaagaaaagatccatgagtgcagagatctttgatttgttcatggttccaagtgcctctctttatacctggcaccatgtagatgctcactaaacatttgtgatatatggtcttctgcggaggcaggcaaacttaaactcttaatgacacctgctatcatttggttccatacctctcctccttctaaaaaactagcatttattgaacatgtactctgtgccaggacttgaactaaagattttatatgcagaatcttatctaattgcataacagccatctgtgttgatagggaagatgttaaactgtcactttagtatttcacatttatcaagccacaaacacatcagtgccatatttggtgattggtatcactgtttctttgaagacctaggtacataggcagaagatagtaactcaattttagaatcattgagagagttttcactattgtatttatatgcaagtaacatatattaatatatattgttgattcattgacattgaactcacagccagcagctctgtggctgatgcctggatgaagtttatctgatgtgtatttattacataatgggtatcacaactttattgtgcttggaaacatgagccaacacttgagcactatgctggggacatttttgtatgtgtgctgccgaagggagcacatctgaggggacattttaaactgcaaaataactaacaaaaagccacaaaaatacaaaaaaaggtggcactaaatacactacagaaaggacacttgtttacagtatgagagttgaaactagaaggtagagcattcccctgttcaacctgagctgggaacgtgtgcattgggggaatcgaattttccttactctgcacatgttcacaaatgactacaaaagtgccatgaatattgattttggggttacaaataactttcagcaggtcggtgaatttgaaaatatagaatatataaataatgaggatagactgtgcatatatatatttacataatatataatatgtattatatttaatatatttatatttatatatatatatatttgaaggtctggaagcaactaaagctataatcaacagaggttatttaaataaaatatagcatttccaggtagccactacaaagagtgaggctgatctatttatgctgagagagaacgctctttatagataataccgttgagtggaaaacacaggggcaaaccagcatatgcataatgtaaccgtgtgtgtctttaaaaagagcaggattgcatggacgtgcatatgtttcctatttgcatgaaattatctggaaggacaattaaaaactagtaattagaatttcagatggtgatggatggtaggatggcaatgaactgtattgagagaagattgaaacaattaataagtttggggttgatatagatagaaaacctggaaacaataaaacaaaggcaattataaactccaggaaaaaacaaaagttgggatggaaggagaagtaatcacattggactaaggagcccagctgtgcaagtttggagtatttatctaaccagaataactccctgtgatggacttggctctgtggggaaagggaagaggattagatgggaactgaattctcatattccatggtaggatgtacacatttgatgtttgacaatgaatagtctggatctagagatataatgctacctagctatgaggatataaatgctaaaacaacctgccgacttggtttcctagttttctggcttctaggggtcacctgcattccttggctcatggtctcttcctccatctttaaatcctgcagcatggtatcttcaaatctctttctctggtccccctacctctctcttataaggcccagtacctttgtggttatattagccccacctagatgatccaagacagtctcctcatctcaagcaaacatattcacagattctgaggataggccatggacattcttgtgggggctgtttttcagctagccacagaggcatttgatcccctaggagccaaacccatgtgtgagccacatgtcatctccccaggaaccaaaatagtgtagctcaactgccctctgttgagtgaatgaattaagtgtggtaacagagaggtgcaggaaagagtaggactttcagatggcttcctagctatgtagctatgcacgggtcacttgacctctctgagctgagcttatggagaggctgtgaagatgaagaagaggccaccctgctctcatttccagcacccatgccatcagcaggtgctgtttcatctaaaacggtgctatccaaaagaactttgtgatgagcacaaagttcacttaaaagttcacttaattgagctcttaaaaagtggcaagtatattgcagaactgaatttttaagattttagttaatttagatagcggttcctgccttggacggtatgatgctgaaatatttctcatctctgtccattcctctgactccaccgcctcttcctagttcagggtcccgtcacctctcaccagggcctctgtagcagtctcttaagctccctgctcccattgcttgcttgcttccttcctttaataaatatacattataagaatattcactcattattcattgaataaatattcattagcatgctgtcataaagtgtggattccagaacctaaccccttgggtttgaattctggccccatcatcgtctagttagttgtatgctccaggaaataagtcagttcacttctctgagcctcagtttccccatctgtaaaatgggaacaataagcaccccattgggttgttggaaggatgaaatgagtcactacatgtgaagaactgagaaacaggccactgccccatggtgagcactttgtaaggatcagctgctattgtagtgaaagtgctcactattttttaaaaatccttcctgcaatccagtatccatcttgcagtttgtttgtttgtttgtttgtttgtttttgagatggagttttgctctcattgcccaggctagagtgcaatggcgtgatcttggctcacagcaacctccacctcccaggttcaagtgattctcctgcctcagcctcccgagtagctgggataacaggcatgtaccaccatgcctggctaattttgtatttttagtagagacagggttttgtcatgttggtcaggctggtctcgaactcctgacctcaggtgacccggggagcctcggcctcccaagtgctgggattacaggcatgagccgctgagcctggcccatcctgcagtttgttgttgttgttgatttttttgttgagacagagtctcactctgttgcccaggctggagtgcagtggtgcgatcttggctcactgcaacccccgcctcctgggttcaagcaattctcctgcctcagcttcccgagtattatgccatcatgcccagctaatttttgtattgttaatagagatgggttttctccatgttggccagcctggtctcaaactcctgatctcaggtgatccacccacctcagtcagcctcccaaagtgctgggattacaggcatgagccacttcgcccagcccatcctgcagttctgattctccccacactggttctaaagtcccgttcccctcgtgaaatggtttcctgcacccatgagaataaaactcagattccttactgtgacttggaagactgagtgtgatctgctcttccctcttcacttcctgctgtcctcctctgttgtggccctccagccatgctgggagccattctgtctcatacctgggcccagcatttccctcccttggacctctgtccatactgtttgccctgcctggcccacccttccctccatccttcccacagggctctcttgtaactttcaaggctcagcaactccctggcttccccatccacagcctcccctctcctcccttcccctcgatcttctcagtcacatcacccagatgtagcaatgatatctccaccacgaactatcttgattatttgtttacttggctattgtgtatctccatctcctggaatgcagcgttagcaaggacttggcacactgcccacacacagccagtgctggagaaggaggccttagccattgttaggaaggaaatcccaaaacgatcagacttttatttgcaaatgcatccagtcagcccagaaccaccaacatcttcagtctctgtattcaattttattttgcttgttgtgaaattcagccaaagtgacttgaaggacctacaagttgacagcagggctgagcttttacgcgtagttggtgcttaagagaagccaggctggagccaactgtttggttatgcagttaagaaactgaaaattggccgcgcactgtggctcaggcctgtaatcccagcactttgggaggccgaggcgggcggatcacgaggtcaggagttcgagaccatcctggctaacacggtgaaaccccatctctactaaaaaaatacaaaaaaattagctgggcatggtggcgggtgcctgtagtcccagctattcaggaggctgaggcaggagaatggtgtgaacctggggggcggggcttgcagttagcagagatcgcaccactgcactccagcctgggtgacagagcgagactctgtctcaaaaaaaaaaaaaaaagaaaagaaaagaaactgaaaattggccacgcaccgtggctcacgcctgtaatcccagcactttgggaggccgaggcgggtggatcacgaggtcaggagttcgagaccatcctggctaacacggtgaaaccccatctctactaaaaaaaatacaaaaaaattagccgggcatggtggcgggtgcctgtagtcccagctattcaggaggctgaggcaggagaatggcgtgaacctggggggcggagcttgcagtgagctgagatcacgccagtgcactccagcctgggtgacagagcgagactctgtctcaaaaaaaaaaaaaaaaaaaaaagaaaagaaaagaaactgaaaattggctgggtgtggtggcttatgcctggaaactcagggccttgagaggccgaggcgggagggtggctggaagccagaagtttgagaccaaactgaggaacacagtaagaccccattactacaaaaaatttaaaaattagctaggtgggatggtgcatgcctgtagtcccagctactcaggaggttggggagggaggatcacttgagcttgggagttagaggctaagtgagctatgatggcaccactgcacctcagcctgggcaacagagcaagacccagagacaggaaggaaggaaaggaagggaaggaagacaagaaaggaaggaaactgaaagctgaataaatgtaatttttaggcctgagttgtattttgtctagcatgtaatccatccagtataatcagtttaattagaggccatgggcctggctggagatagagctgtgtgatcagggggctaaagtaagaggaggagggtggtttcacataaaattagagagaggtaagggggtgcttccaggccctggggaggagtttaaactttcgtctaaaatggatgacaggctgggcatggtggctcatgcctgtaatcctagcacttcgggaggccaaggcaggctgatcgcttgagctcaggagttcaagaccagcctggccaacatggccaaaccccctctctacaaaaacaaaaattagctgagcgtgatggcatgtgcctgtagtcccagctacttaggaggatgaggcaggaggatctcggttcactgagcctgggaggcagaaagttggcactgagccaagactgcaccactgcacttcagcctgggtgacacagtgagaccccatctcaaaaaatatatataacaataaaataaataaatgaaatggatgagaacgtgctaagggactcaagccaaggaaggacaaagtttaaccagtgggtcaaatcaggcccttgtctgtctgttccagataaagttttattgaaacacagccgcacccacttgtttacgtatttgcttttgtgctgcagtggagagctgagcagatgtgacaaagaatgcgtgaccctcaaagtctaaaatatttactgtctgaccttttacaaaaagagtttgctaactcctagcttaaacagtgggaaaatgtgaatattatttatattgtaatgataggatgaatgctgaaaatcattatacaaacaatatataacttctgtggaagcagtggttataaaagtaataataggtgggcacagtggctcacacctgtaatcccaacactttagggggccgaggcaggaggattgcctgaggcctggagttcaagactatcctgggcaacttagcgagaccccacaaaatcaaaaaattagctaggtgtagtggcacatgcctgtcatcccagctactcaggaggctgaggtgggagggtcacttgaacccaggagttcgagattgcagtgagtcaagattgtgccactgcactccggcctgagcaagaagcaaaactctgtctcaaaaaacaaaagtaataataactaacattttggcataccaggcattgttctaagcattttatataaatgttcactcatttaatcctcataagaatcatataaaaggtcaggcatggtggctcatgcctgtagtcccagcactttgggaggctgaggctagagatcacttgagaccaggagttcgagaccagcttgagcaacatagcgagacccctgtctctacagaaaatttaaaaatcagccagctgtggtggtgtgcacctgtagtcccagctacctgggagattggggcaggagtatcacttgagcctaggaattctcagctgcagtgagctatgattgcatcactgcactccagcctgggccacagagtgagatcttgtctcaaaaaaaaaaaaaaaaaaatcatacaaggtaagtgtttttattatacccattttataatggggtaaagaaactgaggtatggagaggctaaatgacttgcctaaggtcacccaggtaactggcagaggagggatttgaacttgagcaacctggtcctggagcccattatgctattctgccaattgatgctataggggagagaggcgttgcttctgcctggggttttgcaggacgtgtaggagttgtacagtacaaaatgccagggtgctttgccagtcacataaagaccagggactgaatagctgtgaggttcatcagagacaatttggctttcctaccagtggcaaaccacaggctgcaatggacttggcaatattcgaccctgggagccaggaccagctgcagaatttgtagaattttgcaaaatgaaaatgctggctgagtgcagtgactcacacctggaatcccagcactttgggaggctgaggcgggcagatcacatgaggtcaggagttcgaggccagcctcgccaacatggtgaaatcccatctctactaaaaatataaaaattacccaggcatagtggcgggcacctgtagttccagctacttgggaggttgaggcaggagaatcacttgaacctgggaggtagaggttgcagtgagccgccatcacacactgcactccagcctgggcaatagagcaagagtcagtctcaaaaaaaaaaaaaaaaaaagaaaagaaaaaaaatgcagagcgtttataaagaattaggaagaatttccagatggcaacattagagtatgaagcacagggtggtccctgtgagacggtacaggtcacactcatgaagccagcctggctgggggattaagtggccattgggtggttcttcccagctgctggggctggactgattaaaaggacttggcactggggtagttacaaggccaggaggccataacgtggtcatgagtctggtccttctccgggaagagggagctcagtaccaaattccccaagaaataagaaaggagtttagggtgctcagaccaggaaggcatcttcacccctagaggtcaggggtcagaaaagccaagctatgaatgtttctagaaccagctctaagcacatcaaccttcagacgcccacgagcctggagcttgggatgttttctttggcagaacctcccagggcaatttatttttctcaacagaacttggaaacagtggagcccagcagcaacatgggaaggggtagatgcccagagtttatgtcccactccccatcccaggcaaagtgggagaccatagccacggatagggcacattgatgtctttgtttttttttttgtctgtctgtttgtttgtttgtttgtttgttttttgagatggagtctcattctattgcccaggctggagtgcagtggcacgagctcagctcactgtaatctccgcctcctgggttcaagggattctcctgcctcagctccccaagtagctgggactacaggcacccaccaccatgcccagctactttttgtatttttagtagagacagggtttcaccatgttggccaggctggtcttgaactcctgacctcaagtgatccacccgcctcagcctcccaaagtaccgggatgacaggcgtgagccaccacacccggtgatgtctttgttgtaaaagggaggaggtgagagaggttcaaggccagggtggaaaggaaggaactattgtgggaaaggagaagtgagcagcagcagtctaggagcactggtttgtcagcatgaagagtgtgatccacacatgttgtttgtgcacactgctgtcctgattcttgtcttggatctgaataggttcatgaccacctacgcaagtggtttcctacatccaaaaatttctctcctttctcttgctttaatcagaatccaaccccttcactttagaatgaagtcaagcaaggttctgacgttagcctgattgaagtaattcatacttaggtgtgaatgactgagtggcttggttcattgattggggcaagtaaagcctcctggaatatatggcagaattccagtggagtggggctgggacttcactctgtcttttctctttgctgatttgttaaaataaaagggtaggaggcagaacatgggccctggtgtcaagtggacctacgttcaaatcctgcttctcctccatttcctatctgtgtgaaagcaggagcaattgtgggctggagcaatttacttcaaacctctctttgcctcagtttccccggatgggtgatggggataattaataactctctcattagattgctgggtagagtaaatgaaaagatctgtgagcccaaagcctagtactgtgcaggccttcaacaaatatcaattccccttcccctgcccttcttctggccttagaaagcaagtccctagagggttgggcctgtgtcatggaacaacttggtgaaatgtagtaaaaggaattctgactgcattagaatcagagacctgactttccattctgactgtatcccttctttgctgtgtgacctagggaaaattgcttacccactctgggcaagactcttccttctataataacatggaagcaggaagaggataaaggaaataattcatgtagagcatttagcaaagggacccttccccctatatccccccaatgacaaacgccaattcttctctgtcttaagagatgggatcttgctatgttgcccaggcttctctcaaactcctggcctcaaggcatcctcccaactcagcctcctgagtagctgctattataaacgtggccagttctctgctgcacctggccagttctcctcttttacacacacacacacacacacacacacacacacacacacacacatatattctggtcttagtttccccttctggggaaatggggtaatgccttcatggtccccatttcataaactgcctctgaggccatgtgaaataatgtggccattgggaaggaaggcctctaggaagggaagggaccacacaaagtcaccgcaagatgtttcatcattcttggccatcagacacttgatttctggacagtgggacctgtaggattaggcacagcaatttggggcactttttttttctttctctttcttttttcttttcttctatttcttttttaagccatgagccaagttattaatgggcctttggcagagaaaattaatttctttatttcctaattaggaagaagagcagagactgtactagctttggtggcactggttcagcacagagaaccttgggctgacctcggggtgaacaaattcttttttcaacttaaaaaaaaaactctcttatattttagagtattaagtgagctcagaaaataaaagagataaggcaaagaaaggaaacacaaaaaacaaaagtaaactgaaaaatagaagaagacgataaacaagtgaagttttggtcaaggcactgtccttatctttcactaggagtggtggaacatagaggcagtatctggatggagcggttccattgtgatgatttctggtggccaaaacaggcagctagtgcacgaaagccatcttggtaaaaaaaaaaaaaaaaaagatctaccttcatattccaggaggacatacttttttgatacgacaaaccatgtcgtgctgatctaaacatatcagtcatttacactttagtgtgaattacttcaactgggtttattcttagatacttggctgagatcatcagccagcttcctgatacatggggtgggattcctcagaggataaaggggcttgcatctgcccagtgaccaatgggataaccggttttttggtaaatttttctttccataagggagcttcttaaactttaggtcctggtactccagaggcacttacatcctttcttgaaggctgccttgtgcctggtctttccatttctagcaatgctaatgatgtctgcaggcggatcacgaggtcaggagatcgagaccatcctggctaacatggtgaaaccccgtctctactaaaaatacaaaaaattagccgagtgtgctggtgggtgcctgtagtcccagctacttgggaggctgaggcaggagaaccagggaggtggagcttgcagtgagctgaaattgtgccactgtactccagcctggggacagagtgagactccatctcaaaaaaaaaaaaaaaaaaaagtagataattccaaataaacctgtttggacctatgtaagaaaactaaggttttcttgttcactctatttttttagagatgaggtcttgctctgtcacccaggctggagtgcagtggtgtgatcatggctcactgtggcctcaaactcctgggctcaagccatcctcccacctcagcctcctgagtagctgggactacaggcatgcaccaccaagcctggttaatttttcttattttttatagagtcagggttgtgctgtgttgctcaggctggtcttgaactcctggactcgagtgatcctcctgcctcaacttcccaaatagctgggactacaggcatgtgccaccatgcctggctaatttttaaatctttttctagaggcagtgtctctctgtgttgctgagctggtctcacactcctgggctcaaatgatcctcccacctcagcctccccaagtgctgggatcacaggcatgagccaccacatccggcccaccttttcactctttgtatctgaattcttttctatgtcctcttggaaggaatagattgggcattggacctaggctggggacccagttccgctcactaccagagatgtggccttgggcaagttacttcccctctgggagcctctgtttcaccctctgggaaatggtggtgatgatcattattgtcctgcctggctcatggaactgcggaaaggtcaccatggaacgtgtgcatagatgatgttcccgtgtctttcagaggcgagtctggagccgggaaaaccgaaaacaccaagaaggtcattcagtacctggccgtggtggcctcctcccacaagggcaagaaagacacaagtatcacggtgagtggcagttcccaatcagaggccatgatttagccaaccggtctccagcttgcagcccaaccgagatacaaacagaacatcattgcaagaactcaggccccatctgactacccctcccctgaagactcaaagagggaccgtctttttggcgagcaggcctgttgagtgtgggtgatttcttggctcagctagaagcatccctccagaagggggcccgttttgtgaaatgagaataagccctttccttccatagcgagatcttcctccacgtcggggcttctcagtggtggcactgatgtcattttggaccagataactcttccttggaggggcttccctgtggctcgtagaatgtttcacaacatccctggcctcgacccgccagatgccgacagcccccttccctccagttgtgacaaccaaaaatatctctagacattgtcagatgttccctggggtgggacagttgcccttgattgagaagcactcctttcatgaatctctgtaacgtcccaggggttaaggtaccttttgggttcccggattcctccacgtgtccccctgtccctgggatggagatgctggtatcactcggcccgtgggcttcagtgcaatgccattcagtaactgtggattgagcacctactgtatgccaggaaccacttggggtggggacctggggataagtctgagagatgctgttattctcttctctgagcttccagacctgtggaagagcatgtagttgtcaaagaatccctcaaataaacagatgatgacacggtatgactaagagcttgggaggaaaagaagagcaggtttctagagtcatcacctctagggcccatccttctcttcctcctcgtgtgtcagccctgccccatctatcccacaggagggggcacgtggtagggccgctaggactggccggtgcctccgtctgcaggtttgtgggtgggaagatggtaggatggagatctgaccacggcatggggtgtctccagtgttcgccattccagatgtcactttgcgtcctcagaggggactctggggcagccaccatggccggcttgtctggaggcccttggagatctaggatgggcgctggtcgtggctttggagaactttccttctccaaacaaatgcaggaaactcaagattcagcatcctagaattgtctctggcaagttggtttccagccatagtgagtgggaacaatggccccagaggctgtgtggcagtttaaacacagtttccactgccttccctttccctaaagagtaaacacaggagataatactttctaacaactcatcgttatcaagggcctactatgtgctgcttgttttggctgcatgcgtaaacacatctcagacattgtctcactggatactgttttaaggagcctaatgtggccccagtaattatgaaaacctttgaaatgtctggatctctaagaaattagaaaaaggagggaatggctgagcatgggggctcatgcctgtaatctgtgttttgggaggccaaggtgggaggatggtctgagcccaggagttcaggaccagcctgggtgacatagtgagaccctgtctgtaccaaaaaaaaaaaaaaaaaaaaatcaagagaattagctgggcctggtgtgcatgcctgtagtcttagctacttgggaggctgaggcaggaggattgcctgagcccagtaggttgagactgcagtgagctgtgatcgtattcctgcagctaaacagagagaaaagaaacagtatcaaggaaaaggagctgaccagtctgtctgggagactccaggctgtttggggggatcaaagtcatatattctccagcccctgatgtccatgtgatggaaataacgctgacatttgttttatactgtgttgttcaaccacagcaaggcccatcttttgcctacgtgagtaactgagagtgttttcctggtgtgtaggggaggcacggagtgaacttagatctgcatgatcctcttgcacccaccgagtcccgtagctggtggtagaaatggggtaggccctagagtttcacaacttaaatcagtaaatgcaccaaaataccatcctgtgggtgtctgatgccagggaagggtgtgggggtgcatttaccacccacgggacgcctattggagtccccagggttgcgctccagcctgaaatggatttctccggttcagaatgaacccctgcacccttcaaagcatccgctcctggtacccttgactggaacaacctagacagagatgtctgtcccatctggctgagtgttttaggactgtcaggccccaaagcttccctggctcgatggacagtcgatggcacagctgtggcatgcctccctcttctctccctgccatcatccctaagtgtcttccctcagccctgtccctggtgcaccagtgtgtccctgtgcatgcgtgtgcagtgcgtgtctgtctcttgcatgctggttgcttgactcaagcctccagaaacagtcttggaggtcgcgatgcactagctttggtggcgcggtaaggccccagctacgcaacgcataacctggtcctgcttggacctgtgcatatgtaaactcatctctaacacagagcttggggggctgatgtgtgggtcccagcctagaagaaacccacaggtgtcttccttggctcccgaaaagatcattcaatccatcttagttagaccctgggtgactgtgttgcagatcagaaggagaattacagttcttatttgggatctgcttttgtgtgaccttggccgagtcagttaactcctcggggctatggtttcatcatctataaaattgagggtttgaaccaggtcccccgatttaaagctctcttgccaagacttttcaaccttacctgccagaatccccattctagaaagggagcctttttcagagagcatggagaccccaagtttatgtgaacaaaagtgattcctttagtcgtcttcccaccaacaaagaaatgcccgtggtgctccttgtaaatttccaccagtctcagctgtggtgattccacttgtagctgagatttgtatgcggatgaggcttttgcttcatctttctctgggagctacaaaaaggaggatgtgtggacaaatcaaaacagaaacaaatagcagcttcctgctttgtcctgtagaccaggtaccctgatgccttcctagcatgcggaggaatgaggaggaagccatgcccatccttgtcccctctagacactttcccggctcctgtccagcccagccctgatgcctggaaaaataaggaagggaaagcaggaggggaggacaaggagaaaaactcccagaatccagggcctggaggcctcggggcccaactgcagccgccatgttttagggctaggccaagagcagctcgtttgctttcccagcttaacttaccacattggccctttcctgccatgattaatcacgtgaccgcgtttgtgcaaaggcatcccggcagagggggccggtgggctgtgtacagtctcagcttcctttaacccaatgaatggagctcaggcaacctgctttgaagctttattccgcagtccgctaagaggattcctggtgggttttgtgcattccttacttgtctgctgtagaagacttcagaaaaccagtcctgagaaagaaaaaattgcaacttaaaaaaaattgcactaaaataattagaaggaggcttgtagtggtttaacttgaagaaggctgcttgttaaacatgaacagcagcacgactgccatgtacagtgggacaggtggtgcactgcacaactccggggggcaccattcatcatgatgtaaatgacatcaccgacattgtgcaaggcagtggctttgagtggcagtgatgttgcacagatgagcaggccctggtcttgaaaaaagtgaccttcctagggagcagatgtcctagctattagagagctcagacagttgcttctcttctgaaatcctcctgtaaatctgaacattagcatcagggtctaagaggaggtaggagataggagagaacctgtgggttaagggcagagttttgtgacaacatccatccaaggtagaactgtcaggacctaggttgctttctccaataactagatgtgaatgaattttagggagagctggaaaagcagcttctacaagcaaacccgattctggaggctttcggcaacgccaaaacagtgaagaacgacaactcctcacgattcgtaagtagcaaagccacatggattttccagaaaagctttggtgtcatctcctgcctggggctgcagagtgtttgcgtgcagaggtgggaggggcatctgaccctggagagatgggctgtatctcacaatcttgcaagggctcctgcctctcactctctcattcattcattaatttattcactattcactcaacaaatattgattggcctggtgcggtggctcacacctgtaatcccagcactttgggaggctgaggtgggaggatcacttgagcccaggggttctagaccagcctgggcaacaaagcgagatcccatctctattattaaaataaaatttaaaaaattaggtattgagcacctggtatgggctagacccttatatccgataccattttatgtaacaaaacatgaattgagtgccaactgtgtaccaggcacacacctcctccaagaaatacttagtaagtacctactgtgtacaattactctggtaggcacttttacatgtaccaccattctctttgtttttttctcatttgctgtttttattaagtgcctactgtataccaggcactcagcgagtctcacaggattgcgatgaatagttcagatatggttccagccttcatgaagctggttcttccaactgaataacagagagtaagtgaggcagggggtactaccttcccatgcacactcccccaggctccaaagcaaaaagtttttgcctgagcccaacagggcaggggaactctgaaagtggatggttgatgataggtagacaacaatggttttattgtgcaaaagaagcggttgtctccgtaggagggtcagaaagatattttagtgagaaaagatgaaggaaaaattgcctctgcattccaggagaagggggtctctgaactgttgctcgctgagatggggccctgtgaaagactctttgcagaaagctctgctctgctgagcaaatgcacatggtggtccctgaccctgtgatccccaaggcccattttagtaacaaacaattacataatgtctcctttcctcgcccgaaattagaatcatagatagtatcacctcctacacgtattagatgaatacacatcagcataatgccctaactggaatatgaagaagaaataacataagacaattcataatgaaagtgtgcatttcaggccaggcgaggtggctcatgcccgtagtcccagtactttgggagactgaggcgggcagatcacttgagctcaagagtttgagaccagcctgggcaacatggggaaaccccatctctacaaaaataaataaataaagtgcatttcagcatatcaatgctcgggccaggccacaccaacagaagacacagtaagagacagacacttaggtctatccacggcgacagctacaaatacaaggaaaagggtcaagttcaggcactgatgatgttggcatgggattttccagaatggcaactgactctcagtgaagcgctgaaccaaagaacaatcttctctagagtcacacagatgggatattcttgtattagaacaacattttaaacacttgttaatgctttcatttaaaagcataaaaatctagaccaggcacagagtggctcacacctgtaaacccagcaccttgggaggctgagttgggaagatcacctgaggtcaggagtttgagaccagcctggctaacatggtgaaaccctgtctctactaaaaatacaaaaattagctgggcgcagtgacacatgcctgtattcccagctactcgggaggctgaggtgggagaattccttgaacccggggagatggaggttgcagtgagccaaagtcacaccactgcactccaacctgggcgacagagtgaggctcttgtctcaaaaaaaaaaaaaaaaaaaaaaaagcgtaaaaatctaaagtcataaaggttaggttctaagcctggctaattacaaacagatttttacctccatgagtggcaggtgagacattggaagagtcataagggatatagacaaggattggcatcagagactctccaggtcattgcaggactcccaaaatatccttggccccactgttcactaacaacagcggcccccccccaacatgtgacaagccaaataatggcttccaccgatttccaaaatctccatagcagatgtgccgcctccactgagaagcactgcgtttgcatgttccaattctgtgcaatgtttctagcctgtcataaatggaagcacgtgcaagacaaatccctaaaaacatcctccactcactggcgtccctgccatcttgggaaggagagtgaagaaggtgcctgggccttgcctgtgaccagccggctctccctggctccatctgggatatggtcatcccaaatcactctactgcatgtttcccaatggggaaagtttgaaggttttgtcaaggactgagcaagcctaggggattgtgtccacacacgccaacacttcccaccatgttatgtcatgatgggggaaaaggatgaaatcctgtctcacctgttgaggaaacaggaaaagggttcatgccaacagatggaggattgggttccatccttggtttcatggcttagctgaggcaggtagatagggccatctttggagatacttgttgagcctctagggccaggaacatgagccattcctgcctaaaggacatcctacacagggcctgcttgggcagtgtggccaatgcatactcacctgtcccacagaaaaggtttaatccatagttggatgatgtggatgttttggagcagggtggggtctggggagggagccctctagcccctgaatatggaaaaaccttctttctgcttagggccctacctctcaggagcaacgtcacgttggacaagtcacttgatctcttttagccttagttttcccagctttaaaatggggatagtgggctgggtgtggtagtttactcctgtaatcccagcactttgggaggctgaggtgggaggattgcttgagtgcagcagtctgaggccaacctggacaacacagtgagatcctatctctacaaaaaaaaatttaaaaattagccagatatggtggtgcatgcctgtagtcctagctgcttgggagggtgaggtcatggggaaaaggggattgcttgagcccaggagttcaaggttacagtgagctgtgattgcaccactgcactccagccctcgctgacagagcaaaaccttgtctctaataaataaataagtttttttaaatagggatagccatgatggactacggtcattgcaaaagccgaatgaaattgatctgtgaacatgttttacacgttctgttgctgtcaggcctggggtggtttcagctcagcagatgttggttccgcctgacaacttgacctgtggggttctgagtgttcgcaagaatctccccgccccacctcccatcctctgtaccatctgcctcctgcttgcccacagcatggggttaacggctgaagttgggcagcaaagcctgaactgtgttttcctgttggcagggcaaattcatccgcatcaacttcgacgtcacgggttacatcgtgggagccaacattgagacctgtatcctttccctgagcctgggccaaatgggtacccctgccccctaccaatctcctgcccagaggctgggagagtccaagagccacctctatctttccagcctcttaggtttcttccagaacaaatctccccttaacagcaggcattgtggtgcagtggttatacatgtgtggaccggacccctggtttgaaccctaaacaagcagcctaggctgcatgtgatgctcaaatgatctgtcccttagctgagtgaccttgggctggttactccacctctctgtgcctcatcagcaaaatggggatgataatgaatggtacctgcctcatagaaatgtgagaatagagtgaatgaactcatataaagctctaggcaccatgcgaggtgcagagtaagggctggctacgtagtgtctatcgtatgatcttcacttcatccttattcagccattgtccgaggccaaattctggacctgtcgtcctcttagagagttggtctgtgatcggctccacttcttaggtaggaaattgatgaaaacagagtttacccagaagaatgctggtatcgcaaggaacaagtagagcatctctttcatgaacctgagcggtgaagtggagccaagttagaaatttctggacgtgggggaacaaccaggtctagagttcagtgactgatcagcctcaggagctttgcaggcggccctagggctcaggcttcctgtggaacacgtgcttggcaatgtataggacctgggggcctgacttagcttctttctgcacctgaggtcctctagcagcacctagtggtcccatttttccacgttatgtgccctggataagagggtgggttgtggagtagcttcctctccactgtacttgtctaagctgtggggatttgggaaaatcactgaagctctctgggcctcagttttgcctcggtaaaatgggggtgattgcacctagtttctggagctggtgcaggggttaaatgaaataatatgcataataatatgcacagcccttggtacggtactgggcccaaagtgagcatctcataggtggtggctattgcgttaactcaatgttttctacgtttctactttaatctgcccaaaccagccaggattcccatcctgcagctaggagggctgtcaggcttcggtcaagtccagagccagggccctcttgtcctgcagccctgcacacacctctcagcaattcatttcctgtgtttagagcgagccccaggcatagccccgtccttctggcctcagccttccttttagatcagtggttctcaaagtatgtttccaaaccagcagcatcagcatcacttgggagctctttagaaacacacatctcagccaggcacggtggttcacgcctgtaattccagcactttgggaggccgaggcgggcagaccacttgaggtcaggagttcgagaccacctggccaatatggtgaaaccctgtctctactaaaaatacaaaaattatccaggcgtggtggcatgcacctgtagtcccagctactcaggaggctgaggcaggagaattgcttggatccgggaggcagaggttgcagtgagccaagatcacacactgccctccagcctgggtgacagagcgagactctggctcaaacatacgtgcgtgtgtgtgtgtgtgtgtgtgtgtatgtgtgcgtgtgtatacccatgtacaccatgagaaagtctgagaatcactgctttccagattggacatgggctgtggtagcccgggcactgctagctggctttaggacttgaagaagacaaggtctgctgatctagccccatcatcccgcaccatcatgcttagtgctgtggaaatccacccagtacagtagcccagcctcccagctgccctctcccatcaccccggaccctgtgatctccatgccaccctcacctgccctcccctctgctctccctcctgccaccccgcatcgcggagaagctctcctgaaattaattagtgtggcgtgtttacggtctctctcgcctccatcccgtcagaccccactcttggaacagagggcatggaagacagctttgccacttgttagctgtatcatcttgagaaaggacttctcttctctgagcctcagtttccccttattgaaaacaccgataatagttgcacttatttcctagcatactttgtgaggcttcagtgagacaatttatatcaatcatttcacacaggaatgaatcataaatcataggatcatagatggtgtcattatttgtattctgtcatgtctgaagacagctcattttaaagaagatttgctggtgatggctgttaggggaacatctcgttaccattaccttcttcctggagcctttttatgctttttcttttcactctattcccctcccttttttttgcatctgaagtctgctggcagcacccagcggttccatttgtccataggggcaatggtcaaagttagacattaccgatcccaggggtagaactggaaagtcatcccatgtgaattgggtgtgacagggatggaggtggaagaccagaggaacacccgcagtatccccagaatccctaactccctccaaaccagatctgctagaaaaatcacgggcaattcgccaagccagagacgagaggacattccacatcttttactacatgattgctggagccaaggagaagatgagaagtaagtgactagcaatgacatgtgattggatggcttgagccttccctttcatcagaatccggggttaagggattggctattaaaacagtctcagatcctgccagaaaggaccatgtctgtgagtgacatatgaacagttcttcatctcctcccaatgagtgagtgtggcttgtgttcagtcattctcatttactgagcacctactatgtgacatagtagccatcaactccaattagacattagatcattaatgattcatgtctcattagaccagagagcatcaagtccaactagacacaatctacgccttcaaggaaagggagaaagacatttgccttacttgccaatttataaaacttgcaaatataaaagatgcattctggttttataaggaatttgcaggggcagcaggactaagcatttttcattatacatgttttgccagtgactttgtagaacaggggtcaagactttttctgtaaaaggccagatagtaaatcttcaggctttgcaggccaggtggcttctggcacagctattcaactctgccattgtaatacaagagcagccacaggcaatatataaaccaatgagtgcaggcaacacataaaccagtgagctcaggcaacacataaaccagtgagctcaggcaacacataaaccaatgagcacaggcagtacataaaccaatgagcacaggcagcacataaaccaatgaacataggcaacacataaatcagtgagtgcagatgcatcactgtgttacaataaaactttatttacaaaaacaggcagtgtgcagaagtttgctgacctctgttgtagggaaaagtttttttatgtaaatataatacactgtataccaaactccagtaggaagttatgagttctggacctgcagctgtttactaactcttaaaaatatatacaaatcgcatagcttaaaaaaggaatggatcagtgactatctgtacatagtagagtctacatgttagtaataagttttgagtctgaaattctatgggaacaatacagactttgcttcccatctcttttgtggcccaaggttagttattttggttaagacagttaccaaaaggatctgtgtgagctcagaacttcgctgtgtcggagtgtattgtagacctcagctactagggggtggcattatccattatttaaatttccagggtggggcaaagtggctcatgcctgtaatcccacactttcggaggcagaggcgggcggattacctgaggtcaggagtttgagaccagctcggccaagatagtgaaaccctgtctccccaaaaatacaaaaattagccaggtgtggtggctggcgcctgtcatcccagctacttgggaggctgaggcaggagaatcacttgaacctagaaggtggagtttgcagtgagctaagattgcaccactgcactccagcctaggcgatagagtgagactctgtctcaaacaataaaaataagtttccttaatggctggctttcaggaacataggctatgaggtggagcaatttttggtaaagggggaatgctgaatggattttttatgtaccagcaaacatggtatattagcagttacagtgcaggaccctgtggaatgggccagggaaaaatgttgacattccttttccttttatttggcacccaagaaaacagtttggttgtttggtaccttgggttccagttttgtgctttgcctctggtcttccagaaatgggcaagtatagggctcagaactaaattcccaggggccgtttgtattctagatgatagaactggaaagatgttaggcttttagaaagaaccaaatattgctaaatgcatccaaactcgggataatgaagtcttggcaaagacctcaatcctcgtgacttgaatcaggcatttcaagttaatccaaaagtttgagttaactggtgccttcagtcaatttaacctcgagtttatcaagcagcttccaagtgacttgacccataaaagaccttgattttgaaagaaaaatatcttgctgacgtctctccaaaagtataaccgaatccatcctaattaaagattgatctggaagaggatccttgatgtattggagggtataataaaagcaaatggtgcaggagaaagaaaggcaattataaagttgggggtgggggagaagctgaacaacaacaaaggaaatgtaatcataggatacagtttgacacagaatatctaattaatgtcataaaaagggagttggcaaactgtttttgctaaagggtcagtagtaaacgttttagactttaaggaccagatggcctctgttgcaactactcaactctgttgcctagtgagaaagcagccatgagaaataaacaaggacatcagagcagctgtgtttcaataaaactttatttacaaaaacaacaggggaccagatttgccaacctgtgatataagccttatatattgattcaactaaaaatagctgggggtggctgggcacggtggctcacacctgtaatcccagcactttgggaggctgaggcgggtggatcacctgatgtcaggggttcaagactagactagccaacatgatgaaaccccgtctctactaaaaatacaacaaattacctgggcatggtggtgggtgcctgtaatcccagctactcgagaggcaggagaattgcttgaatccgggaggcagaggttgcagtgagcagccaatatcgcaccactgcactccaacctggacaaaggtgaaactccctctcaaaaaaaaaaaaaaaaatagctggaggaaaggaaaggtagtataagaaagctgcatttttgcctaccatagcaggaagtcactagatactatctaaacttgacatatccagaaatcgcctattacagcgattgtgctttgcctctggtcttccaataggccaaaagcacctgttacttttggcactgaggactggtttcctggaagaaaagttttccacagactgggcgggcagggttggggggatggtgtggggatgattcacgtgtattacatttactgtgcactttattattacattgtaatatacaatgaaataattatactagtcaccataatgtagaatcattgggagcttgttttcctgcagtcccatcggggggtgatgggggacagtgacagattatcaggcattagagtgttataaggagggcacatgtgcagctcacgatagggtttgcgctcctatgagaatctaatgctgctgctgatcttatgggaagcggagctcagacagtgatgcaagcgatgggcagcagctgcaaatagcggataaagcttcacttgctcacctgctgctcacctcctgctgtgtggcccagttcctaacatggaccggtactggtctatggcctatgggttggggaacccttggcctatgatatgtaatacataatggtatatacattataataggctagtatatatagcaagcctattgtacagagagatagtggtaactgccagataaaaagcagctaaaagagataaaagcaggtattatggagtaaggtagagttggagaagggatgtgacaggagaatgctatttttcattataaacctttggtagtaattgatttttaaaactcatgtgcctgtttgaatttgataaaaattttataaatacatgaataaggccaggtgcggtggctcacgtctgtaatcccagaactttgagaggccaaggtgggtggatcacctgaggtcaggagttcaagtctagtgtggtcaacatggtgaaaccccatctctactaaaaatacaaaatttagccgggcgtggtggcgggcgcctgtaatcccagctactcaggaggttgaggcaggagaatcgcttgaacctgggaggcggaggttgcagtgagccgagatcgcgccactgcactcctgcctggacgacagagtgagactccgtctcaaaaaaaaaaaaaaaaaaaaaagagtaaaggttgatctaactcttctgacagctttgtctctgaaggctgaaggcagggtgcctctagacaattgaggtaaaggcatcccttcctccaggtaaatgtaacttcgtgccagggattgtggcttagcaagcagaaccaaggctggatatcagctgcagtcactggagcagtgcacaacctgcaccgctgtgtaaggctggcagtggttggtgaggctgtctacgtgacgatgcgtgagggctttaaacggttcaagccttgataaagggaaaggaattatgatggcccagacccttgaccagatctcggtctcatgttgaaattagaagtatgtcttattgaccctgacctgtcttcctctccttctaggtgacttgcttttggagggcttcaacaactacaccttcctctccaatggctttgtgcccatcccagcagcccaggatgatgagatgttccaggaaaccgtggaggccatggcaatcatgggtttcagcgaggaggagcagctatgtaagcctcacaccttgagtctggagggtagcttgcctggataccagtggaacctgttaagaactcttctctggtcaggacagatttctgctctctgaattccccaccttccattaaaaaaaaaaaaaaaaaaggaggaaaatgaattttattctaggtggtttgtttgtgttgtagaaaagtggctgtataactagggttgcaagtaacccgagctggcttaaaccaaagggaaagtgactaactcagaatgttgagaagttcagggaggttaggcacagtggttcaggtctgtaatctcagcgctttgcggggccaaggtgggcggatcactttaggtcaggagttcgagaccaacctggtcaatttggtgaaaccctgtctctactaaaaatacaaaaaaaaaattagccagggctggtggtgcacacttgtagtcctagctactcaggaggctgaggtgggaggattgcttgaacccggaaggcagaggttgcagtgagccaagattacaccactccactccagcttgggagatggagctagactccatctcaaaaaaaaaaaaagttcaggaattcaagcttcaggtacagtgagatctaggtgttcaaaagatttttctagaacctaatttcttgtcttctatctctctcgactacattgtttctctataggatgcagtttgttgacagcaacatagctgggttccagcccttatattctttgggtttatgtccaaagaacagagtagattcccggcttaagttcctgaatggagtgtcattgactctgattggttggcttaggttgatatgcacattcctgagctatgcagcataggcagggttgtggaaagcgcagggtggtttcattatggtccctaagaatggattcttggagctgaaggtagagatgttggcctcatcaggaacatgtgggcagggtttaggggagggggagtgatcgaggcagtggatttactcaggcttttcctggaggggttgctctggtgatcaattgatattgatcaaaatcatccaaccaatggccaagaaacacactgggtcttgagaacaggacagctcagaaagaaattcttggtcgggacactgtgtttccagaaacgattttccttctgcgttagatgtgcctcagtgttgaaggttaatctctttcaggaacaccaggacagaactgtggaaagtttcccttccttcccacgcctacgcccgtttggagccccagaatagcactgaggttgctgaaatgctgcataaggggaggggcagctcctccgaagataacttggggtctggaaaattaggctgtatgggtcagttgacaaatggatggtgtatgtgggtcttggccagggtcccacatcagaatctagtgctgatagcctccttgtctgaatgacataggccctccaagaatgattcatttcatttgggacaggggtcagttttgcttctaatcttgcttttaaataacaatgaacaatggttaagtatttgctgtgtgccaggaatttaccaaatccttttttcttgatgtactacactgttcagtatagttttatttaaataataaaaaactggaacaggctgggcacagtggctcatgcctgtaatcccagcatttggagacactgaggcaagaggattgcttgagcccaggagttcgagaccagcctggataacacagtgagactctgtctctacaaaaaaaataaatagaaaaaaactggaacaaactaaaataggttgattaatagagggtttattaaatcattgtctgtccttgtgaaagaaaacaatgagaccatttaaattgttttgctgggcatggtggctcacgcctgtaattccagcactttgagaagccaaggcaggcagatcacttgagcttgagtttgagactaacctgggcaacatggcaagatcccttctctacaaataatacaaaaaattaactgggtgtggtggtgcacactgtagtcccagctacttgggagactgaggcaggaagattgcttgagcccaggaggtcgaagctgcagtgagccgagatcacaccactctgtcacctaggctggagtacggtggcgcagtctcagctcactgcaatctctgccttgcaggctcaagcagtcctcccagctcagcctctcaagtcgttgagactacagacatgtgctaccacgcctggctaatttttgattttagggtttttgttttgttttgtttgagatggaggcttgctattgtcacccaggctggagtgcagtggcacgacctcggctcactgcaacctctgcctcctgggttcaagcaattctcttggctgagcctcctgggtagctgggattataggcgcccaccaccatgccccactaattttttttgtatttttagtagatactgggtctcgccatgttggccaggctggtcttaaactcctgacctcagatgatccacccatcttggcctcccaaagtgctgggattgcaggcatgagccaccgtgcctggcctggggttttttgttttgttttggtttgatttttggaggggtgggtagagacaaggcttcaccatgttatccagtattctctggtcttgaactcctgggctcaaacaatcagcccaccttggcctcccaaagtgctgggattacaggcatgagccaccatgcccagtccccagtgttctcaatgtactttggcacttgtttcccctttaaccacagagaccagactccaggcccagcaccttcggcagccccaagcatctagctagaatttggtaatactgttttccttgtatttatatttataattgccatctatttatggcaagtgaagatgatttgtcactgaagatagagaaagttttctattaaaacaaatgtaaggaaagagaaggaagtaaatttaaagaaaatgattaagcaaataatggagcagatggtacacagagcaagcattcagacgatggcgtgcaaatgacgaactctcataggaaccaacttagtcctaaatgtacaccaaccccatttataaaccaagagctacttccaaaccctccatcaaggggcctatggagaagggggtgggtcaggcttcaggctggagcttcatgaggctccaagtgaccaggggacaccaggattttccccaccacattgggttctgcagccttgaactcctggcctcaagatatcctcatgcgccaccatgcctggcctggttatactgcttctaatgtattttgaagataaaaaataaaatcacctaaattgtccatcctgtgtatccctggtggtacacatgtctgatgttggaaagtcctgtttcttattcctcagcaagaagagaggtgtaaggccactgtaaaaaattagcacaaacttgatgccttaaaacaacaggaatttattctctcccagttctggaggccagggttctgaaatcagggtgtcggcaggagccgggcataatggctcatgcctgtaatcccagcactttgggaggccaaggcaagaggatcgtttgaggccaggagttcaagaccagcctgagcaacatagcaagaccccttctctactaaaaatttaaaaaaaaaaaatttttttttttttaaaagacaagatgttggcaggggttgttcctcctggaggcactgagggagatctgttccttgcctctgtcctggcttctggtggctctggctgttcctggcttttccttggcttgtctcactccagtctctgcctcatccttcatgtggcattctactctgtgggtcttctcttctgtccatcataaagacacttgacattaaatgtagggcccaccaggttaatccaagatgatctcatcttgagatcttgtacttgattccatctgcgaagaccgattttttccaaaataggccacgttcaggctgggcgcggtggttcacgcctgtagtcccagctctcagggaggcagaggcgggaggatagcttgagcccaggagttcgagacctgcctgggcaatatagtgagaccccggtatccacaaaaaggaaaaaaaaataaatgtaaccccccaaattaggccacattcacaggttccaggtggacatattttagaaagaccaacattcaacctaatataggtggcttccactctttatcacctactaggccaggcccttgctcagcatcttacaagacctaaacttcacgaagcaggtactactgttaccatctccgttttgcagatagggaaactgaggctcatgggacttattgagactcatgtagagtctctatcctctattcatccatgattcatccatcaatccatcctctatcatccatctatcctctactcatccttccatcacccatccatccatcacccatccgtccatccatctacccacccatccatccatgaacccatcctctatacatttatacattcatccatccattcaccctccatctgccatccatccatctccctccctccccatgtgtatctggacccggaactaggatttggaaattcagagataatgagatttataagaagcaaagctgggatttgaactcaggactctctaactgcagagcgcgtgctttgcaccagcacaccaggatgctgccagccgtcaccacccttgctgtgttgtgtctcctcactggtttacttctttgctgtctgctaattctgccccaaggttcatctcttatggcctgggagtggtggcattcttttgtcatttctggaattacatttaactataccagaaagtgcaaaccaatggttcctgagcccacaggagagatcggccactacaaccttcaaaatttttagaaattggttcctaaagtttaaatatgggtaggccgggcactgtggcctataatcccaaccctatgggaggccaaggcacatggatcacttgaagtcaggagtttgagaccagcctggccaacatggtgaaactccgtctctactaaaaatagaaaaattagccgggtgtggtggcacacgcctgtaatcccagctactctggaggctgaggcaggagaattcccctgaacctgggaagcgcagaggttgcagtgagccgagattgcaccaatgcactccaacctgggtgacagcaagactcagtctcacacacacacacacacacacacacacacacacacacacacacaccaaaaaacatgggtacacttcacataaaaactctgggtttccattatctagaaaaatcagaagttccagcaacacttggcttatatcccctgtggcaatgacggagtagctgctggccccttcagatgggtttgtggcctccttgggtccccacagtcctcattagttggctttgttcatttagaccagtggttctctgccagaggtgagtttgcctcccaggggacattgagtagtatctggtgacatttgtggttgtcacaactctgtcagggtaaccaccactgacatctagtggttagaggccagggatgctactaaacttcccatgatacccaggacagctccccacaatagagaattatctggcccccaatttctgcagtgacaagattgagaaaccctgagttggccggctcgcctgggctgtgcaggcatttcaggaatctttagtttaaattgacacttttaaaactgtgagtgcaactcttcatagtttacaaagactctttcatagatgttatggttaaaaggaagtgtgtttccaagccctgtcaacagcagcttcattcattttggggagaaggctttctaccatagtaagtgggagcaaatggatgggtggtcagcagctgggtccttttgctgagctgggccagggaccccatggcgtgagaatagctgttgtgaagggccttgtaatgtctggtttggcctgaggaaccagagaagtctgggatctctaggctttgttcctggaacatagtgactgatttgaagccagaactctgggtgatttgtacctgagttaagctaagccaagaatttgcattaatcatcatccatccattcatccatctaccatccatccatcatctgtccatccatccattcatccatccatcatccatccatcaatgctgtatccattcctccatcaattctccatccatctatccatcgtctatccatcaatcctctgtccattccatctatccatctatcctctatccatccatccatcatccgtctatcctctatccatgaattattcatccatcaatccatcctctattcatccatctatcctctactcatccgtccatcattcacccattcatctacccacccatccatccatccgtccattcatccatgaacccatcctctatccatttattcattcatccatccatccaccttccacctaccatccatccatctctctccctccctcccatgtgtatcaggaccttggaataggctttggaaattcaaagatgattagggcaggccctccactctccagaaactcatggtcttatggggatttcagacatagaaactattttaacagtaacatggcctgagtatggagtcagaaaggttccaagtattctgggaacacagcgtttttgtttggagacacctggacaacaagtggaaacaaatgtatatcttcttcatcccaacatgggcatctgttacacccagaagagtatgtaagaagcacagggtttttatttcaaaaatccttttattgacatatgatttacatggagaaaattgtgtatgccatagcgtgcagtgcaaagaattattataaactgaacacgtctgtgtaactagaatccattttaaataagacaatgccaccagccccatggaagctcccacatgcaccttctaagaacttccctcaattaaggataatcattatcctgacttctaacagcatcgattagttttgcctcttcttgaatggacggtctatatatggacttagacagtatgttcttgtttccatctgtcctcttttgttcggtatttgtgtctggaagatatgtcagggttttttttttgttttagagacaggatctccctacattgcccaggctgtatcaagctcctggcttcaagcagttctcccacctcagcctcccaaagtgctggggtcgcaggcatgagtcactatgctggccccaatacatcagttttgatttgtggtagttgtagctcattcattctcactgttctgtggcaggggttgctaacacatttttctgtaaagggtcagatagtaaattctttagcctttgtaggccagacgatctttgttgcaactcattaactctgccagtgtagcatgcaaatagttacagacaatatgtaaatgaatgagtatagctgttttccactaaaactttatgtataatagcaagcagtgggccagatttggtccatgggctgtaatttgccagtccctgctgcgtggcattccattgtaatgcaaggttttaagcaaccatatgaaaatattgagctcagaatctagtttcttcagaggaaagatgtaagctggctctgggtccccagtggctttaggctccaaaactccagggtaccttggcattgacctttgtgtctgctctgcccttctctccccacctcagccatattgaaggtggtatcatcggtcctgcagcttggaaatatcgtcttcaagaaggaaagaaacacagaccaggcgtccatgccagataacacaggtacttgccactttttcctgatgaccaatgactttggggttgggggggtgggggaggtgacatttaaccactggttatttttcaaggtgaaggtatctgggattttaacaacagttggactaggttcttatcactcactttttcaaacttttcagtgctcaagaccctatgtggaaagttattgaatcagagcgcagggattaaaaaaaaacaaacctaatagttttatttatttgttcttttttttaaatacaaaattttacaagttttaatagagacgaggtctcgctgtgttgcccaagctgatcttgaactcctgagctcaagtgatcctcccaccttggcctcccaaaatgctgggattacaggcaagagtcatcacgtcctacccctaatagtgaccagacaagatcccgagggaccatctcttctaaaataccccacttaattgttttgttaaagaaatatttctcaagcccctgcaatatgccactgggatacagcaggaaatgacacaagaatagctcttcttacggtatctgtggtcgtcttggggagacagacctcaattgccctgagaattaggggtgccagataaaatacaggatgtccagataaatttcaattttaggtaaacaacaaacctttttttaaattttaattatgtcccttgtaacatttggaccgtgattataccaaaagagtattcttgtttatctgaaattcaggtttaactgagcatcctgtaattttccccctaaatctgataaacctacccacaaataaacagtattttgtgttttgagaagctggcctggctaccactatgcttgttggtggctgagctgagagcaaaacttaggtttcttatttcccagcccaggctgtatattgtgttgctttttcccgctccctagagcccaccttgatcaaacctgttgcaaccgcttactgggtttaccttgcccacagcctagacagagccaattaatcaagacaggggaattgcgatagagtaagagtaactcacgcagagccggctgcatgggagaacagagttttattattactcaaatcaatctccttgagcattcgtggatcagagtttttaagcataatgtggttagggggaggccagtgagttgggggtgctgattggttgggtcagagatgaaattacagggagtcgaagctgtcctcttgccctgagtcagttcctggacagaggccataagatcagatgagccagtttctcgatctgggtggtgtcagctgatccacctggtgccagggtccgcaaaaatatctcaagtactggtcttaggttttacaatagtgatgttatccccaggagcaatttagggagggtcagactcttgtagcctccagttacaggactcctaaaccataatttcaaacctttgggctaatttgttattcctacaaaggcagtctagtctccaggcaagaagggggtttgttttgggaaagggttcttgtgttttaaactataaactaagaggctaggcgtggtggctcatgcctgtaatcctaggattttgggaggcccaggcaggtggatcacttgaagtcaggagttcaagaccagcctcgccaacatggtgaaaccccatctctactaaaaatacaaaaattagccaggcgtagtggcaggcgcctgtaatcccagctactcaggaggctgaggcaggagaactgcttgaacgcaggaggcggagattgcagtgcgccgagattgtgccactgcactccagcctgggtaacagagtgagactctgtgtccaaaacataaaaaataaactataaactaagttcctgccaagttaattcggcttacacccacaaatggttcagtggagcttggaggttagaagcaaggtggagtccgttaggtcagatcttgttcagtgtctcagttataattttgcagtggcagtttcattctcaggtgtttgttatgtattagagtccctaaatctggcaaattaatggaatccggatgccaaggaaagacctcagggaaagagaaatgaaaaagtgctcttgccaagagatggggaaaaaaaaatcctaaaatcactctatttactctgccttgcacatgcaaagcagcatgtaatgctattttcatgttaagggaccagctcgtggtcacaccactgcacttcagcccgggcgacaggaagactgcatctcaaaataaaagaagagcatttaggttgactctagcattttgctattgcaaacaatgctgcaacacatatcctagaagggtgaaagaaatatttattgaacagtaactgttcaataaatgttactattaataactatttaatacttactaagtaactgttaaataaatctcaagggccagtggctcacgcctgtaatcccagcacttagggaggccgaggtgggcggattgcctgagttcaggacttcgagaccagcctgggcaacacggtgtaactccatctcaactaaaatacaaaagaaattagctgggtgtggtggcaggcacctataatgccagctactcgggaggctgaggcaggagaattgcttgaacccggaaggcggaggttgcagtgagctgagatcgcgccactgcactccagcctgggcgacagagcgagactctgtctccaaaaataaataaataaataaacaaataaataaataaataaatctatctatctcagggactttacatactttaccttatttagtcctgggtaccaacaaggtaccgaagagctgaccctttttaaagctgagaaaagcaagatgctgggagggtaaagagcttttccaaagtcacatgacttggaagtgtgaagggacagggacttgaaactagaactacctgaccctaaacccccaactggggcctgcttcagcccaccccaatcattgcctctcagcaaaatactggggagtgtgaccactaatgacagcagcctttaggacacttcaagctatattcatggtcagcgggtcccatttccccaagagaacccgctgtattcacagatcacaaatatcccatgcgatgtgtcttcttgccaagctatttcttttgtgatgcactcacgatgtttcttttctccatccagctgctcagaaagtttgccacctcatgggaattaatgtgacagatttcaccagatccatcctcactcctcgtatcaaggttgggcgagatgtggtacagaaagctcagacaaaagaacaggtaatgatgtacttatcacttatccatccatgcacccacccatccatccattcatccatctatccacctgttcactcattcatgtattcattaatccattcacccatggtctgcctctgcatctgtccatccatccatctttctacccactcattcatctgtctgttcatccatccatccatccatccattcatctgcccatctatctgctcacccatcatctctccatccctcactcatccatctgtccatccatccatgacccagccatctgtccatctgtccgtccatccatcacccatccagctgtcattccattcattcattcattcattcatctgtccatgcatccacccatccatctctttatccctcatttattcaatactagaatattcacagtcccatgtcaggttttgtttgtttgtttgttttttgtttttgagccagagccttgctctgttgcccaggggggggtgcagtggtgccatcgcagctcactgtagcctctgcctcccagattcaaacgattctcctgcctcagtcccccaagcagctgggactacaggcatgcaccacaacgcctggctaatttttgtatttttagtagagaagggtttttgccttgttggtcaggctggtcttgaactcccgacctcaagtgacccacctgcctcggcctcccaaagtgctgggattacagtgtgagtcactgcacccggccaagaataaaaatcttcaccaccagcctggcttatgtgaaaatggagcccattgagaataaccgggttcccctggttgccctctgcaggctgactttgctgtagaggctttggccaaggcaacatatgagcgccttttccgctggatactcacccgcgtgaacaaagccctggacaagacccatcggcaaggggcttccttcctggggatcctggatatagctggatttgagatctttgaggtacagctcggtgggatcctaagagccatggtcttggttgtctgagatgggctttttcttggaggagtcatgattttggagaaaggcatgtagatggctactgtagggtaggaggctgtctagttaagggtggatcattgagggtataagagacagaaatccaacaggaaatgcattggtttctggaactgagaaggccagacatgtagctggatcccgtaggcagggtctgatctcccgccatcgttctctctctctctctgccttcctccatattggctccattctcaagcaggctctcccctcacgggggcaagatggctgccacagctccagactgcctctcagtaatcctggtaaaaaaaaaaaaaaaaaaaaagcacatatctcttttctaacagttccaaccaaaatcttggaattaagtctcactgactcttactcacctgaattgggctacatggtcacctccaagccaagaactgtttgcaggagcttgcaatacctcatgtagtagaaacatggatattggatcctttacccatgggtttgaagaaagttctcagagaaagggaaggttttttttttgtcttgtcttgtttttttttttttgagacagagtcttgctctgtcgcccagactggaatgcagtgtcacaattttgtctcactgctgcctccgcctcctgggttcaagcaattctcttgtctcagcctcctgagtagctgggactacaggagtgtaccactgtgcccagctaattttttttttttttttagacagagtctcgctctgttgcccaggccggagtgcagtagtgcaatcttggctcaccgcaacctccgcctcccaggttcaagtgattctcctgcctcagcctctcgagtagctgggattagtgccaccatgcctggctacttttttttttttttttggtagagacagagtttcaccctgttggccaggctagtctcaaactcctgatctcaaatgatccaccagcctcggcctcccaaagtgctgggattacaggtatgagccactgtgcttggccaatttttgtatttttagtggagagaggtttcgctatgcttgccaggctggtcgcaaactcctgacctcaagtgatcctcccgccttggcctccctaagtgctgggattacaatcatgagcactacacccagccaggaggttttaagattgatagatgtcccgaaagaagtgtactaccgagtcactttctctctgcgcctctgttttcacatctgtaaaatgtttccacatctgtacatgcagtagcgtgccttacgaggtttgtccatccatagatggttgtgcagatggaggagataagcatctttaaggtgtgtgagggccatgtgatatcaacttcaccagccctggtggactctaggcagcatgttttggggcctcagccctgtctgggtgctgggatggcagaacaggatgtgggcgggccatgggggcgctgtcgggtggagcttctgtggggctccttgtcttctgacttcataccaagatgctcacgccccgcccccacgccatgtgctcaggtgaactccttcgagcagctgtgcatcaactacaccaacgagaagctgcagcagctcttcaaccacaccatgttcatcctggagcaggaggagtaccagcgcgagggcatcgagtggaacttcatcgactttgggctggacctacagccctgcatcgagctcatcgagcgaccggtgaggggcacgtgggcgtgcggggctccgtcacaccttgtacacgtgtgtggcctctgtggagccgacgtggaccccacactctccccatgcacatagcattcccccacccaatccatcacccagtcctgaaaggctgtaagctgaatccttgtgaactcttacaatttccattaacccacattttcatatcaaaggtattttctttaatttctgccttccttccatcctcttttttcttcctttttttcttccctaccctctttcccttccctttccttctctgccattgctttttttttttttttttttttttttatgacatggtctgactctgttgcccaggctggagtgcagtggcacaatcttgcctcactgcaacctccacctccctgcctcaagtgatcctcccgcctcagcctcccaagtggctgagactacaggcgtgcaccaccacgcccacctaacttttgtattttcagtagagacagggtttctactaattagccgggcctggtggtgcacgcctgtggtcccagctatttgggaggctgaggtgggaggattgcttgagccctggaggcagaggttgctgtaagccgagattgcgccactgcattccagcctggataacagagtgagaccctgtctccaaaaaaaacttttctaacaggaaccctaggtgaattcaagtcaagcaacaaattcatttgcaagaattatgaactcggccgggcgcggtggctcatgcctgtaatcccagcactttgggaggccgaggcgggcggatcacgaggtcaggagatggagaccatcctggctaacacggtgaaaccccgcctctactaaaaatagaaaaaatcagccgggcgccgtggcaggcgcctgtagtcccagctactcgggaggctgaggcaggagaatggcgtgaacccaggaagcggagcttgcagtgagtcgagatcgcgccactgcaccgtctgcctgggcgacaaggcaaaactctgtctcaaaaaaaaaaaaaaaaaaaaaagagttatgaactcttcatgatgttgcctgcgtgttgcccactagggggcggcagcaaacattatgttctgccttccatccctgttactggtccattgggcacagggtaatttgaaggtagatttggaagcatgggggtcataaactcatctttatatgtgggcaaatacagtatcagatctcggcggatgcccatgcgttgtgtatagttggccagctcttcatggaatgcctgaggttgggtgttctctctgattcaagccctacttgtctcccacagaacaaccctccaggtgtgctggccctgctggacgaggaatgctggttccccaaagccacggacaagtctttcgtggagaagctgtgcacggagcagggcagccaccccaagttccagaagcccaagcagctcaaggacaagactgagttctccatcatccattatgctgggaaggtaccagccacagggcccaggggactctgtctcaggggacccccagtggctgctcagcgcagagacagtctgagagtggcagaaccttgggctgcctggaaactgcaaagccatctgctgctaagcgaatcccaaccaagtcctattcgtaatttgtctacgcatctgtaaggcatcagctgtagccactctcatgttttccaaccgtgacgtccagacagttatttctttctgtttttgttggagacagggtctcgctttgtcgcccaggctggagtgcagtggtgcgatcatagctcactacagcctcaacctcctgggctcacacgatcctcctgcctcagcttcccaagtagctgggactacaggtgtacaccaccatgcccagctaaaatcttttttcctttttgagatggaattttgctcttgtcatccaggctggagtgcaatggcgtgatctctgctaactgcaacctctccctccgggttcaagagattctcctgcctcagcctcccaaatagctgggattacaggcacctgccaccacacccagctaatttttgtatttttagtagagaagggtttcgccatgttggccaggctggtctcaaactcctgacctcaggtgatccacccgcctcggcctcccaaggtgctaggattacaggcatgagccaccgtgcctggccgcccagctaaatttttaaattatgtatagatatggggtcttgctgtgttgcccaggctggtcttgaattcctgggctcaagagatctccctgcctcggcttcctgaagtgctgggattatgagcacgagccactgtacctggcctcagcctgcttttcttgtatagactctaaatccttcctgctacaagttatacccaacaggcggggccaactggaatggggtgactaatacatccacacctggcttcaacaaaaatctcccatgtcacggtcttgagtttgctattgccagcctgctctggccagggaaatctatgatagttgtattcatcatcatcatcatcatcatcaacatgccttggctgttattgtataggcccttgccctgtggctctcaagagtcctggataatgtacaaaggacatagcttagtctggcttgcagaattgtagtattctattgactcctcagtacctccactgcatcatgggcacaaacaatgctctctaccagggcctggcaacagagtccgatctggcccacagcttgttattgtaaataaagttttattggaacacagccatgcccatttgtatgcataatgtctatggctggctgcttttgtatactacagtgctagagttgagtagctgcgacaaagactgtatgacttggctgggtgtggtggctcacgcctgtaaccccagcaccaaggcaggtggattacttgaggtcagcagtttgagaccagcctggccaacatggcgaaagcccgtctctgctaaaaataaaaaataaaaaaaatttaaaaattagccagctgtgagattacaggcacacaactgtaacctcagctactcaggaggctgaggcaagagaactgcttgacccaggaagttggaggttgcagtgagctgagactgcaccactgcactccagactgggcaacagagaaccactctgtctcaaaaaccaaaacaaacaaacaaacaaaacattgtatgacttgccaagccaaaaatatctactatctgggccttcaccaaaagtttcccaactcctagcctatattcaagggggtatatgttcctttaagcatatagagacaacacttttcttttccctacttcatcagtggattttttttattattattttcagtcttctctcagatcaagcctacctattatcctgataacccacatcccatgataacccagcaaagctgtattatcagttcctttcatttaatattcaccatagtaaaaattacggctttgggcattgtcattgtttgagtcaggaatgtaaaaagcctatatgtcctttttctgtatatccatatatcaggatctctgagttacaaattatgctcattagagagtggaaaataggatgccatgcttaattaatttatttatttaattattttgagacagagtctcactctgtcacccaggctggagttcagtggcgcaatctcagctcactgcaatctccgcctcccaggctgaagcgattctcctgcctcagcctcccgagtagctggcattacaggtgtgcaccaccatgcctggctaattttttttttttttttgtatttttagtagacatggggtttcaccatgttggtcaggttggtcttgaacgcctgacctcaaatgatccacccaccttggccttccacagtgctgggattaccagtgtgaaccaccacgcttggctgccatgcttaatttctaaaccaggatgattgggaagatgatgaggggggagttttgcatgtcggcaggagggcatctgccgtcatgaaatctcttaatagtgtataactcacaggtactgtgctggcttaggaggagggaggctaccacagcagcgttagtaggagaatatggaatggaaactaggctttcccagcaatggctatcactggctgatgtcctactacgtgggcacaggtccctgggctgttggtctcttcactggtgtttgtggagtcccatcatggtggtcataaacgtcatttcctctctgacctcagaagatctggaaggacaatgggagggctggggtcctggccttggtttctaagtttctagtttcccaggggttctgaccagcagggtgtccttggcaggtggactataatgcgagtgcctggctgaccaagaatatggacccgctgaatgacaacgtgacttccctgctcaatgcctcctccgacaagtttgtggccgacctgtggaaggacggtaaggccttctctgctcgggtccatgttctgctttgagctggagaattgaacacccaagtcccccgactctcacacctgccccaggaggggaggcctttacatgggggcaggggaaggaagagcattggcatgggctggtgatgtctcgttgaaacaatttcttcctgagtgggggtccctgagcccctcaatcctacatgtcccgaggggattgaggtcctgaggtcagggctcaggcaatagaggagaaacagcatgccaggcacggggagttagactgccctgtccagagtcagaaggacttcactgtatcttgtctctgccacctcctagctctgtggtcttggatgagtcacttgatgtcattaagcttcattgtcctcattagtaaaacaggagatgcaataatagttgccgtctctactagaggtattatgagggttaaattagaccagtgatgctcaaactcaagcaggcatcatgaccccctggaaggctttgtttatttatttagggacagagtcttgctttgtcacccaggctggagggcggtggtgcaatcttggctcactgcagcctccaccttctgggttccagtgattttcctgcctcagcctcccaagtagctagcattacaggcacacaccaccatacctggctaatttttgtatttttagtagagacggggttcccccatgttggccaggctggtctcaaactcctgacctcaggtgatccgcccacctcagcctcaaaaagtgctgggattacaggtgtgagccactgcacctggccctctttggagggctttttaaaacccagatggctgggcctaccctaagatctaattctgcaggtctggggccagggatggggcgggcctgaaaacattcatcccaggtgatgctgctggtctagggaccacactccggctccctttgagaaccagtgaatagatgatccctgtgaagagctgctggagtgatgatgaggggagggggtttgctgtttgtccctggccatcagtgtccacagcaggttttattcttggcacagggcccatgggcctggggcttacaggactggtctccccttgttttaagcatgctaaaaaaagggctccaggaggggccagctgtgccctaaccatatgccaggctctgggcctagggaacaacatcgcaccctgggtctgtgtcatcccaggacacatgatgaagcctgtagtccctcctctgcgggacccacagtcttgtgggagagatgagactctcaaagacaagcagagagacaagcatgaggctgcgcatggtggctcacacctgtaatctcagcactttgggaggctgaggcaggaggatcagttgaggtcaagagttcgagaccagtctggccaacgtggcgaaaccccatctctactaaaaatacaaaaactaactgggcgtggtggtggtaatcccagctactcgggaggctgaggcaggagaactgcttgaacctgggaggcgcaggttgcagtgagctgagattgtgccattggactccagcctgggcaaaagagcaagactctgtcttgaaaaaataaaactaaaaataaaaaataaaaacaaaattagccgggtgtgctggtgggtgcctgtaatcccagctactcaggaggctaaggcaggagaatcacctgaacctgggtggtgaaggttgcagtgagccaagatcgtgccactgctctccagctgggcgacagagtgagagcttgtctcaaaaaaaaaaaaaaaaaaaaaagattgttacacagaatctgagtagaaggtgaagaaatggtgccatccatggcctgtgggttgggcttggcatgtgcaggacctgctgggctggtagaaaaagaaccttggaggtgatgatgatgatgatgatgatgatgatgatgatggccgggcgcggtagctcacgcctgtaatcccagcacattgggaggccaaggcaggggaatcacctgaggtcaggagttcgagaccagcctgaccaacatggagaaactctgtctctactaaaaatataaaaaaaatgagccgggcgtggtggcgcatgcctgtaatcccagctactgggaggctgaggcgggagaattgctggaacccgggaggcggacgttgtggtgagccgagatcacgccattgcactccagcctggccaacaagagtgaaactccgtctcaataaaataaaataatgataataataataataataataataataataataataataatacctactttttgttgagcacttactgatgtgccaggctatctcggagtgtgtgctgtatcttctgcctcagaatatttcttccgtggatacctacatggttacccactcatttcttgctggtttctgctcaaatatcaacttagcagagcccaccacctccttgtctaagagagcaccctcttcactctctctccgctttaccctatttttatttttctacgcacacctcactactcaagatattccatacttaacatctgtgatctctgtctgtctccttccctgtgatataagcggggtgagggggccgggtctttttttgttcacagcagtgtccccagggcctggagcacagaaggtcctcaataactatttgttggtggatgaaagattggaggctggcagggaataagtgccttctgtgccttatttttttttacccctgccctagaaggtagacggtattattacctcccttttgtagaaagggagactgaggcacaggatagtgccaagccaaggctagtcagtgagtggacagcgagagcaggcttgactcctaggtcagcgtgactccatcacagggaatttgttctttctgccactcaggtgctctcaggatttccccaatagacaatacttggaaaccctgactgccgaaggaggcgttggtgatggaaggaaagattggagtgggcaggttggtgggtggggctggggctgagcctctggcctatttaggggtgggtgggccagaggctgatgccaccctggctgtgccccatagtggaccgcatcgtgggcctggaccagatggccaagatgacggagagctcgctgcccagcgcctccaagaccaagaagggcatgttccgcacagtggggcagctgtacaaggagcagctgggcaagctgatgaccacgctacgcaacaccacgcccaacttcgtgcgctgcatcatccccaaccacgagaagagggtgaggcccgccgcccagaccctggggctcccagaagccagggctgtcccaagcggtcacagcgtccccagggcgccctctgcccccacctaccccgaggaccccattttccatgtggggaaggctatctgaatctcagacccattccccatccctggaggaaaaggaggaagggaggatgcatccagagacttttcagttgtggagttgctgtgcaggtcatccagccactcattcattcattatcccaggaagtattcactgggctctgccctgtcctgggtgctggggagcagtgttagaaaaattgtagcccttccctgtgggtttctcataatctggtgcaggcatcttcagcttggggcgattgtgtcctctatatggacatgctacagacatttttggttgtcacaaccaggagggggctgttagtcagcatctagtgggtaggggccagggatgccctaagcattgtacaatgcacaggatggtccctcaacccccagcacagaatccctacaagatgccagtagtgctgaggttatgggagacacggggagaggtaaacatacagctgatgatggtgatggaatgtggtcagttaggagaacaccaaagagccagggctcctcccacagcctcaggactcagagaaagcttctggtgaacttgaacgttaagaatgtgtggccatcaacttggtgacatggaaggcagggtggggcctaggataagcagggggcctaggataagcagagggcccaggctaagcaagagtgtggaggtgagaagtgaaggaactaggtaagaaaatgctagatagtgtccaggcgtgttgctcacgcctgtaatcccagctactcaggaggctgagaaacaaaaatctgttgaacccaggaggcggaggttgcagtgagctgagattgcaccacagcattccagcctgggcagcagagcgagactccatcttaaaaaaaaaaaaaaaaaaggaaagaaaatgctaaataggtcatttcatgttgcaaatgtgtgatggcatgaggtaggaatcagatggtgtgaggtaggattgaggctgaatgggtaggcaggggctagatcgtggtgctccttgtgttctttctggagcttggccttctctctctaggcatgccattgggggtgttaaagcagggctatatcatggtcagatttacattttaggaagtgaatgagggggctgggcatatgctagctcatgcctataatcccaacactttgggaggttgaggtgggaggatcacttgagaccaggtgttcaaggctagcctgggcaacatagcaagaccctatatctacaaaaacatttttaaaaattttccaggcatggtagcacatacctgtggtcccaaatacttgggaggctgatttgggaggatcacttgagcccaggagtttgaggctgcagtgagccatgatcgcaccactggactccagcctggctgacagaatgggaccctatctcaaaaaataaaaaggacaaagggattgaggggagaggcaagaccagagagagagaccaggtgggtggtttctgtggttgtccaggcaggagaagatagtggagacaatggtggtgaagagaagtgggggggttgggagatatttgggagctagaagcaatcaaactgctgatggacaggaagtgagggagacgaggtgatgaggaggaagccccaggttccagccaggcgatgctagtgtcaccaagaaccagagagatcatgaggcagccattgccgaagcaaagagatgaaaacccagaggggggcactgctttgcccctcggccctcagctaagccctccttgggtgcttctgttggtaccctcatggcctggccaggtgggtcatccaggtaggaggtttggggctttgctgcgccatggtttctggccccagggatccactgccctctttgacctttgcagtccggcaagctggatgcgttcctggtgctggagcagctgcggtgcaatggggtgctggaaggcattcgcatctgccggcagggcttccccaaccggatcgtcttccaggagttccgccaacggtaagtcccaaggtctggcccaggtagggcagggggtgagcgggactgggtggaggaatggatgctggaggtacccggggtgacttctgctctgtgtttcaagctacgagatcctggcggcgaatgccatccccaaaggcttcatggacgggaagcaggcctgcattctcatggtgagcccagaagtccaccagagacctcccaacctctggccgcaagccacctgctgctcttggtgggaccgttcttacccatgtcatcactggccaaatggcacagtggaaatcaggagctcttcctttccttccttttgcagatcaaagccctggaacttgaccccaacttatacaggatagggcagagcaaaatcttcttccgaactggcgtcctggcccacctagaggaggagcgagatttgaagatcaccgatgtcatcatggccttccaggcgatgtgtcgtggctacttggccagaaagtaaagatgctttcctgcatcctaatacctcaaacgcgaatcacaaacaggggcctttctgttctgattccctgattctaagaggccacctgtttaagatgcatcattgactgaatgacagccttttcttgaaggggaagaaatgcttctactttaaataaatgtaccaagttacgagtgcaggaagggaacgagttttagacctgggttctcatcgtggatgccccagtttttgctgatgaaccttgggcaagttactctacctctctgagcttccagttttttagctggaaactgagcataatcattttgacctcagagagctgttcatgaggtgtcactaagataacgcatgacgagagcttagaacagtgcgtggttctcaggtcagaaatgattgttgttgtttttacctccctccctcactccttccttccctccctcccttccttccttcctttcttcttcctttttgagacagagtctctctctctctctctgtcgcccaggctggagtgcagtggcgcagtctcaactcactgcaacctctgcctcttggactcaagcaattctcgtgtctgagcctcccgagtggctggaattagaggcgcccaccaccacactggcctaatttttgtatttttagtagagacaaagtttcaccatgttggccaggctggtctcaaattcctggtctcaagtgatccacctgccttggcctcccaaagtgctgggattataggcatgacccactgcgcccagcctagacatgttagaattggataaaccattgaggaaagaggacttgacggtgtctagatccccgtgtcccagtgggatttataaggcagggttttggagggtgtgatgtcccagctgttctgtgaagactgggagccggggaagggttcgggttccttaatgaaagtcataccccagggactgcagggacaggtggggtcgctctctgtctggggtgtgtgttgtcattgggcagagaccacaccctcaccagtaggaccctgatgtgtcaggttcattcattgacacatggacccaagatggtcaaggccagctttgggagctcttggccctcccgcaacagacctaacttgtcaagtttcgttactaagttccctgttgctgtccttcctggataactggggcaattttattcttaaagttttcctgtgtccaagatggcagccaagcagggaagacagaattacgttcactgttctatcgtttctcaatctatcgatagcccttaaacgggaagagtgctggttcagggtcacagtgtgaaattcctaaaacaacccaggagagaataggtttgacagggctgggtgtggtagctgacacctgtaatcccaggcactttgggaggccgaggcaggaggattgcttgagcccaggagtttgagaccagcctgggcaacatggcgagacccctatctctaccaaaaaaaaaaaactttaaaaattagctgggcatggtagcatgtgcccgtagtcccaactacttgggaggctgaggcaggaggatcatttaagcccaggaatttgaggctgcagtgagccatcatcacaccactgcactccagcctgggccgcagagccagaccctgtctctgaaaataaacaaataaataaataagttagtcagaaacagctggtgtaggctgggcatggtggctcctacctgtaatcccagcactttgggaggccaaggtgggtggatcacctgaggtcaggagtttgagacccacctggccaacatgggaaaccccatctctactaaaaatacaaaaattagccaggcatggttgtgggcacctgtaatccaagctactcaggaggctgaagcaggagaatcacttgaaccccggaggtggagtttgcagtgagctgagatcgtgccaccgcactccagcctgggcaacaagagcgaaactctatctcaaaaaaaaaaaaaaaaaaaaaagaaagaaagaaaaaagaaacagctagtgcagctggggagtacgggagcccccttaggaatgatgcacatagttgtgttttctgagtggtgtttggatctcagctaagtccagggcatgttgtgagccctgggtcttccttgtccactgaaaaaggctctgtcctgtagatgatttaagttgtttgcagccagacaacacatgtgtcacacagggtttctggaagaacctgagttggggagattggggcatgtccctgtgcaggttcaggatgctgcagggcagggctctgttgacagcagggtgtggcttcatgacccccgcaccttctcttcccccctccctagggcttttgccaagaggcagcagcagctgaccgccatgaaggtgattcagaggaactgcgccgcctacctcaagctgcggaactggcagtggtggaggcttttcaccaaagtgagtgctctgccccagcccccttcccaggggcccccagccctgcttcttcactctggagccttcacatttgggacaggaggtggtcgcaagtgggtgtggaatggagggctcgaactcagaccttgagcattggcggttctctggcccgaggaggccctgtcctttggcacataggctatagccaggaccttaacacaaagtattaatatttccatccgcactggaatccctcgtgtggcccatttatagccacacccacttcctccgtagccatggaaaccactctgttctccagttctgtaattttgatggttcaagaatgctgccgggggcggcggctcacgcctgtaatcccagcactttgggaggccgaggcaggcggatcacttgcggtcaggagttcaaaaccagcctggccaacatggcaaaaccctgtctctacttaaaatacaaaaattagctgggtatggtggcaggcacctgtaatcccagatactcaggaggctaaggcaggagaatctcttgaactcaggagacagaggttgcagtgagccaagatcatgcctgcactccagcctgggtgaaagattgagactctgtctcttctttctttttttttttatttaaaaaaaaggccaggcacggtggctcacggctgtaatcccagcactttgggaggccgaggcgggtggatcacaaagtcaagaaatcaagaccatcctggccaagatggtgaaaccctgtctctactaaatgtacaaaaattagctgggcgtggtggcaaacgcctgtagtcacagctactcaggaggctgaggcaagagaatcacttgaacctgggaggcagaggttgcagagagctgagatcgcgccactgtactgcactccagcctggtgacagagcgagactccgtctcaaaaaaaaataaaacaaatattctatacatggaattagagagcatccagactgttgcatgtatcaatactgcaggtttttttttttttactttttgcattttttgaaatggagtctcactctgttacccaggctggtcttgaactcctgacctcaagcaaccctcctgcttcaggctcccaaagtgctgggattacaggcatgagccacctcatctggccatagcatattattttttatttctggcagagtcagggcctccagaggactcaactggttcctgtagtggcactggttgcattgtccccatggcacaaagacatgctctgttgcaatagactaggcttctccttatatgcccttgagtgtatccactggtgcaaggctttttcaccaagcaaacagacattgagtgcctgctgtatcccaggcacatgctaggtgctgggggtgcagctgtgaacacacaccatggtccctgacctccatgaatattctagccgaattggtggggagtaaacaataaacagataatcacagagacagatacataatggcaaactgtgataagtgcatgaagcaagctgctggagtacatagcaggggcttccttgtgccaggcaggggcttgaaaacaaagagttaggaggcagcccagggaaggacagcagatgctgctttttggaaatgttcgtccccactgaaccaacttctgaaaaactatcctaagaaaatcgtcttagccaggtgtggtggctcatgcctgtaatcccagcactttgggtggccaaggcaggaggatcacctgggttcacgagttcgaaaccagcctggccaacatggcgaaaccctatctctactgaaaatacaaaaattagccaggtgtggtggtgggcacctgtaatcccagctactcaggagattgaggcaggagaatcacttgaaccgaggaggcagaggtttcagtgagctgagatcgtgccactgcactccagcctgggtgacagggcgagactccacctgaaaaagagaaaagaaaatcaagagttaagggcattcattatggccttatttacaatagcagaatttcagtgtccagtcctagctgaatgatgagttcaataatggttcatctatcaatggaatgttttcagctattaaaatgatggctttggctactgaataggtctgctaaaaaaaaaaaaaaaaaagacttctacctagctgtctagttggacactgtggcatgtgcctgtagtcccagctactctggagctggggtgggaggatcgcttgaggccaggagttcaaggctgcagtgagctatgattgtgtcactgcactccagcctgggtgacaaaacaagaccatcgctaaataaataaattaacttaaaagatggctatgtaaagttgtaagaatgatgtaacagcatggggtaatacatatcttataatttttaaaaaaattttatttgtggagacagggtctcactgtgtcacccaggctggagtgcagtggcacaatcgtggctcactgcagcctcagcctgcagggttcaagcgatcttcctgcctcagacccctcactagctgggactacaggcacacaccaccatgcctggttacttgtttttgtagagatggggtctcatgatgttgcccaggctggtcccaaactcctgggctcaagcgcttgcctcggcctcccaaaatgctgggattacaggcatgcatcactgttcctgtctgtatcatataattttaaataataaaagcagcctctacaactaggcagcatggtcttaagtctattttttaaacatagaaaaagagccaggaaggaaatgtaaacaatgttaataatgactttgatagggaggtgggtgggatatgaaagattttttttctcccttttgtccttggaaggaaatatcacttttcagcagtagttctctgttgggatggttctaaagtggggaagatgagactttttcctttcactttgtaccttttctggtgctctgatttagagctcctcagtcttgccactgttgatattttggggtgactaattctgttgtgggggctgtcctgtgcactgtagggtgtttagcagtatccctggcctctacccactggatgccagaggcaccccccaccccagctgtgacaatcagcagtgtctccagacaatatcccctagtggggatcggtgggggcaacattgtccctggctcggaaccactgatcgaatttattatgacaacatatccctttgccacaaaaacaaatgatgggctaaccgtgtgtgtgcaggtgaagccactgctgcaggtgacacggcaggaggaggagatgcaggccaaggaggatgaactgcagaagaccaaggagcggcagcagaaggcagagaatgagcttaaggagctggaacagaagcactcgcaggtacctgtatggatgcatggctggggttgctggggaacaggacttggccccgtggggctcacccgcctcctccccaccacctgcgtgcagctgaccgaggagaagaacctgctacaggaacagctgcaggcagagacagagctgtatgcagaggctgaggagatgcgggtgcggctggcggccaagaagcaggagctggaggagatactgcatgagatggaggcccgcctggaggaggaggaagacaggggccagcagctacaggctgaaaggaagaagatggcccagcagatgctggtaaggtgtcacaggggcagcccgtggtgggtagcaaatcacttgaccctcaccacaggcctgtggaggtgcatccagggatatgtgtccctgctgggacagatgatgagacgggggcttggagagggttggtcatctgatcaaggccacacagctgggattgggactggaacacagtgagcccactctgttctattgccctgccttgcatgtgctaaccccttttctcctaacagcaagcctgaatggaggataattgtatttgttagctattgctacataacaaaacatgccaaactcagcagctaaaaataaaaagtattgcatagtcaggaatttgagagtggcttaggtgagtggttctggctgagggtccggcctgaggttgcagtcaaggtgttggctgaggctgcagtcatctgaaggctcatctggggctggaggacccacttctacttggcttattcacacagctgttggaggaggcctcagttccttatcatgaaggcctctcccctcagggctgcttgagtgtccttccaatatggcagcagagttcccccagaaggagtgatctgagagaggagaaaggaagccgcaatgccttttatagcctaatctctgaagttacattccatcacttcttcctgatttttgttgttgttgttagaagcaaatctaacccccactcaaggggaggagaattaggctccacctttttggagtcgcaaagaacttgtggatagattttaaaaccaccatggtacctactgtgctcattttatagatgaggaggttgaggttccatgaagcagagcagcttacccaggtctttattttttttttttttttgagacagagtctcactctcttgcctaggctggggtgcgatggtgcgatctcagctcactgcaacctctgcctctcgggttcaagcgattctcctgcctcagcctcccgagtagctgggattacaggagcccaccaccatgcctggctaattttttttgtatttttagtagagacggggtttcaccatgttggccaggctggtcttgaattcctgacctcaagtgatccacccacctcggcctccaaaagtgctgggattacaggtgtgagccaccacgctcaggcctttatttcttccttttaggaggctacagagttctgggcatcttcaggcctagcccctgtattcattagtccccagatcaccacgagagtaaatctgttataaccaaagctgttactcttttccctccacaacaaaggaccttgaagaacagctggaggaggaggaagctgccaggcagaagctgcaacttgagaaggtcacggctgaggccaagatcaagaaactggaggatgagatcctggtcatggatgatcagaacaataaactatcaaaagtgagtaggggccgggtgcagtggctcacgcctataatccgagcactttgggaggccaaggtatgtggatcacttgaggccaggagtttgagactagcctggccaacagggtaaaactccatctctactaaaaatacaaagattagccaggtgtggtggccagtgtctgtaatcccagccacttgggaggctgaggcaggagaatcacttgaacctgggaggtagaggttgcagtgagctgagatcgtgccactgcactgcagcctgggtgacagagtgactctgtttcaaaaaaaaaaaaaagtggaatcaagtttctgcattaaaaacaacaggcttaccaggatcagggagattttggggatttgggactttcagttctcaaagcagaaaagcccttagaaaaccaggacaagctggtcaccgtagtcagtagtcactaaccagccccacctgcttttagttctttgagctggatgtcagcttggcccctactgtgagccaggctctgtgttagatgcaggtatgcatggtgaaggaggacccttcccttgtggggtttatactgtagtgagatggcaaataatcgtcatttaccatggtgatcagggctctgaaggaaacgttcaccatattttaagagtgcggcaggccgggtgcggtggctcatgcctgcaatcccagcactttgggaggctgaggcaagtggattacctgaggtcaggagttggagaccagcctggccaacacggtaaaaccccatctctactaaaaatacaaaaaattagttgggtgtgttggcgggcgcctgtagtcccagctactcgggaggctgaggcaggagaatcacttgaacgtgggaggcagaggttgcagtgagctgagatagcaacactgcactccaccctgggcgacagagtgagactctgtctcaaaaaaaaaaaaagaatacagcagtgggggatagaggaagggtattcatagaagacttcctggaggaggtgacatttaagcagaaacttaaagatgaaggagcagttagaggggagtagaagagcatctcagctggttggcccactgtgcaaaggccctggggcagggaagagctggccagtggcaggaatggaaggagggtacctttagctgaccatacaatatgagggacaaactggcacgagatgagaaatggccagtttttggaaattgttatgggacttctctttaccatttaaaactctagttgtattttgttataatgtgggtttttctttcaactgtttacatggaaatcactaaaagtgaaacatagattctagagaaaagaaaaatcctaaagctatctctttctctttccccaaaaaggaacgaaaactccttgaggagaggattagtgacttaacgacaaatcttgcagaagaggaagaaaaggccaagaatcttaccaagctgaaaaacaagcatgaatctatgatttcagaactggaaggtaaaccagctaccaagagatttatttttattttattttattattttttttagagatgaggtcttgctctgttgcccaggctgcagtgcagtggtgcgatcatggctcactgcagcccgaaactcctaagctccagtgatcctcctgcctcagcctcctgagcagctgagactacaggcgtgcatcaccacacccagctaatttttttttattttttattttgtagagatggggtttcactatgatgctcagtctagtctcaaactcctgggcccaagcagtcctcccaccttggcctcccaaagtgctgggattataggcatgagccactattcctgggcttgaatgggtatttttaaaagcaggaaaatcagaaaggaaatttgaggatggcagatcatcccatgagtgacaactaactctatgccacctctcgaaatcacccttagtcatcacatgcactaataatatgataaaagggctgggtgcggtggctctcgcctgtaatcccagcactttgggaggccgaggtgggcggatcacgaggtcaagagttggagaccagcctggccaacatggtgaaaccctgtctcaaaatacaaaaattagccaggcgtggtggcgggcgcctgtaatcccagctactcgggaggctgaggcaggagaattgcttgaacccgggaggcggaggttgcagtgagctgagattgcgccactgcactccagcctgggcaacaagagcaaaactccatctcaactaataataatattatgacaatataaggtgctgttcatcgggagataatggtccagaccgtgactatgatggttactgattgggggatgtgttcatctcctccgggtaaaatgcctgggcaggaaggctcatttccgggcatctctctggggcctccccttcctgaagagcaccttggtttttgcagtgcggctaaagaaggaagagaagagccgacaggagctggagaagctgaaacggaagctggagggtgatgccagcgacttccacgagcagatcgctgacctccaggcgcagatcgcagagctcaagatgcagctggccaagaaggaggaggagctgcaggcggccctggccaggtagcggggctggcaaggggcatttgctgtgtgtccatgtatcccctgggcccctgctcattcgctcattcgcagtggctgtcttggtcaaggcggccccaggcccttggcatgaacttcgtttcccaggccaggcctcccacaagccttctcgaccctgttcactcccccagatcctcaccttcgactttcttctcttccctgcaaacacatcatgtctttgcagttgatctcacctactcccatggtgttgctgctgcctcttcgacatccaggcttttctcatctagacccccttctgaatttccgattgcccaatgagtcaatttccaccgtcatctcaaacacccctgtctaaggcgggaatgaccttcctttccccagcccctccctctaagggccctcttttttgtgaacaccaatctcctcctttgtttctgccgacccacagcaagcagcaaccttcagattctgccagtccttctaaatgtcccccacccatttcctctggtttttccctcttcctggctcttagctggatttacactaatgctaatactgcagcagccactatgaatgattatttacctgctcactcggtgctaagttcttttcaagcaatacctttgcagacacctggccaggtgtactgccggtgtctttgaggaggaagctgagcctcctaggggtaacgcaacaggagcaatgtcattgcttctaagaggcagagctgggatttaagcctcaaagctttctgattgatcccctggcctggctcttttgtcggccaatttgtgctatgttgacagtgctacggtgatgaagggaaagcatctctctggggcaggaacctgctcacaaaactttgctggctggatgcagtggctcacgcctgtaatctcagcactttgggaagccgaggtggggggattgcttgaggccagcagtttgagaccaacatgggcaacatagcaagaccctgtccctacaaaaagttaaaaaatgagccaggcatggtggtgtgtgcctgtagtcccagctactcaggaggctgagatgggaggatcacttgagcccaggaggttgaggctaaagtgagctatgatcatgccactgcactccagcctgggcaacagagcaagaccctgtctcaaaacaataataacaacaaaacaaaaacctaacttcactggcttactagggaaaatccagtttccttagcctcaccctcagagcccatccaccctctgcagtctcaccccaacccaactatttcactttctctcttgttgctgccctttcacaagtacagtaaaatcaaagtgcttgcctctcctgcagcattctgccatttaacagggcttcttgcagcccaccttgatctctggtcaccacctccaccagatgcagagccccagtctgaatatcccccgcaagcagtggctggccaaatgctgtgcatggggcgggtactcagtcactgagcaaatgcagaaagaacagacagttgccagggaagaagaactgtccaacattcagaaagcatctacacagtccctactgtgaccaggtaccttgccagtctggggtcaatgctttgcattcttgcacacacatgcacacacgtgcatacacacgtacacacacccatgcacatgtacaacctgttttgatgtcagaccttggcactcacatcctatgttaatctcatatagtctggcatgtcaagaagcagacctggggacatggatagaaggtgtttgatgtctctgcaacataactgtctggtcccagaaaagtttttggccacattgtaagagaggaaaccaagggacctgggggttcattctgctgggtctctccctggaaggcttgacgatgaaatcgctcagaagaacaatgccctgaagaagatccgggagctggagggccacatctcagacctccaggaggacctggactcagagcgggccgccaggaacaaggctgaaaagcagaagcgagacctcggcgaggagctggaggccctaaagacagagctggaagacacactggacagcacagccactcagcaggagctcaggtgaggggcccatcaatcccaccatcctgctatcccactgcaccaatgggatgggggcagaagaggggacaaacccaaagcaaatcgtgcatcagcccctgtgcatttaccttcctggccgcggtttgctttaacttatagaagcatggttggctgtttcttttttttctttcttttttttttttttttgaggcagtctggctttgttgcctaggctggagtgcagttgtgccatcttggctcactgcaacctccacctctgagatttaagcgattctcatgcctcagcctcctgagtagctgggattacaggtatgtgccaccacacccggctaattttttgtttttagtagagatggagttttgccatgttgcccaggctggacttgaactcctggcctcaagtgatccacccacttccgcctcccaaactgctggtattacatgtgtgagccactgcacccgaccctcatcatcttatttctcatcagaagagtagtatataccagggatgtacaatcttttggcttcccttggccacattggaagaaaaagatttgtcttgggccacacataagatacactaacactaataatagctgatcaactaaaaaaattttacaaattggaaaaaacatctcatactgttttaagaaagtttatgactctgtgtcaggctgcattcaaaaccatcctcattggtaagcttggatatactcagagaacaatttgaaaactatagaaaagcagacataaaaaaaaatcacctttagggtcgggctcacgcctataatctcagcactttgggaggccaaagacaggtggatcacttgaggtcaggagttcaagaccagcctggccaacatggtgaaaccctgtctctactataaatccaaaaattacctgggcgtggtggcgcatgcctgtaaatcccagctactcaggaggctgaggcagtagagtcacttgaatctgggaggcagaggttgcagtgagctgagatcgcaccatcgcactccagcctgggtgacacagtgagtgagactccatctcaaaaaaaaacaaaaaacaaaaaaatcacccttagtcacaccagttaacattcttgagaaattccttcctgtctgtgtgtgtatcagtcagtccccaagctccaattcccaagtatgtgtgtgtatcacttttgtgttaaattttaaaaataaaattgatcagattggttttcaattgaagattcacttcaaatgaacaaacaataacaaactgcctgccagatcacgaatcctgactctagtgaaactaggtcattgattcattcagtaaacacataaatgtattttgatgcaatctgtggtgttggcatagcatgtatcatagcatatagctatgctagctgtgccaacaccatataccctggggtttacttcccccactttgggttttgtgcagtgtcacatgcacatagagcacagcgttctgctcccttgccgcttggcctttgatacagaagagcccagtgcatgggccaggtatggtggctcatgcctgtaatcccagcactttgggaggctgaagcagacagatcacctgaggtcaggagttcgagaccagcctggccaacatcatgaaaacctgtctctactaaaaagacaaaaattagccgggcgtggtggtgggcgtcggtaatcccagctacttgggagactgaggcaggagaatcccttgaacctgggaggcagaggttgcagtgagctgacatcattccactgtactccagtctggacgacggagcaagactcgataagaaaaacaaacaaacaaaacaaaaaaccaggctgagtgcggtggctcacacctgtaatcccagcactttgggaggctgaggcgggtggatcacctgaggtcaggagttcgaaaccagcctgaccaacatgttgaaaccccatctctactaaaaatataaaattagccgggcgtggtggtgggcacctgtaatcccagctacttaggaggccgaggcaggagaatcgcttgaacccgggaggtggaggttgcagggggccaagattgcgctgtcgcactccagcctgggcaacaggagtgaaactccatctcaaaaacaaacaaacaaaaccatggactcaaggtcaaggtttagcttctaattctggctccatcacacaatggctgtgacaccatgggtaaaactgcttaccctctcttagccttagtttcctcatttgtaaaatggaaataataacacacctgcctctttgggttgctctgaggattagatgatgtatataaaaaacttagctcagggcctggcatatagtaactgctcattaaataagagccaacattaatatttaagcaaaattttgcagttcacagacatcctttcaattctattactttgtgtatttgtttgccagtcattacagatgtcctaggcaggtgatatgctccacattttgcagctgaggaaattttaggtccagagatgttaggtgaatgacccaaggtcacacagctagagaggggtggtgatgaggactgcagctctgggtcctggaagagctctcattcttttgcacggcactgagatgaccctctgtctccacccaactgccattcactgtgttcctcccaccaagggccaagagggagcaggaggtgacggtgctgaagaaggccctggatgaagagacgcggtcccatgaggctcaggtccaggagatgaggcagaaacacgcacaggcggtggaggagctcacagagcagcttgagcagttcaagagggtaatgctttttggtgatgctttttggtgatgacacataagagtgacatcagcagcctcaaattactacaggtcagggtctgcataaagacaaaaaacaagttacataagattctaatgatgatgatagcagcttatatttatttacaaaatgcttcccatacaggctgggtgaggtggctcacgcctgtaatcccagtacttggggaggctgaggcgggaggatcgcttgagctcaggagttggagaccagcctgggcaacatagtgagaccttgtttctactaaaattttaaaaaagtaggccaggcgtggtggctcaagcctgtaatcccagcactttgggaggccaaactgggtggatcacctgaggtcaggagttcgagaccagcctggccaacatggcgaaaccctatctctactacaaatacaaaaaattagccgggcgcggtggtgcatgcctgtaatcccagctactcgggaggctgaggcaggagaatcacttgaacccaggaggcagaggttgcagtgagcagagatcatgccattgcactccagcctgagcaacagagcaggattccatctcaaaaaaataaaataaaataaaatattggccaggcctggtagtgcattcctgtggtcccagctatttgggaggctgaggtgggaggatcgtttgagcctgggaggttgaggctgcagtgagccctgtcatgccactgcactctagcctggacgacacagtgagaccttaatcaaacaataaaaataggctgggcacggtggctcaccatgtctgtaatcccagcaatttgggaggcaaggcgggcaaatcacttgagctcaggagttcgagaccagcctggccaacatggtgaaaccccatctctaccaaaaatataaagaattagctgggtgtggtggcatgtgcctgtaatcttagctactcgggaggctgaggcaggacaatcacttggacccaggaggaagaggttgcagtgagctcagatcgtgctactgcactccagtctgggcgacagagtgagccgccatctcaaaaaaagaaaaaaaaaaaagaatgaatagaaatgcttctcatacagtatgtcaattaatcttcacaaccaccctgtgagacgtgtactattaaactcattttacaagcaaagaaactgaggtcctaggtgcctagaggtgaagagacttacccaaggtcacactgctggtaagtgacagagccatgatttgcacccaaacagtctggtcctagaccccactttctggcctctacaggactgaaggcctataggatgggtggggcctatcaatatactgcccttcagggataagcaaaggtgtaacaacactttcggggagatttaaatgaaacttaaaactgggatcattctatccactttaatttctctgcagactggaggaaggccaggcatggcggctcatgcctcccgtaatcctaacactttgggaggccaaggagggaggattgcttgagcccaggactttcagatcgcctgggcaacatagcgatttttcttttgtaaaaaaaaaaaagactggaggaaacttgtcattatttgatttcaatggcagaacagctctctccggcataatttgagaatgactaggtcaaatcactctcccgttgttggaactctttgcggtgtatgggagtgggagctggtaaatagcagtaccgaatgctgaatcttgggtgctcttctctcctttggggtagtgcctgtgcttcattccccagggtaagttttttagcttgcgaccttcggccagattgttttcctgaaagcctgagttacattaccctcagcgttgcagctcctccacatccccttcagtggaagcttttggttctgctagattaagtgggtgcagcattgcctaaaaattttggggaatttgcatttggttctatcactagtgtattggtccgttgttgcactgctctacagaaatacccaagattggattatttgtttattttttgagcagtggagtcttactctgtcactcaggctggagttcagtggcgtgatcttggctcactgcaacctccacctcctgggttcaaatgattctcctgcctcagcctcccaagtagctgggactacaggcacacaccaccatgcccggctaatttttttttttttttttttttttagtagagatggggttttgccatgttggccaggctgatctcgaactcctgacctcaggtgatccacctgccttggcctcccaaagtgctgagatgacaggtgtgagccactgcaccaccctgagattgggtaatttctaaagaagagaggtttaattggctcacggttctgcaggctgtacagaaagcatagcagcttctgcttctggggaggcctcaggaaacttaccatcatggtggaaggcaacggggaggcaggcatgttttacatgaccagagcaggcagaagagagagaatggggagctgccagacacttttaaacaaccagatctcatgagggcagcaccaaagggatagtgctaaaccattagaaactgcccccaaaggccgggcgcggtggctcatgcttataatcccagcactttgggaggctgagataggcggatcaccaagtcaggagttcaagactagcctgaccaacatagtgaaaccccatctctactaaaaatacataaaattaggctgggtgcagtggctcacgcctgtaatcccagcactttgggagcccgaggcaggcagatcacctgaggtcaggagtttgagaccagtctggccaacatggcaaaaccccgtctctactaaaaatacaaaaattagctggacgtggtggcggtcgcctgtaatcccagctacttgggaggctgagacatgaaaatcacttgaacccaggaggtaaaggttgcagtgagccaagattgtgccactgcaccccagcctgggcaacagagtgagactcagtttcaaaaaaaaaaaaaaaaaattatggttggaagagtgaggccccagacagaatcactgaccctccccatgcttggggttcattagacgtgaacaggagctagaagccaagcccattcccagccaggcctctttgggaagacgcagttattaagaccaccagcagacggcatgtccattactgacccgcacaaagcaggtagaggtgcaaacctctgcccatctcaggtgcagggaaacagaggcctttgcctctaacaacttgaattctgatgtagagacctggttccatctgcttgtgggggaaacgtttaacatcagctcctacctgggctccccaggccctcgtgcggtttggccccagttctggggtcttaggctgggctaaggtttctgggagcccatgtcccctagggtccccgcttcactgctttgttaccaccaagagactccctgtccccatctgaggtctggcagctcttagtcatgtcttggagggaggacgggcatccagggctgaccggtcaacgtccagcacctcccagggactatgggaagactgagtggtgggtctcgtcctctcgggatacttgcgcttctctttccccttctctacaacctggaaagaagcccctcaccgcgtcctacttttgcccaacacgcttttttttttgagacaaagtctcactctgtcgcccaggctggagtgcactggcgggatctcggctcactgcaacccccgcctcctgggttcaggcaattctcctgcttcagcctcctcagcagctgggattacaggtgactgccaccatgcccggctaatttttatatttttagtagagacggggtttcaccatgttggccaggctggtctcaaactcctgacctcaagtgacctgcctgcataggcctcccaaagtgctgggattctaggcctgagccaccgcgcctggccccaacacactttttttttcctgtagggcaactcacatgcctacaggagctggttccataaaataagtttcccttaactaggacagaagtagcagtgtcaatcacacgacacctgtgaaggacgggggcggtgaaaggtgactgccccacctgcagagccagccgctacttagatgtggcagattgttgccttgaaggaaagcaagaccctctgtttccagatctttcgttgttgttggttttttgtttttgtttttaagtttaggattactgaggcatatgtagtaaaatttatccattttactgctccattaattttaacaaatgtgtattgtgtaactaccaccaccacagtcaccacatagaatgttagttattgattgattgattgagatggagtctcactctgttacccaggctggaatgcagtggcatgatcttggttcactgcaacctccacctcccaggttcaagcaatacttgtgccttagccaccccagtagctgggactacaggcgtgcgccaccatgcccggctaatttttccatttttagtagagatgcagtttcgccatgttggccaggctggtctcgaactcctcacctcaagtgatccacctgccttggcctcccaaagctacttatttctgaaacagggtctcactttgttgcccaggctggagtgcagtggtgtgatcatagctcactgcagcctccaattcctgggctcaagcaagcctgccatccgcctcctgagtagctgggattgctggtgtgtgccccccacacccagctaatgttttattttagtagagatgggggtctcactacattgcccaggctggtcttgtactcctggccttaagcgatccttctgcctgcttcccaaagtgctggggatgacaagtatgagctgccatggcatgccttcaaacattaaagttttttgaaaaagaagctgggaatccagatttttatgtgacatttattaaaatgtcggcaactcatttttttaaaagtagtgaaagggtcaaaggggacatgtcagcaggttggataccgcttgtgggattccagattgcaacccatgagctttaggaaaatagaatccaaaatatcagctgggtgcggcagctcacgcctgtaatcccagcacttagggaggccaagatgggtggatcacttgaggtcaggagttcgagagcagcctggctaacatggtgaaacctcgtctctactaaaaatacaaaaattagtcgggcatggtggcgggcgcctgtaatcccagctacttgggcagctgaggcaggagaatagtttgaacctgggaggcggaggttgcagtgagccaagattgtgccacggcactccagcctgggtaacagagttaagactccatctcaaaaaaaaaataacaacaaaaaaaccccaaatctcttactggtgattgtgtgccccctgttgtgtgccttcctggacctctctgagggaggaaagggcagggcctgaaacgttctcccggccacagcctccctgttatccctcccctctgcttccttcgccaggccaaggcgaacctagacaagaataagcagacgctggagaaagagaacgcagacctggccggggagctgcgggtcctgggccaggccaagcaggaggtggaacataagaagaagaagctggaggcgcaggtgcaggagctgcagtccaagtgcagcgatggggagcgggcccgggcggagctcaatgacaaagtccacaagctgcaggtgaggaggtggcgcggtggtgtggtgggcagtgctgggtggtgcccagttctgtggggaggagcctcttcccggctcgctgaggtctctcttgctgcaaggcaagtcctttcctctagttgcgttcctggaggagaggcgatgatctccctgttcaattaaatattaaaaaaaccttctggccaggcacggtggctcatgcctgtaatcccagcactttgggagacagaggtgggtggatcacctgaggtcaggggtttgagaccagtctggccaacatggtgaaaagtctctactaaaaatacaaaaattagccaggcgtggtcgtgggcacctgtagtcccatctactcgggaggctgaggcaggagaatagcttgaacccaggaggcagaggttgcagtgtgcggagaccgcaccattgtactccagcctgggctaaaagggcaaaactctgtctcaggaaaaaaaaaaaaaaagaaaaaaaacccttccttttccaatttgataagtatttattgagcacctgctgtatgccaggcactgtgcttaatcctgagatccaacagcaaggaagaagagacactgtcgctgccccagtaggactccagccgagtaaggggaagggaagggaagggaaagacatgaataatcacacaaatgaatgtcaaatgatgcagcaaagggaaggcacatgatgcccaagtgtaaataaccagggggcctaacctgggggaggaggagccacgaaaggcttccctaaggagcatggataagtctaccaggcagagggaacagcgtgtgcaaaggccctgtggtaagtagaaaaattaggagagagacatacagccagtagagctggagtgcccagctggggttgggggtagggggagatagtacagagtggggttggagggggagcttgtacccagatgatgtagggcttttgagaacctattacatgtatgttgatccttactctgggcaatgtgaagctgttgaggggttttaagctgctgaatgacatggtctttttgtctttggtcttctttcacttggcatagccatttaccctgccttgccactcatggggacgtggccaaagttttcacaaatgtttaacatgtccacagccagggaccaaggggcgagggaagaattaagtgagatgtttttttctcacatgcagttgagagcagggcttttgccgccctcatataagcagtgtcaagatcattcatatcctccttgtcaatggaagagatggaggggtaggctaacagcctcaaagggacttatgcagagacactagggagtaaaagccagagaatacagagaggacgtttttacctttagggcctgcgtctctggctttggccatcagggtcaaagagtaggagtgaggaaggaagggatgggacagcatccctgggacgttcaagtaccatcctggtctcccttctccagccttagagagtggaccagccagagcacctcgtctggactctcagacctgctgctttgtctctaccaaccttggcagggatctaggatccatttagtgggatcaggtcccagtcaataccattggggctcaaataagttcttagaaccacagagtctagggccagggtcccaactcataggtgacggagttcccttcaagccacagattctgttttttttgtgtgtgtgtgtgtttttttttttttttatcagagtcccatacctcacgggtattttctcaatcagtgaacacctcaagtactagcccatgtgttttgagtaaaaagggctcctttcaacgaggatccccttctagaggctttgactaaccagtctcttggcacccttagaatgaagttgagagcgtcacagggatgcttaacgaggccgaggggaaggccattaagctggccaaggacgtggcgtccctcagttcccagctccaggacacccaggtgagtgtcctgccacatcatccaggggacctggggggtggccttcctcggggcaggtccctgggacctctttgcatcccttttgcaggagctgcttcaagaagaaacccggcagaagctcaacgtgtctacgaagctgcgccagctggaggaggagcggaacagcctgcaagaccagctggacgaggagatggaggccaagcagaacctggagcgccacatctccactctcaacatccaggtgcctgccccgtgtccttgcttccttcatgggtcctctcaacttctctgcgctgagatcccccgcaggcagatcgcggtggagtgttggtgcgatggtgcttgaccccccagcttcccctgctattgggtttctccaacgaggagacatggtcttcgcttctcagagtctgtggggccagggacaggggccactcatggtccccctctcaccctaccctggacgctgtccttgtagctctccgactcgaagaagaagctgcaggactttgccagcaccgtggaagctctggaagaggggaagaagaggttccagaaggagatcgagaacctcacccagcagtacgaggagaaggcggccgcttatgataaactggaaaagaccaagaacaggcttcagcaggagctggacgacctggttgttgatttggacaaccagcggcaactcgtgtccaacctggaaaagaagcagaggaaatttgatcaggtagagggcgtggggtgtcccccactctggccatggacgctgggttggggaatcagctctgcagagtatgacgcgtggctctggcctgtgcctgcatcccctctccactctgtggggagccatgggaggctgtcttatcttgtcttgggcgaccatggagcattaacgctaccaggtcacagtaaggatggcaaagaagccttgatgactgtgacttttctgggtaccagcaccatgagggtcacctgcacacatggtgatgccttagtttctagcctgaagaaggaatgaggtgcttatttattcactaaatgtatttactgaatacctattgagtagtattccaagtaattcagtttctatacttttaataccactcttccctaagatttcattctgtaaaattccaagtacacagcaaagttgacagaattgtacggtgaacacctttaaggccaccacctggattcagtcattgacactgtattatatgaactttatcagatacttattttgagacaggatctagctctgtcacccaggctggagtgcagtggtgtgatctcagctccccgcaacctccaccactgggttcaagcgattctcctgcttcagcctttcatgtagccgggattataggagcacaccactatgtctggctaatttttgtatttttagtagagatggggttttgccatgttgtccaggctggtctccaactcctggcctcacatgatctgcctgccttggcctcccaaagtgctgggattataggtatgagccactatgcccggcccacatatttatttataaagactaattctatctatcatgccttatctcttgggtacatttcagagcaaattacagatgtcagtacatttccccttccacacctcaacattgcatattaattagagtttatttttaaacacaattttgcttcttttggggtaaaacttacatgtgatgagattcacaaatcttaattgtacgataaatggagacccctgtatgacccaaacccctaaataccaacttttaagatacattattatttagtaaatatgatttagtttacaagtgactcagggttattctaaaaatcagtttgagaggccaggcacggtggctcacgcctgtaatcctagcactttgggaggctgaggcaggtggatcacttgaggtcaggggtttgagaccagcctggccaacatcgtgcaactttgtctctactaaaaataccaaaattagccgggcgtggtggcgcacgcctgtaatccctgctactctggaagctgaggcaggagaatcgcttgaacccagggtggggtggaggttgcagtgagccaagattgcgccactacaccccagcctgagtgatggagtgaaaaccctgtctcaaaaataaataaaatgaggattgtacagtgaggctaaatgccagatgcctgcaggttccctacccctccctgactgacctcctagtgtcaggattctagataacatcccagtttctcctcttcccatcagctacctctcctctgggctgtcagctcatcttcaatgcttcgttatctggttgaaggcctgaggttgcttttattttcctgtcacatagagtgtagtgcagtggcacacatagtgtgggatttttgtgttgactgtgccatttagaggtccctgtctttgctgaatactggaagtttggcttttggatgttacaatttataatctgctctgttctctctgaagatgagattaacgtgagcatggaatgttctctgagttgcttctccaagcagagagatatgtgtgcagggccacccatgcttaccatttccctactgaggctcttaggatacttttgtaagatattaatagctacttgtggccatgaaacaaactaataactagcttctggcagctttaaatctcactttgacctcagtgtgctctaagcaacgtgggcaggtctagtggtttcgaagcacaaggatttggccaggtgtggtggctcacacctgtaatctccgtgctttgggaggccgaggcaggaggctcacttgagggtcaggagttcgagaccagcctggtcaacatggcaaaaccacatctctacttaaaatacaaaaattagccaggtgtggtggtgggcacctgtaatcccaactactctggaggctgaggcaggagaatcgcttgaacccacgaggcggaggttgcagtgaaccaagactgcaccattgcactccagcctgggtgacaaagtgagactccatctaaaacaaacaaacacacaaaccaacaaaaaaaaacaagtcagctgatttctggctctgcataaggttgatgtagaagtcagaacgccagatgattatataaattactcccatagctaacctacactgcttacacctgcacctcaatacattcagcaggacacagggcttcccccggtatttacaattcagtgacgctgaccccggatatgcctagaagtcacctctgggtcttgtgttgtagttgttagccgaggagaaaaacatctcttccaaatacgcggatgagagggacagagctgaggcagaagccagggagaaggaaaccaaggccctgtccctggctcgggcccttgaagaggccttggaagccaaagaggaactcgagcggaccaacaaaatgctcaaagccgaaatggaagacctggtcagctccaaggatgacgtgggcaagaacgtaagtggctctgggtggtttttctcgtccatgtttcgcctgcccaccctctgtgctattcaccagtccatgcgaggctagctcctggcctttttcatagcgaactatcatcggaaatggaaggaggtttttggactggtgcaggggctgggaggggctgagaatggcagtcgaggatgggtctgagttggggggtccgaggataaggctggggtctgaactctcaggggtcatcttgagtcccggccatgcatcctgtgggaggccaaagccacctccctgatctcctgaggtgccgctcacggtgggtttctcaatcgtcttcatgaagttgagcctcatagaatggggctgcccgctctgccggcaggtccatgagctggagaagtccaagcgggccctggagacccagatggaggagatgaagacgcagctggaagagctggaggacgagctgcaagccacggaggacgccaaactgcggctggaagtcaacatgcaggcgctcaagggccagttcgaaagggatctccaagcccgggacgagcagaatgaggagaagaggaggcaactgcagagacaggtgcgtgctgccggggaggccagcagagggaggtcgggtggcctttttcattcctatcaccactctcatggttggtgtggaaacttcgttttctttatttttttttgaaacagagtctcgctctgtcgcccaggctggagtgcagtggcgtaatctcagctcactgcaacctccacctcctgcctcagcctcccgagtagcttggattacaggcgcatgccaccatacctagctaatttttttttttttttcagtggagacaaggtttcaccatgttggccaggctggtcttgaactcctggcctcaagtgatccattctcctgttggcctcccaaagtgctgggattacagacatgagccacccacgcccggcgtgattccgttttctcatctgcaactggggatgagatgcccacctcacaagggggctgtgctggggaaggggtgcagtgatgtgctgcctaggtgagccaaaggacctcccaggggcaagtggggcagcacacatctctattcctcgcccagcttcacgagtatgagacggaactggaagacgagcgaaagcaacgtgccctggcagctgcagcaaagaagaagctggaaggggacctgaaagacctggagcttcaggccgactctgccatcaaggggagggaggaagccatcaagcagctacgcaaactgcaggtgggtgacactaggagcttggggcatgggtggagggagggcacagttcccctcaggccaccgaagtcagcagagcgggctccaggaagcaagcctgcacctgccattggtgtgggttcagctggggtttttctggaaccattcaggatttggtggctgtctcctgccctgggtagggcagcattattaggtatttggccactgccctcagatcacatcaggggctcagcttctcaggcaggtctgtggagcccacccagaatggtgctcccagcgcaccaccagccacctggaactgagagccatgctcgtgcaatgggaacttctttgtggtcaactgcagaaaatccaaggggtgggtgtgcaaagctgaactgggcagcagaacttgggggagtaaggacatctgagcttgtcctccctgttgactcatgcaggctcagatgaaggactttcaaagagagctggaagatgcccgtgcctccagagatgagatctttgccacagccaaagagaatgagaagaaagccaagagcttggaagcagacctcatgcagctacaagaggtaaagcctcgccttgctaggagagcctcagatgcgggtgtcacggtagcaccccttggcagctccagtctgtgcattcccagatttcatttcgtcctcctctggggtccacctgtctagaaagacacacgcttccctcctctatgtattcacggggcctcccctgagctcagaggaagaacatgtactttcaagggtggctgagttgtcagggtggactcttggtggggcttggcctttccctggcagacaacagccttcctccctcccacctaggacctcgccgccgctgagagggctcgcaaacaagcggacctcgagaaggaggaactggcagaggagctggccagtagcctgtcgggaaggtaggaaactgaatggaggaagagggctctgaagcagaggatggggggacaggcagcatcctcgacccccattttattttttaaattttttcgagacagagtttcattctgtcacccaggctggagggcagtggcacaatcttggctcactgcaacctccacctcccaggttcaagcaattctcctgcctcagccttctgagtagctgagactacaggtgtgtaccaccatgcctggctaatttttatatttttagtagaggtggggtttcaccatgttggccaggctagtcttgaactcctgaccttaggtgatcctcctaccttggcctcccaaagtgctgtgattacaggtgtgagccaccgtgcctggccctggacccccatttcaatgctgctgctgacgaagcgtcctctgagattggggacagacccatggtggttaggttttccgtcagcgctttcatgcctgtttgggggtgtggctgctttcattcattcccaataagtagctgtgtggggagaaggggaggccaggaagagtcagggaggagtgtgctggtccccatcccaatcccagctttgctgacacggacccggcctgagtcccggctgtccacttcctggctgtgtaactacagatgagtcttctaatcttctccaagcctcagtttcacccattagatgatgagggcaatacccctgaggcatgactccaaggagggggcatcttttaaggcgggggagggtagaggcccccaccatggccgcccttcccccaggaacgcactccaggacgagaagcgccgcctggaggcccggatcgcccagctggaggaggagctggaggaggagcagggcaacatggaggccatgagcgaccgggtccgcaaagccacacagcaggtgagggccgcctggacaccacagtcacgctgcctactgtctctcctgcagcaggatcctgcaccagtcaacacacgcgtggcggcttcctgtgtgcaggccctggattgagggacaagagggtggtggggcctgagagtagagatccagggcccttacaccagtgcccaggctgctgtcttcagaatactcctctccacgctgcagtgtctcattttccagccacggcgtggctggctccccgtacctcacggccatccctggagtccgggccttgggatgctctttcattgcgttttcccctagctgaagctctgaccttatccagtgagcccttggtgatgtcactgagcactagttccatggtgggcactagggaccatccagtaacctgcagccccttgtggtgtagggtgaacaggcatcattctccaggcgactccaggacagagaaagcaagggacaagtcactcgctcagcctgggtggcactgacacttgtggaagcacctcttttttttggagacagggtctctctgtggcccaggctggagtgcagtggcgcaatcttggctcactgcaacctctgcctcccaagttcaagggattctcctgcttcaacctcccaagtagctgggactacaggcacgtgccaccactgcccggctaatttttgtatttttaatagagacggggtttcaccatgttggccaggcaggtctcgaactcctgagctcaagtgatttacctgcctctgcttccaaaagtgctgggattacaggcgtgcgccaccacgcccggcctggaagaagctcttgagtggagttttacaggatgaaggagaggacagggtgcccgggatcaagggactcgtgcagaggccaaacaaggcaggaagaggcatggtctcagtgcgctctcttgggcttccctgagtccgcctcatggccttcactctcctccccaggccgagcagctcagcaacgagctggccacagagcgcagcacggcccagaagaatgagagtgcccggcagcagctcgagcggcagaacaaggagctccggagcaagctccacgagatggagggggccgtcaagtccaagttcaagtccaccatcgcggcgctggaggccaagattgcacagctggaggagcaggtcgagcaggaggccaggtatgcgggtgtggagttccgaacccagtttgcaggggggtgatggacagcaggagtcatagtgaagtcagggaacctcttccagcatcagttctggcttgtaagaagcaagctctgtgatgcctacagtgcaggtatgttgtgagaactgaacgtaaacacagcaaagtgccctgctggttcctggcctagggcaagcacctaaagtgtgagctgctcttagcatctccatggtcctcctgacattaacctgccttcccagcagtacatatgacttttcccagcctctgcagggatagcatgctgacagatcaaaaatccaaccaggctggacgtggtggctcacgcctgtaatcccagcaatttgggaggctgaggcaggtggatcacttgaggtcaggagtttgagaccggcctggccaacatggtgaaaccctgtctgtaccaaaaattagccgagtgtggtggcacatgcctattatctcagctactcaggagactgaggcaggagaatcactccaacgtgacacgtggaggttgcagtgagccgagattgtgccactgcactgcagcctgggtgacacagtgggacccttccacacacatacacacacacaaaaaaaaccccaaaaaacaaaagtccaaccggcagcccatttggtacacacactggaagccttcttaattatgggtcgaatgaggcatatgatcacagcacatttcttaccattggattctaaggattctcacccattctcttctagtagctttttcagtaattcgcacgccctgcaatgcacccatttaaagtgtataattcaagggctattcatatattcacaaacatgtaaaaacgatcaccacagtcattttgagaacattttcatcggctcaaacagaaaccccaggccatatgtggtatttcatgcccataatcccggcactttgggaggctgaggtaggtgggagcagcacttgagtccaggagttcgagaccagtctgggcagcatagcaagacttttttatttttatttttttgagacatagtctcactctgtttcccaggctggtgtgcagtggtgcgatctcagctcactgcaacctccgcctcaccctcccaagtagctgggactacaggtgcacaccactgtacccagcttgtaattgtattttttagtagggatggggtttcaccatgttggccaggctggtctcgaactcctgaccacaggtgatctgcccacctcggcctcccagagtactgggattacaggcatgagccaccacgcctggccagagactccgtttctatgaaaaacttttaaaagtctgagcatgctggtgtacgcctgtagtcccagctacttgggaggctgaggtgggaggattgcttgagccaggagttcaaggctgcagtgaactatgaactagggtgaagagcaggcattggagcaccactgcactccaacctgggtcacacagcaagaccttgcctcctccccgcaaaaaaaatagaaaccccatgccctgtaaccactcccttcagtccctggcaaccataatctactttctgtctctatgaatttatctattctggacacttgatatcaacggaatcacacactatgttgtctgctatgtgtcttctttcacttggcaagaattccaggctcatccatgctgtggcatgcattgatactttattccttttcatggctgaatactattccaccatctgactgattcttgagaggagtccagatacggggctcaggaaagcactcaagatgccacctccaggtgacacaccagctacaaggggtgccaccctccgctgaaaccacctgttttccttgctgtttgcagagagaaacaggcggccaccaagtcgctgaagcagaaagacaagaagctgaaggaaatcttgctgcaggtggaggacgagcgcaagatggccgagcagtacaaggagcaggtagcccctgccacccagcctccctcgagcccccagcccccagccggcctcccctaaccacccctccaactctccgcgacaggcagagaaaggcaatgccagggtcaagcagctcaagaggcagctggaggaggcagaggaggagtcccagcgcatcaacgccaaccgcaggaagctgcagcgggagctggatgaggccacggagagcaacgaggccatgggccgcgaggtgaacgcactcaagagcaagctcaggtgaggagcccgtggcccgggaggaccccgtctctcaggccagagaaaagcactgggggctcgggctcctttcggcctgcaaatgccccttgtgcccacagccgccactcccttctgtggtttattcctgcttctccttaatcactaagcttagtgtgggccaggcactgagatcagacccgggccctgccttgcctggtagcagctaaccttctagatcctttaacgatcgaccgtctcccatccggtcctccggctgaggaggaggaagaggctatccccactgtctcctccagcccctccttcattgcatcactgagtcttcacgacatccattgaagctgcaacaccaccccccgccacttcacctccttcctgacatgctctgctcctcctttctccccctcagcactgctgccatctgggctgcattattctcgggtatgggggctgtccgacattccccatcagaaggaaaaagatccctgaaaagtagcaggtgcttacatttctggcctctacccaccggctgcagtagtcccccaccaccctgcaatgtgacaaccaaaaatgtctctagatgttgccagaagtcctctagagatgggagggtacgactgccaccccgctgagaattcctgctgtcactggagtgggggctgttttctctcccatgcctctggtaccttgggggtcccccctgctcccaagggctgcttccaccaccctgtccatccatcccgattggctcccaggaggttttagctccgggcttcctgtctcccacaccactcctcacagttctccatgatttcaacatccaggtgggcgacgcagcctctcggttccttgaccctctgggtgatcctgctgcttctaccgggccaaccagtactcctaggagccctcacaatttgaccctcaggcatcccattgtctgcctggtgccacctttctttggctctgtccccaacggggtcttcactccattaatgccatcagcctctgacccagctccaaaccagctgtctagtaacccccgtcgcgcatcctcaacatccggttccccctcttgcattgctgcaatcatttggtgaaagcacaacccaaatgaaactcaagcttggctgggcacgggactcacacctataatcccagcactttgggaggccaaggcaggtgaatcgctttgagctcaggagttcaagagcagcaagaccccatctctacaacaaacaaacaaaaatcagccaggtgggatggcgcaaacctaaaatcccagctactcaggaggctgaggtgggacgatcagtggagccccagaggtcaaggctgcagtgagccatgatctagccaatgcacttaccctggatggacagagtgagaccctgtctcaaaaaacccaaaacccactctccaccttttcccacagagcaggccttgctcaggggtcctcccacacccctccctcatcttctcactctctgctgcttttcactttttctttgaacttatgatcgctcctccccattctctctcagctggggaccttacttcctacttaactcaaaagcagaaatgatcatgaaacgtgcacaagctcccactgcctcatcatcctacctccgtgcacctctgtacacttctattttttttccatttctatgctgaaccctctggcaccaaccgaggccaacacctccattggacccgaccctcttgttcactcaagcacatagctccaaaaatccttattttgcaaggttttctctttcatttgctccatcagcaaatggaataacctcttagccccatgtctaccttgctacccttactacaaaactggatgtgaatgccgaaaccctgtctctaccaaaaaatataaaaattagccaggtgtggtggtgcatgcctatagttccagctactcaggaggctgaggcacaagaatggcttaaaaccgggagagagaggttgcagtccagcctgggtgacagagtgagactcggtctcaaaaaaaaaaaaactgtatgtgaagagttgctggttcccctcgcccccacccatcactctcccagaagcctcccatgggtgacactaatggccagaggtcccctgacagggcagcagcacgtgacgcagtccatcatgcctctggcctaattcacttgcttccctggacttccccgacaccatccacacctgcttgtcccccgacctgtggggttgtccctcttcctctcctctgctgatccctcacctcgaaacctgcttgccactagaccgccccagggtatcaacttagttctcttttgggcagagtcttgctctgttgcccaggctggagtgcagtagcactatctcagctcactgcaacctctgcctcccagttcaagctatttttggcctatttttatatttttagtagagatggggttgcaccatgttgcccaggctggtcttgaactcctgatcttgtgatccacccgcctcagcctccccacgtgctgggattacaggcatggaccactgcacggccttagttgttttcatctctccccagcgctaggtgagaggtctcaactaatcttggcgctttagaattccatgtatatctaatgactcctcagttcatctctgagaagccctagcttcttcctagaacctcagaccaccctcccgttcccacatggatgtctaataggcagctcacaccaaacatgctgcaccccaagtcctgactgaaactcttcacccccaaactggctcctctctccagctcagcagctaaaatgatgaagttgccaacaattcacatcacaaacctcgtggtccttcttaacgttttggtctcctttataccccacatcccatctatgggagaatctggtcaactttccctaaagaatcctgcccaggctgggtgcagtggctcaccccttaatcccagcactttgggaggccaacgcaggctgatcacctgaggtcaggagttcaaggccagcctgaccaacatggtgaaaccccgtctctactaaaaacacaaaaattagccgggtatggtggggcgtgcctgtaatcccagctactagggaggctgaggcaggagaatcgcttgaacctgggagacacaggttacagtgagctgagatcgcaccactgcacttcagcctgggtgacagaccaaaactcggtctcaaaaaaaaaatctccagtgtctaggacagcaccaggcagagtgaacctttatccctcgggtcctagatattttccccgcttcattctcataccaccacagccatgtgctgagcctcttactacctttaataccaatgacttgatcttttaacagttttaatcatacatgaatataacggcaaataaacatacctcctctatatttttaaaccagcatcacctctatcaactggttacgatgaaagtaatatgataaaaatagtatcaagttcaatatctagctattgtggccacaacttgatcaccaagacctgaagcctacttctccactaaaaagggagtgacaacagccattagcaccaaatagactctctctgacatcataattagacttgtttaaaaagagttggaaaggaaatgactttctcagggcccagttcagttagcggatggcatgcccggaagccatctgaaatcacctctagagtttggggaccactgcgtgagacagggaaaagtccaaacccctctgagaaggggaagagagcagctggcgcagggcaccaagccttcagggaaaagccccactcgctgcatggtgagcgcttgttggtcccccatggataggagagaaaccaggcctaggctcccaaagtacagcaggggcctggaagcatctcccagggttgaggggtcagtggaggagagctgttctcactgtgaagactcctggggcaaagcgcggtggctcacgcctgtaatcccagcactttgggaggctgaggtgggctgatcacctgaggtcaggagttcgagaccagcctggccaacatggtgaaacttcatctctactaaaaacacaaaaatcagctaggcgtggtggcagatgcctgtaatcccagctactcgtgaggctgagacaggacactcctttgcaacccaggaggaggagcctgcagtgagccaagatcaagcctctatactccagccttcagagcaagactctgtctccaaaaaaaaaacaaaaaacaaaaaccctcagatgtgctctgctggcaaccagtccccctgcctctcctgagtggctgggctgagcgatggggatacagccactctgactccctaccccactgctgtctctgcttccctttctcaggcccagtgatttcttttctttttattatttatttttagacggagtctagctctgttgccaggctggagtgcagtggcgcgatctcggctcactgcaacctttgcctcccaggttcaagcgattctcctgcctcagcctcccaagtagctgagattacaggtgcgtgccaccacacctggctaatttttgtatttttagtagtggcaaggtttcaccatactggctgggatggtctcgatctcctgacctcgtgatccacctgcctcggtctcccaaagtgctggggttacaggcgtgagccaccatgcccggccggcccagtgattctttagcacacactggacacctcctgtgggttctgccccagacacttgagccttcttgggcagccaagggcaaagtggaacaaaaagaccatttttgccagttccgacacgaatacacacataatgcaggtggaaggtctgtcctgccttctgcatcttttgggtgcacaaaaacataaaatcaggcactagagccctgagggaggttggtaagcatgcctggctcctcagccaagaaggaactgtagtgcgagtttcaccaagttctatcagccagacgcatctcgacacaagccctctctaaagccagacccacttacctaccactggctacactgccagttacctccggcaagagctgtacaaggcctccacctctcctctcttgctagaggcccgaaagctaatgaagagcaagtaatcataaaccaagggacaggcggctgcaggttccttgcctgggacttcttggcttctgttccaacactgatttctcaaactagcttgctcaaatgcttttacttccctgaaccagtatgcaatcatgggatttataggaggttcttaaaagtagctctaaaggacagacattttcctttccatttaaaaaactgagccgggtgcagtggctcacacctgtaatcccagctctttgggaggccgaggtgggtggatcacttgaggtcaggagttcgagaccagcatggccaacatggtgaaactccgtctctactaaaaatatgaaaattagccagccacggtggtgcatgcctgtaatcccagctactcgggaggctgaggcaggagaatcgcttgaacccgggaggtggaggttgcagtgagcagagatagatcatgccagtgcactccatcctgggtgacagagtatcaaaaaactgcttatcctttcatctaccagcctcaccaaatgctcttggcgtcaggtgattcactgcaacgttgacttaagggtgcttttaatgccaggtgcggtggttcatgcctgtaatcccaaatcccagcaccttgggaggccaaggcaggaagatcattgacatcaggagttggagacaagcctgaccaacatagtgcaaccccatctgtactaaaaatacaaaaattagccaagcacgtggggcctgcctgtaatcccagctactcgggaggctgagacaaggggatcacttgaatccaggacgtagaggttgcagtgagccaagatcgcacccctgcactccagcctgggtgacagagactatctcaaaataaaaaagagtgcctttaattattaaatcgaagcaaatgtctttaacaattaagaatatacttaaccgggctccttcttgtttgctgatggtaacctccggggattctctctctgtttcagagggccccccccacaggaaacttcgcagtgatgcaccaggtatcatgccttcagcttcgcagctgtgtgttgtctcagtatccatttcttttctgcccaatgcgcccctctgcccaccccaatttttaaacccttgcacatttccacgagattcttgcaaaatctggaggcttggatatctttgtgcaaagctttcattgaaaccaagatcaggatgacaaatagacctcatctcttgacccactgtccttcctgcctctgggcagcacatgtgacatgacacccaacagtgtgcgcccttatcactgcatcttgacgagatggcagaggctgtgtgtgtagcttggatttttcttcctttcataccaaaagccactcttacgtggttagggcactcagcagtgctgtcctcccttgtccagtgaagacactgcactgaatgaatatgacagttccactatctgggcacattcctggagaacgtacttggcttctagttggctggtctgggtcacaagtcagagatcacaaagttcacggtaactgcggcgcggcaaccagtcctcccatgattcagctttcacaggcttgtctgcgaaggaaatgagctcactgcgatgtctgacaaatgccgggggctgcacgtggcttgagtgatgtctagctacaaactgcattttcagcacacggggtggaagctgaccaccgcaaagccaagcacagtcctggcagagccttttctggaggcttcacgggcatgtacatgttcagggactggggagtggatacccaagactcaaggatgcacacagggcccttcccaagaaagcatgaagaggtctctgctgctctgggattttgcttttttttttttttttttttgagacggagtctcgctctggagtgcaatggcgcaatcttggctcaccgcaacctttgcctcctgggttcaagcgattctcctacctcagccttctgagtagctgggattacaggctcccgccacctcgcccagctaatttttgtatttttattagagacaggatatcaccatgttggccaggctggtctcaaactcctgacttcaggtgatccgcgcgccttggcctccccaaatgctgggattacaagcatgaccaacttttcacaggtgaagttaggccatgtggatctgacttcacctcatggagaggccaaaccaaccctcatttgtgtccatcttcatttttggagaatctcagctttgctgtcactaccaaaatacttaaagcgcagggtgaggtcttgttaagagccagttttgtgggggagcagatgagtttctaggacacttcaagcagctctcctaccagctgattgggatcataggataagccaaattccagggtgggctgaagtgcagaacccactggtcagtgggaaactgagtccttgcaaactagcaggtgcttacactcaagatgattcccgaggccttggataagctgagtccacgaatagaatccaaatgctaggccaggcacagtgggtcatgcctataatcccagcactttgggaggccgaggcgggcagataacttgaggtcaggaccagcctggccaacatggtaaaaccccgtctctcctaaaaatacaaaaattagccaggagtggtggcatgtctgtagtcccagttacttggaaggctgaggcaggagaatcgcttgaacctgggaggcagaggctgcagtgagccaagatcacgccactgcactccagcctgggcaacacagcgagactctatttcaaaaaaaaattccagattctccaggatcagaccctttaagaaaacctttaggggggtcccttagttcctgtaacaggtatagttggtgtcaaccttggtctaggatttgaaaccagttccaagaaaagcacttcagccaaaacagagtatcttgcaggctgacagccaagcaaggagcttcaacggcccagggcacaatgtatttcttaggtcaagggagcaaatttatccattaagcttttccagttagcaaatagactcttccaagagccaaaaagagagtgcctagagcactgatgtggaggttagggactacttcccagctcatcagatttttttttgtttttttttttggagacagtcttgctgtttcccaggctggagtgcagtggcacaacgttggctcactgcagccttcacctcctgggttcaagcaattctcctgcctcagcctcctgagtgactgggattccaggcgcctgccaccacgcacggctaatttagtatatttagtagagacggggtttcaccatattggccaggatggcctcgaacaactgacctcacgagtgatctgcccacctcggcctccccaagtgctgggattacaggcatgagtcgcagcaactggccaacccatcagggtttgaacctggagttaaaactgtgacgaagagagctgtgtggggagcgtacagggaacagtcaaactgctgctcctctgcgctgaatttgagcatccttctgagtcaagcgcttggaaaacagtgctaaaaaagaaaaagacttaagggtcacatctagagagagaaggatggagagttctctagtagggctgcaagtccagaagcttctctgtgaagctgggctaggagtgtttactttgaagtggctgcagctttaagtatttattcctgatcgctgcactgcgggaagtcccatcctttatagccaggtgggctttcccagccggggtctctcccatcctctgtcaacaaaagggtcatttgcgaattcctcttctcagtgatcatgaatctctgggccttgatttttttttttttttttttttgagacggagtctcaccctgtcgcctaggctggagtgcagtggccacatctcggctcactgcaagctccgcctcctgggttcatgtcattctcctgcctcagcctccctcccgagtagctgggactacaggcacccgccagcacgcccggctaattttttgtatttttagtagagacacggtttcaccatgttagccaggatggtctcgatctcctgacctcatgatccgcccgcctcagcctcccaaagtgctgagattacaggtgtgagccaccatgcccagccgagttgttccttttgactaaagaattggtcactgagttgtgttcatccttatggcttcttatccaacccttgcgtggggagcaaaagtctgctctcttctttgatgtcctaaaataagacctgtcttccgattcaggtcaaacagggccagatggccagagcccaacataattatttgttgcggttgctgaaaagagttaagtgtttcttctgaacggtgaaggctggcagcaggcagatctgatttttccttcttctgcccactctcttcctcctacccaaagtctcccctcacgtgaccagcccttcctgtgaagtcgaggtgataaactcaagagagaaccagcgcagagaggagatggcagcattaaggagagacaggggtgtcctactggctggagctaaaatccacctcagaggccaggtgcactggcacacacctgtaatcccaacactttgagaggctaagacaggtggatcgtttgaggccaggagttcaagaccagcctgggtcacatggcaaaatcccatctctgctaaaaatacaaaaattagccaggcgtggcagtgtgcacgtgcatgtagtcccagctactcaatactgaggctcaaggactgctggaactcaggaggcagaggttgcagtgagccaagatcatgccactgcactccagcctgggtgagagagactcttaaatttcttttttaaatccaccttgaaggccaggtgtggtggcccacgcctgtaatgccagcgctttgggaggccaaggtaggagaactgcttgagctcaggagttccagaccagcctgggcaacaatatcaagacctcatctcaatttaataaaataatccaccttggattaacacgtataatttccttttctaatattcactgggcacctgttttacgccatgtgcggtatgttccacgatcagcaaaacagatgcagcagtccctgcagtggggaaaactcagtccatgaacattcacaccagcagggggtgctgtctcgccttttaaccagggagcccctctgtgtccttctcaaggctgcccttgtccatttcaccttcttccaattcaaatcttgaaaactcacctctaaggcgaatgggggtgaggagatacagaagaaaaacagtatgttctctcttcaactctgccccatgggctatgaataaagtcagaagacaaaatcccctgcttggtttttggcgtttttttcctattctaaatcaaagaccacagcagaccagaatcctgtggcttctcaaatgaccaagcctgacatattgaaaagcagatcgtcttgctttgaaaaaccttctccacccacccccgcaaccaatttcagctgattaaattcaatcactcatgccttaagactggcaatgatttgttgacttcaacttgaatatctgcatcttatttgtgccgtgtgtgttttctgccataaaaaaaatttatattgcaataggactatagctacaagtttaaaatagatttataaaaaatctatcccaaccatgaagatttctttgctaaataatgtgttttcttacaacccacaggcgaggaaacgagacctctttcgttccttctagaaggtctggaggacgtagagttattgaaaatgcagatggttctgaggaggaaacggacactcgagacgcagacttcaatggaaccaaggccagtgaataagcaactttctacagttttgcaccacggcaagaaaaccaaaaaccaaaacaaacaaacaaaaaaaacccaacaacaacccagaacaaagcaaaacccagcagactgtacttagcattgtctaaatccattctcaaattccaaatatcacagacacccctcacacaaggaatataaaaaccaccaccctccagcctgggcaacgtagtaaaacctcatctatacaagaatttaaaaataagctgggcgtggtggtacacacctgtggtcccagctactagggaggctgagccaggaagaacgctccagcccaggacttcgaggctgcaatgagctataattgcatcattgcactccagcctgggcaacagagaccctgtctcaaccaccaccaccaccaccacccctactacccctgtattcaaggtaaaaattgaagtttgtatgatgtaagagatgagaaaaacccaacaggaaacacagacacatcctccagttctatcaatggattgtgcagacactgagtttttagaaaaacatatccacggtaaccggtccctggcaattctgtttacatgaaatggggagaaagtcaccgaaatgggtgccgccggcccccactcccaattcattccctaacctgcaaacctttccaacttctcacgtcaggcctttgagaattctttccccctctcctggtttccacacctcagacacgcacagttcaccaagtgccttctgtagtcacatgaattgaaaaggagacgctgctcccacggaggggagcaggaatgctgcactgtttacaccctgactgtgcttaaaaacactttcactaataaatggttataaatcacaatgtcgttggcttttctgttgagctgttttctatagaggaaaaggagttggggaaggctgggttttgcttcatcgtcccaaagattctctgaagtcagggttaacgtcatgaatgcagaaactgaggcctagagaggtgaaatcaattgcctacaaccccacagccagccagagagcagagcagagatgcaaagtgagactgtctaagggggttactgggccgctcagcagggagggcaggggagagaaataaggtgatgtgtggtctaagggccactgccccctgccctcgaacatgactgggaagaacatcttgactcatcaaaaccagtatcttaagaaaaatacaggatttccttgattttttgagttaaaacacaaggtcttgtccaatgagtcagcaaacactttccacaaaacgtcagatggtggctgggtacagtggctcacacctggaatcccagcactttgggaggctgagatgggaaaatcacttgaggccaggagttggaggccagcctagccgagagagacccccgtctctataaaaaaaaggtgttttttttttgttgttgttagtaagccaggcaggatagtgcacacctgtactcccaacctcttggaaggctaaggcaggaggatcatgtgagccaggagttccaggctgcagtgagctatgatcacgccactgcactgcagcctaggtaacagtaacaccttgtctctcacaccaccaccaccacccacccagccagatagtattttagcctttacaggctacatatggtcttgccgaatattcatcttctttaaaacaacccttaaaaacataataaatcattcttagagtaagggccataaaaacaagctgtaggccctgtccttctttcagcttgagtgttttagacagacatgcctgcaaaggctctgttcaacacaaacgatgccgtataccaccaactccatgggatcagacagatttgggagacaggaaacatggaaacaaaggactccatcttgtgaccagatgctaatatgccttgaatgacgcacaaacacatcccggatacatttctaaaaacctggcttgaatagaaattttcaaaaagattttttcatattttttaacttggttaaaaaaagtttttcaccactctgtgggaaaacattaaagtataaacatacaaagcctctttgaccagaagcccaacaagttcaacattcgtttctcttgattttattgatcttttaaaaaaataaaaggacatcttctgtggatacaggttaggatgtttctagggtaagaaacccaccatcgcagcgtaattctctgcggaatttcagtagcacttggaaagttctgttttcaacctgaaatttttgctgttcttccagaaaataacttagtaacaaaatgaaggccgtgaagctgcaggcacactccagaaattagtgtgttcttttaactcgtgtcccaaagagacagcagttcctaacatgcagtgatgagtggacacaccatggtgcgttggaaatcccacgttcacgtctttgacaaggaagcctcctacaatgatcttgtgctttaattttacttgatggtcaccctggttacttcattatgcctttgaatgaagtcctgttcttagtggctgcattaccaaggccatcttgccccaaagacccctcagggtcctgaggcagaattccccccaccccaccaggggactcaggaaaatgaatgatcgcagtttgccaaaagaggtcagatttcccactgacgctggttggtctggaaaattactctgaaaactcgaacgcacctctaggaatctcaatgagaagctaagaagcaggctacagtctcagaggtttatgacacctttttttttttttttggagacggagtctcactctgttgcccaggctggagtacagtagcgcgatcttggctcactgcaccctccacctcccgggtccaagcaactctcctgcctcaacatctggagtagctggaattataggcacgcaccactgcacccagctaattttttgtatttttagtagagatggggtttcaccatgttggccaggctggtcttgaactcctgacctcaggtaatccacccgcctcggccttccaaagtcttaggattaccggcctgagccaccgcgcccagcctattccagtttttaaaaaggcatgtgactgttaagttctctgttcttagacatgatttcagtacaccacaaagcactgggagattttgttctggaagacgattccacctggttgggagttggggggaagagcctctgagagaagctccatcccacatttacggagacttgggacattaaaaacacctgtcaagaccaatcaggggccaggcacggtggctcaggcctgtaattccagcactctgggaggctgaggcgggaggatcacttgaggccgggagttcaagaccagcatggccaacatggtgaaaccccgtttctcactaaaaatacaaaattagtgggtgtagtggcacactcctgtagtcccagctacttgggaagctgagataagagaatcgcttgaacctaggaggcggaggctgcggtgagccgaaattgcaccactacactccagcctggacaagacagggcaagagcatgactctgtctcaaaaaagaaaaaaaaaaaaaagaccaatcaggacctccgcttgggttagtgcaacacaatggggcatgggaacgatggctcatgcttgaaatcccagcattctgggaggccgagatgggaggatcacttgaggccaggagttcaagaccacactgggcaacatggcaaaaccccgtctctattaaaaatacaaaaaattcagccaggtgtggtggtgggtgcctgtaatcccagctacctggaagactcaggaacaagaaccgtttgaacccaggaggcggaggttgcagtgagctgagatcacgccaccacactccagcctgggtgacagagcaagactctatctcaaaaacaacacggtagcctcatcaccgacaacttagagcccttcccagagagccccttttgtccctctttgcaatgcacacggtggcaggtaaggatgaaaagacatttcccagggacaaaccccagagcacaggtgatggcctcggtcattggcttgggccgcaaagctaactaactatggtgactgctcttatttctcaaactaacttaaaacaaaaacctagtgtaaaaagacgacaaaaggtaacgacttccgcaccaacaccaagaccttcagcttccgtggttttcctaaagcaacatcttgactaccccctgggctgacggcagcggcgatgaagacatgtgtgaaggcggcttcccaaattccaggcgcttccccaaccttcagacagagcaaaccaaattaagctgacataacagctgtgacaaactggctagcaccggggcccagagagttataagggtgaacatcaagagtcaggagcagggtctcacagggtctcaattttctctcctgtgaaatgaagaagaggacactggctacctggctctcagattccaaggtcacacaaaacgcccagtctcagacccactagaaaaatccatctcttacctattgtttgtttgttttacagcctacgcaacatagtgagaccctgtctctatgaaaaatgcaaacaaaaattagctgggtgtggtggcctgcatgtgtagtcccagctacttggtaggctgaggtggaaggatcgctggagcccaggaggcggaggttgcagtgagccgagatcacaccaccgcagtctagcctgggtgacagagtgagaccctgtctccaaaaaaaaaaaaaggccaggcatgattgctaacgcttgtaacccccagcacttgggaggtcaaggtgggaagatcgcctggaaaattaatctgaaaactcacctctagaaatctcaatgagaagcagactacagtctcagaggtgtattctcaaactcaaagccaggaggtttgagaccagtctgggcaacatagcaagactgtttctataaaatataaaaaaaattagccaggggtggtggtgtgcacctgtagccccagctacttgggaggctgaggcaggaagatggcttgagcccaggaggacgaggctgcagtgagctatggtcgcaccactgcactccagcctgggtgacacagcaaaaccctgtctcgtagaaagaaaacaaacaaaaattaatttttttttttttcttgagaaagagtctcactctgttgcccagagtggagttcagtggtgcaatcttggctcactgcaacctccacttcctgggttcaagtgattcttgtgcctcagccacccaagcagctgggactacaggcatccgcgaccatgcccggctaattttcgtatttttagtatagatagggtttcaccatgttgcccagtttggtcttgtgaactcctggcctcaagtgatccacccacttctgcctcccaaagtgctgggattacaggtgtgagccacttcactgcacctggcctaaaaatccacgtgtaaaggtctcaaagttatgtgcatgccatggaaaatattcttaatttcctgtcacgtgtctgctacaaacccatcaaattcctacggcttggggcccagagagatggtagtcacacaccttgcagaattcctgaatctgaaagctgccccttttttttctgagacaaggtctcgcttcatcacccaggctggagtgcagtggctgggaacacggctcactgcggcctcaacctccagagctcaattgatccgctgccctcagcctcccaaagtgctgggattacaagtgtgagccactgagcctggccctgattttctttaggcaagaaaattaatgacactgttagagatcagatctgcactgtcccatcgggtggctggtttcaggaacatagtctgggctagaagttagtgccagtttctcaaaggttctacagatttaaaaagaaaaaaaagggctggttgcagtggctcacgcctgtaatcccagcactttgagagcccgaggtgggtggatcacaatgtcacgagatcaagaccatcctaacacagtgaaaccccgtctcgactaaaaatacaaaaaattagctgggcatggtggcacacgcctgtaatcccagctactcaggaggctgaggcaggagaattgcttggacttgggaggcagaggttgcagtgagctgagatcatgccactacactccagcctaggcgacagagcaagacgtctcaaaaaaaaaacaaaacaaaacaaaaaaaaaaacttcaggggaagcagagccatgactgatgctcaattccccaaataagggctttatttttatttaactaattaattaactttttgatatggagtcttgctctgtcacccaggctgctgtgcagaggcacaattttggctcactgcaatctctgcctccagggttcaagtgattctccttcctcagcctcctgagtagctgggactataggcacatgctaccatgcctggctcatttttctattttttttggtggagatggggttttaccaatgttgcccagactggttttgaactcctgacctcaagtgatccacctgccttggcctcccagactgctgggattacaggcgagcgtcaccacacctggcccaaataagggcttttatacaggacattctcacagtgtaaccgtgagtagcagctgtagaatcaaatgataaaaatgaccttcttggccaggcatggtagcccacacctgtcgtcgcagcactttgggaggatgaagggtgaggatcacttgaagctcagagtttgagaccaaactcggcaacatggcaaaacctgtctctagaaaaaatacaaaaaattagccgagcacggtgacacgcacctgtactcccagctactcgggggactgaggtgggaggatcgtttgagctgggaggcagagggtgagccatgatcctgccatcgtattctagcctaggtgacagagtgagaccctgtctcacaaaacaagaccctctctctagccctttgttcaagccacaagacaccacctaatgctgcctgcagggagcagaggagaggataaggtttgctgaaataatcctataatttaaaaagacacatggctgtgggctgggggtgagtgtctcttgcctggggcaggcgggttctccccgccagcgagaggtttattagaaggtactgaccccttatcacccaaaggcacgctggtgctgcttggccgtctctccccgccatctctgttcttgctgctccgcccagaggctgggccacctgttcggtttggggactgatcgtacacgaggttccggcaggaagcgagtttggactccagtgcctggacagaaatacacttttatctctcaagttataggcaaggactattctgtcttaccagagcctgtacagaagaacgaaccccagacagtggttctcaaactgttgtgcactggaattccaaggtgggaccccaagaggaatccaacgtatatgccagtctcagaaccaagcaccttaagtatttgggagctggctgggcacaatggctcacacctataatcccagcactctgggaggccaaggcaggaggatggcttgacatcaggagtttgagaccagcctgggccacaaagtaagatcccatctcagtttttttttttgttttgttttttacttttttagacgctgtgtcacccaggctggagtgcactggtgagatcacagctcactgcagcctcaacctcccaggctcaaccaatccctcccacctcagcctcctgagcagctggaattataggcatccgcaatcatgcccagttaataaaaaaaatttttaatgcaaaaaattttttttaattacgaaaaattttttaaaatgtttgggagctgcctggaaaaagatcacggctcactgcagcctcaaccaatccttccacctcagcctcctgaatagctaggactatgcacaatcatgcttggcttaaaaaaaaaaaaaaaattcttttttaattacaaaaaattttttaaaatgggagctttctggaaaaatcactaacctaccaattatccaactccgcttgtaggaagtaggaaatccacttctggaatccttcaccctttggtttaccttgttaaacctctgcagaatggcaagaagtttggtaaggacttggtctggctacaacagaccctgaggaaaccaaaaggacactgacagcaccccaggcttctctatactccaactaggctaaatactgaaatgcagacctgcttctagaatagcaaaccagacagccaaaaaccagaagtaaaaacaaaagaaatgagttgcaagcttctattaagttgtagctacaaatacactgtgtacagtgacaacttggtaggagttaaattatgtggccttctaggcatcatttttaaaaataaactacaaagaatacctatgtttttacttaagcacaaaaggatccctccctgtaattaacataaaagctgaaaggccaaattctttgccctaggctttcaagattttttttttttttttttttgagaccaagtctcactttgtcacccagcggtgcgatctcagctcactgcaacctccgcctcccggattcaaacaattttcctgcataagcctctcaagtagctgggatcgcaggtgcccaccaccattcctggctaatttttgtatttttagtagagatggggtttcaccatgttggccaggctggtcttgaattcctgacttcaggtgatccacccatctcggtctcccaaagtgtcaaaattcacttaaaccccaagaaacaaaccaaaaaaaaaaaaaaaaaaaaaaaaggtggcagtttttttctcttctgagacaacgtcgtgctgtcacccaggatggagtgcagtgttggaatctcagctcactcagcctcaacctcccaggctgaagcaatcctcccacctctcagcctcctgagtagctgggaccaccagtgtacaccatcaggcctggctaatttttgcattcttgtagaggccaagtcggggcagggggtttcaccatgttgcccgggctggtgtcagactcctgagctcaagtaatctcccaccttggcctcccaaagcactgggattacaggtatgagcacccggccaaaagagaaggcagtttccaagtgctccttaatttttcgagttaaggaaaaaacacacatatcaccctaatttcccaaatttcctagaggaaaaacggtaaaaggaaagagacatacatagggttcagagcagggcttcgagtcagagctctgagtgtctggcagtaactcccacaggaagctctaatgattcccagggatgctaaaggagcagccacacctaaaactcaccacactgctatgaaaggggctggacgcattggctcatgcctgtaatcccagaactttgggaggccaacctgggaggatcacttgaggccaggagtttaagaccagcctgggcaacacagcgatacccacattactacaaaaaaatgaaagtatcagccaggcatagtggcgcacacctgtggtccaagctcctcgggaagctaaggtgagaggatcgcttgaacccaggattttgaggctgcagtgagttgtgatcataccactacactccagcctgagcaacagagcaagaccctgtctctaaaaaaaaagaaaaaaagaagagagggaaggaactagatcaacccccttcacacatcctgaaagacaggcaggaaggcaccaaacgccaggaaagtgtggtcttaccccgactttccgcagtaggtctcccacaatgttgagggctgatatccgggccgcaggtgtgaggggggtccccccggtggagtcgtccaggcctgggtgtgcaaagggaagagcatgtaactcaccaacctatagtcatgtctgtgcgttaacatcgctagatccaaaaccacgggacaggagggacactgacgcctttcctcggatcccaaaagctaccctatttctttccgtagttaaccgcatcacacacccaaggcccgtatgacaaccaatttttcaagtccttgtgatgactgcaacaaatacttatttttacatgttagtcttgctctgtcacccggactggagtgcggtgatgtgatctcagctcactgcaacctccgcctcccaggttcaagcgattctcctgccttggcctcttgagtagctgggattatagccatgtgccaccacacccggctaatttttgtatttttagtagagacagagttccatcacgttgtccaggctggtctcgaactcttgacctcaaatgatctgcccgccttggcctccaaaagtgctgggattacgggcgtgagccaccatgcctggcctttaacaaattttttttttaatagagacagggtctcactatgttgcccaggctgatcatgaactcctagtttcaagcgatcctcccaccttggccgcccaaagggctggtatttacaggcatgagccaccgtgcccagccacattagtctttttaaacaaacccaaaacaaatccttttgaaattgtagaaaatccatatagttaattaacataatggcatctgtgatagatacaagaactatagacaggatgatccagctttacaagggtcccgctctgcagagcctctcttctccaagtggggtccatgcaccagcagcacatgagaactgttagaaatgcagaatctctcggccaggcacagtagctcacacctgtaatcccagtgctttcagaggccgaggcagttcgatcagttgaggtcaggagttcaagaccagcctggccaacatggcaaaatcttgtttctactaaaaatacaaaattagctgggcatggtaacaggtgcctgcctgtaatcccagctactcgggaggctgaggcatgagaatcgcttgaatccaggaggcagaggctgcagtgagccaagatcaatgccgctgcactccagcctggccgacagagcaagactttgtctcaaaaaaaaaaaaaaagagagaaagaaatttcaggccccacccaagacccacttgatctgaggtacattctaccaagatccccaggtaagctacatgcatattgaagtgtggaaacatagccaggcatggagttgcatgcctctagtcccagctactcaggaggctgaggcaggaggatcactggagcccaggagttggaggctgcagtgagctatgattgcaccactgcactccagcctgggccacagaccaagactgtgtctctaaaaacaacaatgaaataaagtatgcaaaatggctctagactggggctaggcacagtgactcatacatgtaataccaccactttcaggggctgaggcaggcagatcacctgaggtcagtagtttgagaccagcccggccaacatggtgaaaccccatctctactaaaaatacaagattagccaggcatggtggtgggcacctgtaattcaagcttactcaggaggctgaggcaggagaatcacttgaacctgggaggagggggttacagcgagccaatatcgcaccattgcactccagcctgggcaacagagcaaaactccatctcaacaaaactaaacagaagggctctgcaccggaattctagaagtctcactggtctcttcatgcccaggggacaagctaagggataaggtagtagatggtagggtaagccctggagcctgcctgcctgggtctgaatcccaaaccatctgccattcaattgcttcatgactctgcttaactcagagcctcactttcatcaaacggggacagcacctgcatcctgggcctgcggcgaaggctgcaggctggccagcacacactgagcactccttaactgtctgttattaatatctgctgtaaaaggcctgatcggaagctgtcagcagaggggctggggtgagaactgagattctttttttctgcccatgcagcacacgttacgctgagtctagctctcggtggatgtattactaaacccacagaacgctttttacttttttgtatttggtcagtgacatttcaaatttgggaggttttatattcaacaagaggatttttgaccaggcgcggtggctcacacctgtaatcccagcactttgggatcagccgaggtgggcggatcacttgagtccaggaatttgataccagcctgggcgacatggcaagactgtgtctccacctaaaatacaaaagttagccaggtgcctttagtcccagctactccggaggatgaggtgggagaatcacttgagcccacgatgaagaggttgcagtgagccaagatcacgtcactacactccagcctgggcaacagagtgagatcctgtctcaaaaaaaaaaacccaacaaaaaaaaagaggatttctggctttgaagaatggaaaaagctgcagatgaagggccaatcctcgtagctgcagagtggcagccacccgctctgggtggggtttccatttcatcagactccactactgcctcttacccagtcctcactgatctcaatgcccatccccaagaacatcccagtctactctctgctcaaagcctgagagcaaatcaggctctgagcctgatgcaaatcatcacacccccaggacccaccccagattcttacccagaaacactttgtgaaccgagaaaatcctgcaattcccactccccttaccacgtctgaagctcccaggtgtgtttaaacttgagctgggtcctcggtgagcaatgggcgtggacggcacggagcccgtggcctgcacagctgtgtctgtcctctcagcttccactgagctgggcatgggggtcctgggtttctcctgcttctgctgcacggccagttcctgccgcaaatctgtgccagaaaaaggattcaggaattcaagtcctcagccaggcgcagtggctcatgtttataatgccagcactttgggaggccaaggcaggtggatcgcctgaggtcaggagttcgagaccagcctgaccaacatggtgaaacctcatctctattgaaaatacaaaaattagcccagcatggtagtaggcacctgtaatctcagctactcaggaggatgaggcatgagaatcatttgaacctgggaggccagggtggcagtgagctgagattgctccagcgcactccagtctgggtgacaagagcaagactacgtctcaaaaaacaaaaagggaatttaagtccttgcttagggttggtggggtgcagggagagaggttcaacagtagataccagtcagaaaaaagacctactggggtgaaacactccaggtagaaaccccaaataaagggaaacccacaggaccttgcctagcagacttggaactctacaggatgtttctcttgactaacaaaatggtttcagatttttaaaaagctatgacagtgacacactaatgcttttattattgaaaaaacaattccaacatagcagtgtatttagaacactaaatgaaaatatgcccgggagcagtgactcatgcctgtaatcccagcactttgggaggctgaggtgtaagaatcacattaatccagtaagtcgaggctgcagtaagccatgatcataccacttcagcctgggcgagagtgagacctctggctcaaaaaaaaaaaaaaaaaaaaaaaaaaaagaaaaaaaaaaaaaaaggccagttgcactggctcaagcctataatcccagcactctgagaggtcgagatgggaggattgcttgaggtcaggaattttcaggccaacatggcaaaaccccgtctctattaaaaatacaaaaaattagccatgcgtggtggtgagcgcctgtagtcccagctgcttgggaggctgaggcaagacaatcgcttgagcctgggggacaagcagtgagtgcagtgagctgagatcacgccactgcactccagcctgtgtgacagagcaagactgtctcaaaaataaataaagtatgctttccagactatccccaaatgctcctcctcactcatcatcaccataacatgtgggagagcttttcaaccattgttctctgaatttttttttttttttttttttgagatggagtttcactctcttgcccgggcttaagtgcagtggcacagtctcggctcactgtaaatctgcctcccgggttcaagtgattctcctgcctcagcctcccaagtagctgggattacaggcacgcaccaccacacctggctaatttttgtatttttagtagacacagggtttcaccatgttgtccaggctggactctaactcctgacctcaggtgatccacccaccttggcctcccaaagtgctgggaatacaggcgtgagccactgcgcccagctgttctctccattttcaaacataaactttatacatatgtatgtatctactgagcataaaacaagaaaattttttattaagcattactggaaacatacaatatgttgtcctgtgtatgacttactctccccacttcagtggtatgtcttggcaatgatttttgttttagagacagggtctgactcagtcacccaggctggggtgcggtggcacaatcatagctcaatgtaaccttgaactcctgggctcaagtcatcctcccacttcagcctcctaagtagctggaactacagacatatgccaccaggcctaatttttacaattttcatttttgtagagatggggtatcactatgttgtccaggctcatcttgaactcctaggctcaagcaatcctcttgcgtccgtctctcaaagcactgagattacaggcatcagccactgtgcctagccttggcaatctttctaccacaacatttctatctactgttcattttaaccattaacatttcacaaaatacatctatgtacttcatttaaccacttcattactgatggacatctaggaacaactactttattaaacttaagaatttttactttttatcccccacctactggttacacattagaaagcaaatcgacgttataaataattaattgggccagcaacagtgacccacccctataatcccagcactttgggaggccgaggcaggcagatcgcctggggtcaggagttcaagaccagcctggccaacatggtgaaaccccatctctattaaaaatataaaaattagccaggcatggtggtgcacacctgcagtcccagctactcaggaggctgaagcaggggaatcgctgaacctgggaggcagaggttgcagtgagcagagatagcaccactgcactccagcctggacaacagagcaagacgccatctcaaaaaaaaaaaaaaaaaaaaaaaaaaaggtaaaaacaacttggacaatccactaatgaatgtcttttttttttttttttttttgagacaagagtctcactctgtcacccaggctggagtgcaatggtgtaattttggctcactacaacctccacctcccaggttcaagcaattctcgtgcctcagcctcctgagcagctgggattgcaggcacccaccaccataccctcatgttttctatttttagtagagatggggtttctctatgttgtccaggctggtctcaaactcctgagctcaggtgatccacctgcctcagcctcccaaagtgctgggattacaggtgtgaaccactgtgcctggccaaatgcctcattacagtttcaacattctacctctggaagtgccaactgaaaaagagcaaatgctgatgaggtttcaaagttttagccaaatatattggttgccatcaagtcacaaaaataataggctagctggcaattccaccagaaatttctccccacaacatctttgcttcttaagagacagggtctcactctgtcacccaggctggagtgcactggtgccatcatagctcactgcatactccacctcctgggctgaagcaatcatcccaccttggcttcctgagtagctgggactacaggcacatgccatcacacccagctaatctttaaatgtttttgtaaagatggagtcccactatgctgcccaggctggtctcaaactcctgggctcaagagatcctcggcctcccaaagtgctgggattacaggtgtgagccactgtgccagatctccccacaaaactctctgttcctactgagcatcagggtagtttgctgtgtttgtgaattacagaccaggaagcatctttctggaaataaattctgctgcccagaggcagaatcccaatacaaggacttcatctgtgaaccccaaagctatttctctaaatacccataaggggcccttacagggctggatgtctgactgttctcagctccagccagggcccaaggcaagagtctgcccagtgcagtccgacaccctctgattagacaacctgggtgcagagcagggtgtggggtccctgtaaagataatgctgggagagcttgtgggacaagatgttgctcaggtagggagaggggaccatgctggtgaagacaccaaggcctcctgacctctggcttcatccttcagtctctgaacagattccaggagattctctttttcatcaagttcactttccaggaaggcatttctttcgatggcctgattcaagcgctgctcaaagtcttcgagagacatgatcgtggcgctggcgaagagaaaagcagagttatccaagaggacaaaccgcagcatccctccagcaccgcggatccaggaggtgcgaagggtcagacacacctgggcacaagtcccagccccaaacttcctagatgccacagagtgggccaagtcccttaaccttctggggcatgggctctttacctgcagaatgggactcatcatagctcatggggtgcacgaggctgtcatgaggattaaataagatgctgcccacacagcactcagcaataagccaaagccctatcaggactgcatgtggcatttggtggtttgagaagaccactatgctccatcttctcttgcaagctcacaatgccaaccagcattaaaaataacctaatatgactgggcaaggtggctcatgcctgtaatcccagccctttgggaggccgaggcaggtggaagacctgagatcaggagttcaagaccagcctggcaagctt

SEQ ID NO: 364 - DNA, 6227 bp, Homo sapiens
  Genbank Accession No. AF001691
cgcgccgccgctcgctcacctgcgctcccgcccgcccctcggtgcgcgcccggcccgccagccgccgccgcccgcaccccgagcgccaccatgaactcgctcttcaggaagagaaacaaaggcaaatacagccccactgtgcagacccggagcatctctaacaaggagctctcggagctgatcgagcagctgcagaagaatgccgaccaggtggagaagaacatcgtggacacagaggccaagatgcagagtgacctggctcggctgcaggagggtcggcagcctgagcaccgggacgtgaccctgcagaaggtgttggactctgagaagctgctctatgtgctagaggcggatgcggccattgccaagcacatgaagcacccacagggggacatgatcgccgaggatatccgccagctgaaggagcgtgtgaccaacctgcgcgggaaacacaagcagatctacaggctggcggtgaaggaagtggatccacaggtcaactgggcggcactggtggaggagaagctggacaagctgaacaaccagagctttgggactgacctgccgctggtggaccaccaagtggaggagcataacatcttccacaatgaggtcaaggccatcgggccccacctggccaaggacggggacaaggagcagaacagcgaactccgggccaagtaccagaaactgctggcagcatcacaggcccggcagcagcacctgagttcgctgcaggactacatgcagcgctgcaccaatgagctgtactggctggaccagcaggccaagggccgcatgcagtacgactggagtgaccgcaacctcgactaccccagccgccggcgccagtatgagaatttcatcaaccggaacctggaggccaaagaggagagaatcaacaaactgcacagcgagggcgaccagctgctggcggccgagcaccccgggaggaactccattgaggcgcacatggaggctgtgcacgcagactggaaggagtacctgaacctgctcatctgcgaggagagccacctcaagtacatggaggactaccaccagtttcacgaagacgtgaaggacgctcaggagctgctgcgcaaggtggactcggacctgaaccagaagtatggccctgacttcaaggaccggtaccagattgagctgctgctgcgggagctggatgaccaggagaaggtgctggacaagtatgaggacgtggtgcaggggctgcagaagcgaggccagcaggtggtgcccctcaagtaccgccgggagactccgctcaagcccatccccgtggaggcactctgtgactttgagggggagcagggcctgatctcgcggggctacagctacaccctgcagaagaacaacggggagagctgggagctcatggacagcgctgggaacaagctgattgctccggccgtctgttttgtgatcccccccacagaccctgaggccctggctctggctgacagcctgggcagccagtaccggagcgtgcggcagaaggcagctgggagcaaacgcacgctgcagcagcggtatgaggtgctgaagaccgagaatcccggagatgcctctgacctacaggggcggcagctgctggctggcttggacaaggtggccagcgacctggaccggcaggagaaggccatcacagggatcctgcggccaccactggagcaaggccgggctgtgcaggacagtgccgagcgggccaaggacctcaagaacatcaccaacgagctactgcggattgaacctgagaagacgcggagcacggctgagggcgaagccttcatccaggccctcccaggcagtggcaccacacccctgctgaggacccaggtggaggacaccaaccggaaatacgagcacctcctgcagctgctggacttggcccaggagaaggttgatgtggccaaccgcctggagaagagcctgcagcagagctgggagttgctggccacacacgagaaccatctgaatcaggatgacacagtgcctgagagcagccgtgtcctggacagcaaggggcaggagctggcggccatggcctgtgagttacaggcccagaagtccctcctgggtgaggtggagcagaacttgcaggcggccaagcagtgctcgagcacactggccagccgcttccaggagcactgcccggacctggagcgccaggaggccgaggtgcacaagctgggccagcgtttcaacaacctgcgccagcaggtggaacgcagggcgcagagcctacagagcgccaaggcagcctacgagcacttccaccgcggccatgaccacgtgctgcagttcctagtcagcatccccagttacgagccccaggagacagacagcctcagccagatggagaccaagctgaagaaccagaagaacctgctagatgagatagcaagtagggagcaggaagtacagaagatctgtgccaattcccagcagtaccagcaagctgtaaaggactatgagttagaagcagaaaaactaaggtctcttctcgacttggagaatggaaggagcagccacgtgagcaagagagccaggctccaatctcctgccaccaaagtgaaggaagaggaagcagcacttgccgccaagttcactgaagtttatgccatcaacagacagaggctgcagaatctggagtttgctctgaatctcctcagacagcagccggaagtagaagtgacccatgagaccctgcaaaggaataggccggactctggagtggaggaggcgtggaagatcaggaaggaactggatgaggagactgagcggaggcggcagctggagaacgaggtcaagagcacccaggaagaaatctggaccttgaggaatcaggggcctcaggaatcggtggtgaggaaggaggtgctcaagaaggtgccggatcccgtgctggaggagagcttccagcagctgcagcggacgctggcagaggagcagcacaagaaccagctgctgcaggaggagctggaggcactgcagctgcagctgcgtgccctggagcaggagaccagagacggggggcaggagtacgtgttcaaggaggtcctgcgcatcgagcctgacagggcccaggcggatgaggtcttgcagctgcgggaggagctggaggcactgaggcggcagaagggcgcccgggaggcagaggtgctcctcctgcagcagcgtgtggccgccctggctgaagagaagagccgggcgcaggagaaggtcacagagaaagaggtggtgaaactgcagaatgacccccagctggaggcagagtaccagcagctgcaggaggaccaccagcgccaggaccagctcagggagaagcaggaggaggagctgagcttcctccaggacaagctcaagaggctagagaaggagcgggccatggccgagggcaagatcaccgtcaaggaggtgctcaaggtggagaaggacgcggccaccgagagggaggtcagcgatctcacccgccaatatgaggacgaggctgccaaggctcgcgctagccagagggagaagacggagctgctccgaaagatatgggccttggaggaggagaacgccaaagtggtggtgcaggagaaggtgcgggagatcgtgcggccagaccccaaggcggaaagtgaagtggcgaacctccgcctggagcttgtggagcaggagcgaaagtaccggggtgccgaggagcagctccggagctaccagagtgagctggaggccctcaggaggcgaggcccccaggtggaagtcaaagaggtgactaaggaagtcattaagtacaagactgaccctgagatggagaaggagcttcagcggctcagggaggagatcgtggacaagaccagactgatcgaaaggtgtgatttagagatctaccagctgaaaaaggaaatccaggccctgaaagacaccaaaccccaggtccagaccaaagaggtggtccaggagatcctccaattccaagaagaccctcaaaccaaggaggaggtggcgtctctgagggcaaagctctcagaggagcagaagaaacaagtggatctggagagggaaagagcttcccaggaagagcagatcgcccggaaagaggaggagctctcgcgggtgaaggaaagggtggtgcagcaggaggtggtcaggtatgaggaggagccaggcctccgggccgaggcgagtgcctttgccgagagcatcgatgtggagctgcggcagattgacaagctgcgggcagagctgcggcggctgcagcgccggcgcaccgagcttgagcggcagctggaggagctagagcgcgagcggcaggcccgcagggaggccgagcgcgaggtacagcggttgcagcagcggctggcagcgctggagcaggaagaagctgaggcccgtgagaaggtaacccatacgcagaaggtggtgctgcagcaggacccgcagcaggcgcgagagcatgccctgctccgactccagctggaagaagagcagcaccggcggcagctcctggagggggagctcgagaccctccggaggaaactggctgcactggagaaggcggaggtcaaggagaaggtggtgctctccgagagtgtccaggtggagaagggcgacaccgagcaagagatccagaggctcaagagcagcctggaggaggagagccgcagcaagcgcgagctggacgtcgaggtgagccggctggaagccaggctttcggagctggaattccataactccaagtcatccaaggaactagactttctgagggaagagaaccacaaattacagctggagaggcaaaacctgcagctggagacccgaaggctccaatcggaaatcaacatggcagcgacggaaacacgagacctgcggaacatgaccgtggcggactctgggaccaaccatgactccagactgtggtccctggagagggaactggatgacctcaagaggctctccaaggacaaagacctcgagatcgacgagctgcagaagcgcctgggctccgtggccgtcaagcgggagcagcgggagaaccacctgcggcgctccatcgtagtcatccaccttgacacaggccgcgagctgtccccggaggaagcccaccgtgccgggctcattgactggaacatgttcgtgaaactcagaagccaggagtgcgactgggaggagatctcagtgaagggtcccaatggggagtcctcagtgatacacgacaggaagtctggcaagaagttctccatcgaagaggccctgcagagtggcaggctgacccctgctcagtatgaccgctatgtcaacaaggatatgtccatccaggagctggcggtcttggtatctgggcagaagtaggcacagctcttgcaactcttcgtaacggcagacgctggccctctcctacgacgcagtgacctccttggtgtcgtcctctccctagccctggtgcaggccaagcattttatacataccctcgctgccaggctgctcagagtcccgcccacatatgagacaggcactggctgaagacaggcaactctcgtcccaaccatcattcaccctgagtgacgtacttcatcctccaatgactggacaactgcgatgccttttcctcccttttcctgtacactcccagcaacaaactcctcatgataactgcacacaatctgaaaaccactgaaggacaagccaaccacagcagccaagcccactccttgcagcatgggtactggtggcacaccagacagtgacactgccccacaaaggcctgggcccgtgggggctgctgcctggcatgacatctctccagatttctggcttaaaacaactttccatccgagaagcctcctcagtagttactctgctcatgagacagatctgggctccaagccaggaaaggtgaacagaaaccacaagtgtccagccctcggtgctggagtggacgttaattgtcagccaccagactgtcccggcacctacagagaatgtttcacagttctggcatttaaatcctttgatagtggattgtgctgctgttagccttagtttcagtgctttacaagtctcgcttattatctcattggtatttaggtatacaaaacagttgattattcaccacgccaatatctgggtctctgtatctcatgtagaacataagaaaatgggaactaatagggaactttatttatagcatgaaaataaacctggtggctggagtctga

SEQ ID NO: 365 - DNA, 1535 bp, Homo sapiens
  Genbank Accession No. AF002697
cctccgctcagtccgggagcgcacgtgggccgcggcgctccgacctccgctttcccaccgcccgcagctgaagcacatcccgcagcccggcgcggactccgatcgccgcagttgccctctggcgccatgtcgcagaacggagcgcccgggatgcaggaggagagcctgcagggctcctgggtagaactgcacttcagcaataatgggaacgggggcagcgttccagcctcggtttctatttataatggagacatggaaaaaatactgctggacgcacagcatgagtctggacggagtagctccaagagctctcactgtgacagcccacctcgctcgcagacaccacaagataccaacagggcttctgaaacagatacccatagcattggagagaaaaacagctcacagtctgaggaagatgatattgaaagaaggaaagaagttgaaagcatcttgaagaaaaactcagattggatatgggattggtcaagtcggccggaaaatattccccccaaggagttcctctttaaacacccgaagcgcacggccaccctcagcatgaggaacacgagcgtcatgaagaaagggggcatattctctgcagaatttctgaaagttttccttccatctctgctgctctctcatttgctggccatcggattggggatctatattggaaggcgtctgacaacctccaccagcaccttttgatgaagaactggagtctgacttggttcgttagtggattacttctgagcttgcaacatagctcactgaagagctgttagatcctggggtggccacgtcacttgtgtttatttgttctgtaaatgctgcgttcctaatttagtaaaataaaagaatagacactaaaatcatgttgatctataattacacctatgggatcaataagcatgtcagactgattaatgtctactgtgaaaatttggtagtaaattttcatttgatattagatataaatatctgaatataaataattttaatatactagtcatgatgtgtgttgtattttaaaaattatctgcaaccttaattcagctgaagtactttatatttcaaaagaatgaataacattgataataaaatcgctactttaaggggtttgtccaaaataaatattgtggccttatatatcacactattgtagaaagtattatttaatttaaatggatgcaggttgtctactaaagaaagattatatataactatgctaattgttcataatcaacagaaaccaagatagagctacaaactcagctgtacagttcgtacactaaactcttcttgcttttgcattataaggaattaagtctccgattattaggtgatcaccctggatgatcagttttctgctgaaggcacctactcagtatcttttcctctttatcactctgcattggtgaatttaatcctctcctttgtgttcaacttttgtgtgcttttaaaatcagctttattctaagcaaatctgtgtctactttaaaaaactggaaatggaaaaaaaaataaatctt

SEQ ID NO: 366 - DNA, 2897 bp, Homo sapiens
  Genbank Accession No. AF004230
cgcagctcagcctgggcggcacagccagatgcgagatgcgtctctgctgatctgagtctgcctgcagcatggacctgggtcttccctgaagcatctccagggctggagggacgactgccatgcaccgagggctcatccatccacagagcagggcagtgggaggagacgccatgacccccatcctcacggtcctgatctgtctcgggctgagtctgggccccaggacccacgtgcaggcagggcacctccccaagcccaccctctgggctgaaccaggctctgtgatcacccaggggagtcctgtgaccctcaggtgtcaggggggccaggagacccaggagtaccgtctatatagagaaaagaaaacagcactctggattacacggatcccacaggagcttgtgaagaagggccagttccccatcccatccatcacctgggaacatgcagggcggtatcgctgttactatggtagcgacactgcaggccgctcagagagcagtgaccccctggagctggtggtgacaggagcctacatcaaacccaccctctcagcccagcccagccccgtggtgaactcaggagggaatgtaatcctccagtgtgactcacaggtggcatttgatggcttcagtctgtgtaaggaaggagaagatgaacacccacaatgcctgaactcccagccccatgcccgtgggtcgtcccgcgccatcttctccgtgggccccgtgagcccgagtcgcaggtggtggtacaggtgctatgcttatgactcgaactctccctatgagtggtctctacccagtgatctcctggagctcctggtcctaggtgtttctaagaagccatcactctcagtgcagccaggtcctatcgtggcccctgaggagaccctgactctgcagtgtggctctgatgctggctacaacagatttgttctgtataaggacggggaacgtgacttccttcagctcgctggcgcacagccccaggctgggctctcccaggccaacttcaccctgggccctgtgagccgctcctacgggggccagtacagatgctacggtgcacacaacctctcctccgagtggtcggcccccagtgaccccctggacatcctgatcgcaggacagttctatgacagagtctccctctcggtgcagccgggccccacggtggcctcaggagagaacgtgaccctgctgtgtcagtcacagggatggatgcaaactttccttctgaccaaggagggggcagctgatgacccatggcgtctaagatcaacgtaccaatctcaaaaataccaggctgaattccccatgggtcctgtgacctcagcccatgcggggacctacaggtgctacggctcacagagctccaaaccctacctgctgactcaccccagtgaccccctggagctcgtggtctcaggaccgtctgggggccccagctccccgacaacaggccccacctccacatctggccctgaggaccagcccctcacccccaccgggtcggatccccagagtggtctgggaaggcacctgggggttgtgatcggcatcttggtggccgtcatcctactgctcctcctcctcctcctcctcttcctcatcctccgacatcgacgtcagggcaaacactggacatcgacccagagaaaggctgatttccaacatcctgcaggggctgtggggccagagcccacagacagaggcctgcagtggaggtccagcccagctgccgatgcccaggaagaaaacctctatgctgccgtgaagcacacacagcctgaggatggggtggagatggacactcggcagagcccacacgatgaagacccccaggcagtgacgtatgccgaggtgaaacactccagacctaggagagaaatggcctctcctccttccccactgtctggggaattcctggacacaaaggacagacaggcggaagaggacaggcagatggacactgaggctgctgcatctgaagccccccaggatgtgacctacgcccagctgcacagcttgaccctcagacgggaggcaactgagcctcctccatcccaggaagggccctctccagctgtgcccagcatctacgccactctggccatccactagcccagggggggacgcagaccccacactccatggagtctggaatgcatgggagctgcccccccagtggacaccattggaccccacccagcctggatctaccccaggagactctgggaacttttaggggtcactcaattctgcagtataaataactaatgtctctacaattttgaaataaagcaacagacttctcaataatcaatgaagtagctgagaaaactaagtcagaaagtgcattaaactgaatcacaatgtaaatattacacatcaagcgatgaaactggaaaactacgagccactgcgcccggccacattcagttcttatcaaagaaataacccagacttaatcttgaatgatacgattatgcccaatattaagtaaaaaatataagaaaaggttatcttaaatagatcttaggcaaaataccagctgatgaaggcatctgatgccttcatctgttcagtcatctccaaaaacagtaaaaataaccactttttgttgggcaatatgaaatttttaaaggagtagaataccaaatgatagaaacagactgcctgaattgagaattttgattttttaaagtgtgtttctttctaaattgctgttccttaatttgattaatttaattcatgtattatgattaaatctgaggcagatgagcttacaagtattgaaataattactaattaatcacaaatgtgaagttatgcatgatgtaaaaaatacaaacattctaattaaaggctttgcaacacaaaaaaaaaaaaaaa

SEQ ID NO: 367 - DNA, 1428 bp, Homo sapiens
  Genbank Accession No. AF006084
ggcacgagggagcccagagccggttcggcgcgtcgactgcccagagtccgcggccggggcgcgggaggagccaagccgccatggcctaccacagcttcctggtggagcccatcagctgccacgcctggaacaaggaccgcacccagattgccatctgccccaacaaccatgaggtgcatatctatgaaaagagcggtgccaaatggaccaaggtgcacgagctcaaggagcacaacgggcaggtgacaggcatcgactgggcccccgagagtaaccgtattgtgacctgcggcacagaccgcaacgcctacgtgtggacgctgaagggccgcacatggaagcccacgctggtcatcctgcggatcaaccgggctgcccgctgcgtgcgctgggcccccaacgagaacaagtttgctgtgggcagcggctctcgtgtgatctccatctgttatttcgagcaggagaatgactggtgggtttgcaagcacatcaagaagcccatccgctccaccgtcctcagcctggactggcaccccaacaatgtgctgctggctgccggctcctgtgacttcaagtgtcggatcttttcagcctacatcaaggaggtggaggaacggccggcacccaccccgtggggctccaagatgccctttggggaactgatgttcgaatccagcagtagctgcggctgggtacatggcgtctgtttctcagccagcgggagccgcgtggcctgggtaagccacgacagcaccgtctgcctggctgatgccgacaagaagatggccgtcgcgactctggcctctgaaacactaccactgctggcgctgaccttcatcacagacaacagcctggtggcagcgggccacgactgcttcccggtgctgttcacctatgacgccgccgcggggatgctgagcttcggcgggcggctggacgttcctaagcagagctcgcagcgtggcttgacggcccgcgagcgcttccagaacctggacaagaaggcgagctccgagggtggcacggctgcgggcgcgggcctagactcgctgcacaagaacagcgtcagccagatctcggtgctcagcggcggcaaggccaagtgctcgcagttctgcaccactggcatggatggcggcatgagtatctgggatgtgaagagcttggagtcagccttgaaggacctcaagatcaaatgacctgtgaggaatatgttgccttcatcctaactgctggggaagcggggagaggggtcagggaggctaatggttgctttgctgaatgtttctggggtaccaatacgagttcccataggggctgctccctcaaaaagggaggggacagatggggagcttttcttacctattcaaggaatacgtgcctttttcttaaatgctttcatttattgaaaaaaaaaaaaaaaaaaaa

SEQ ID NO: 368 - DNA, 1670 bp, Homo sapiens
  Genbank Accession No. AF010309
ccagccgtccattccggtggaggcagaggcagtcctggggctctggggctcgggctttgtcaccgggacccgcagagccagaaccactcggcgccgctggtgcatgggaggggagccgggccaggagtaagtaactcatacgggcgccggggacccgggtcggctgggggcttccaactcagagggagtgtgatttgcctgatcctcttcggcgttgtcctgctctgccgcatccagccctgtaccgccatcccacttcccgccgttcccatctgtgttccgggtgggatcggtctggaggcggccgaggacttcccaggcaggagctcggggcggaggcgggtccgcggcagaccagggcagcgaggcgctggccggcagggggcgctgcggtgccagcctgaggctggctgctccgcgaggatacagcggcccctgccctgtcctgtcctgccctgccctgtcctgtcctgccctgccctgccctgtcctgtcctgccctgccctgccctgtgtcctcagacaatatgttagccgtgcactttgacaagccgggaggaccggaaaacctctacgtgaaggaggtggccaagccgagcccgggggagggtgaagtcctcctgaaggtggcggccagcgccctgaaccgggcggacttaatgcagagacaaggccagtatgacccacctccaggagccagcaacattttgggacttgaggcatctggacatgtggcagagctggggcctggctgccagggacactggaagatcggggacacagccatggctctgctccccggtgggggccaggctcagtacgtcactgtccccgaagggctcctcatgcctatcccagagggattgaccctgacccaggctgcagccatcccagaggcctggctcaccgccttccagctgttacatcttgtgggaaatgttcaggctggagactatgtgctaatccatgcaggactgagtggtgtgggcacagctgctatccaactcacccggatggctggagctattcctctggtcacagctggctcccagaagaagcttcaaatggcagaaaagcttggagcagctgctggattcaattacaaaaaagaggatttctctgaagcaacgctgaaattcaccaaaggtgctggagttaatcttattctagactgcataggcggatcctactgggagaagaacgtcaactgcctggctcttgatggtcgatgggttctctatggtctgatgggaggaggtgacatcaatgggcccctgttttcaaagctactttttaagcgaggaagtctgatcaccagtttgctgaggtctagggacaataagtacaagcaaatgctggtgaatgctttcacggagcaaattctgcctcacttctccacggagggcccccaacgtctgctgccggttctggacagaatctacccagtgaccgaaatccaggaggcccatagtacatggaggccaacaagaacataggcaagatcgtcctggaactgccccagtgaaggaggatgggggcaggacaggacgcggccaccccaggcctttccagagcaaacctggagaagattcacaatagacaggccaagaaacccggtgcttcctccagagccgtttaaagctgatatgaggaaataaagagtgaactgg

SEQ ID NO: 369 - DNA, 1548 bp, Homo sapiens
  Genbank Accession No. AF014398
gctgggctgggctcggcacggggcggggcggagggtggggagcggaaagcaggacgcgcggctcccgcggcccgctggctgcccttcccgccagcgcaggtgtgggacgggcggcggactaggcacagagctgcgggagcaggcacagggagtgtggagcctggcggcgggacggcgggatccggtgggagccggagtcccgccgaggggggctggaggtggaggggcccggcgaggccgcgatgaagccgagcggcgaggaccaggcggcgctggcggccggcccctgggaggagtgcttccaggcggccgtgcagctggcgctgcgggcaggacagatcatcagaaaagcccttactgaggaaaaacgtgtctcaacaaaaacatcagctgcagatcttgtgacagaaacagatcaccttgtggaagatttaattatttctgagttgcgagagaggtttccttcacacaggttcattgcagaagaggccgcggcttctggggccaagtgtgtgctcacccacagcccgacgtggatcatcgaccccatcgacggcacctgcaattttgtgcacagattcccgactgtggcggttagcattggatttgctgttcgacaagagcttgaattcggagtgatttaccactgcacagaggagcggctgtacacgggccggcggggtcggggcgccttctgcaatggccagcggctccgggtctccggggagacagatctctcaaaggccttggttctgacagaaattggccccaaacgtgaccctgcgaccctgaagctgttcctgagtaacatggagcggctgctgcatgccaaggcgcatggggtccgagtgattggaagctccacattggcactctgccacctggcctcaggggccgcggatgcctattaccagtttggcctgcactgctgggatctggcggctgccacagtcatcatcagagaagcaggcggcatcgtgatagacacttcgggtggacccctcgacctcatggcttgcagagtggttgcggccagcacccgggagatggcgatgctcatagctcaggccttacagaccattaactatgggcgggatgatgagaagtgactgcggctgaggcaaagctgctcccaaggcctccctgggctgctgtgggctcctggggaggtggccctcgtggcccacgctccatgccagtggctcacgctctgctcctggctaccccagagggagttgtcacgctacagtgagtggctggccttttaaatcgacgtctctctcaccaggatttggtgtttagctgtttctctctttaatctcacgtagcctttttcaggttagtacgtgttcttctgtcagggccaaaactcaaatctcctgtgaaatacgtattgataatccaatcttgatttttccccccagaatataaatctcaggtaataaggctttagaactgctgataaagcggatcgttctcaggccctccccccggagtacttcagaatgcaataaatcaaaataatgggcaaaaaaaaaaaaaaaaaaa

SEQ ID NO: 370 - DNA, 1407 bp, Homo sapiens
  Genbank Accession No. AF020044
cgaccaacggaccggacagagacgaggagaggaacaggaagagagaagctgggagaatcgggaacctgggggctagtgacctgcacacagggcaggggcactcggcagttcccagaggccacccctcccaccccagacatccagacatctggaactttgggtgccaagagtccagcttaatgcaggcagcctggcttttgggggctttggtggtcccccagctcttgggctttggccatggggctcggggagcagagagggagtgggagggaggctggggaggtgcccaggaggaggagcgggagagggaggccctgatgctgaagcatctgcaggaagccctaggactgcctgctgggaggggggatgagaatcctgccggaactgttgagggaaaagaggactgggagatggaggaggaccagggggaggaagaggaggaggaagcaacgccaaccccatcctccggccccagcccctctcccacccctgaggacatcgtcacttacatcctgggccgcctggccggcctggacgcaggcctgcaccagctgcacgtccgtctgcacgcgttggacacccgcgtggtcgagctgacccaggggctgcggcagctgcggaacgcggcaggcgacacccgcgatgccgtgcaagccctgcaggaggcgcagggtcgcgccgagcgcgagcacggccgcttggagggctgcctgaaggggctgcgcctgggccacaagtgcttcctgctctcgcgcgacttcgaagctcaggcggcggcgcaggcgcggtgcacggcgcggggcgggagcctggcgcagccggcagaccgccagcagatggaggcgctcactcggtacctgcgcgcggcgctcgctccctacaactggcccgtgtggctgggcgtgcacgatcggcgcgccgagggcctctacctcttcgaaaacggccagcgcgtgtccttcttcgcctggcatcgctcaccccgccccgagctcggcgcccagcccagcgcctcgccgcatccgctcagcccggaccagcccaacggtggcacgctcgagaactgcgtggcgcaggcctctgacgacggctcctggtgggaccacgactgccagcggcgtctctactacgtctgcgagttccccttctagcggggccggtaccccgcctccttgcccatcccaccacccggcctttccctgcgccgtgcccaccctcctccggaatcgcccttcccttcctggccacgaatggcagcgtcctccccgacccccagtctgggcgcttctgggagggctcttgcggtgccggcactcctccttgttagtgtctttccttgaaggggcgggcaccaggctaggtccggtgccaataaatccttgtggaatctgaaaaaaaaaaaaaaaa

SEQ ID NO: 371 - DNA, 2238 bp, Homo sapiens
  Genbank Accession No. AF022797
gtccttcggtgtctgggtgtggtgagtagaggtgtgtgtcacaaagtacagaccattgtgtgtgacaaagcccatcgtgtgtctgtgtgtgtctttatccacgtggatggacgtctctttcttgctctgccccaagacacaccctagcccctccttattctcaaaagggggagctggggagcctccccctaccctggggcctcccctgcccctccccgccctgcctggccgtcaccactccccagagggcacagggctctgctgtgcctcagagcaaaagtcccagagccagcagagcaggctgacgacctgcaagccacagtggctgccctgtgcgtgctgcgaggtgggggaccctgggcaggaagctggctgagccccaagaccccgggggccatgggcggggatctggtgcttggcctgggggccttgagacgccgaaagcgcttgctggagcaggagaagtctctggccggctgggcactggtgctggcaggaactggcattggactcatggtgctgcatgcagagatgctgtggttcggggggtgctcgtgggcgctctacctgttcctggttaaatgcacgatcagcatttccaccttcttactcctctgcctcatcgtggcctttcatgccaaagaggtccagctgttcatgaccgacaacgggctgcgggactggcgcgtggcgctgaccgggcggcaggcggcgcagatcgtgctggagctggtggtgtgtgggctgcacccggcgcccgtgcggggcccgccgtgcgtgcaggatttaggggcgccgctgacctccccgcagccctggccgggattcctgggccaaggggaagcgctgctgtccctggccatgctgctgcgtctctacctggtgccccgcgccgtgctcctgcgcagcggcgtcctgctcaacgcttcctaccgcagcatcggcgctctcaatcaagtccgcttccgccactggttcgtggccaagctttacatgaacacgcaccctggccgcctgctgctcggcctcacgcttggcctctggctgaccaccgcctgggtgctgtccgtggccgagaggcaggctgttaatgccactgggcacctttcagacacactttggctgatccccatcacattcctgaccatcggctatggtgacgtggtgccgggcaccatgtggggcaagatcgtctgcctgtgcactggagtcatgggtgtctgctgcacagccctgctggtggccgtggtggcccggaagctggagtttaacaaggcagagaagcacgtgcacaacttcatgatggatatccagtataccaaagagatgaaggagtccgctgcccgagtgctacaagaagcctggatgttctacaaacatactcgcaggaaggagtctcatgctgcccgcaggcatcagcgcaagctgctggccgccatcaacgcgttccgccaggtgcggctgaaacaccggaagctccgggaacaagtgaactccatggtggacatctccaagatgcacatgatcctgtatgacctgcagcagaatctgagcagctcacaccgggccctggagaaacagattgacacgctggcggggaagctggatgccctgactgagctgcttagcactgccctggggccgaggcagcttccagaacccagccagcagtccaagtagctggacccacgaggaggaaccaggctactttccccagtactgaggtggtggacatcgtctctgccactcctgacccagccctgaacaaagcacctcaagtgcaaggaccaaagggggccctggcttggagtgggttggcttgctgatggctgctggaggggacgctggctaaagtgggtaggccttggcccacctgaggccccaggtgggaacatggtcacccccactctgcataccctcatcaaaaacactctcactatgctgctatggacgacctccagctctcagttacaagtgcaggcgactggaggcaggactcctgggtccctgggaaagagggtactaggggcccggatccaggattctgggaggcttcagttaccgctggccgagctgaagaactgggtatgaggctggggcggggctggaggtggcgccccctggtgggacaacaaagaggacaccatttttccagagctgcagagagcacctggtggggaggaagaagtgtaactcaccagcctctgctcttatctttgtaataaatgttaaagccag

SEQ ID NO: 372 - DNA, 1377 bp, Homo sapiens
  Genbank Accession No. AF023614
agcatcctgagtaatgagtggcctgggccggagcaggcgaggtggccggagccgtgtggaccaggaggagcgctttccacagggcctgtggacgggggtggctatgagatcctgccccgaagagcagtactgggatcctctgctgggtacctgcatgtcctgcaaaaccatttgcaaccatcagagccagcgcacctgtgcagccttctgcaggtcactcagctgccgcaaggagcaaggcaagttctatgaccatctcctgagggactgcatcagctgtgcctccatctgtggacagcaccctaagcaatgtgcatacttctgtgagaacaagctcaggagcccagtgaaccttccaccagagctcaggagacagcggagtggagaagttgaaaacaattcagacaactcgggaaggtaccaaggattggagcacagaggctcagaagcaagtccagctctcccggggctgaagctgagtgcagatcaggtggccctggtctacagcacgctggggctctgcctgtgtgccgtcctctgctgcttcctggtggcggtggcctgcttcctcaagaagaggggggatccctgctcctgccagccccgctcaaggccccgtcaaagtccggccaagtcttcccaggatcacgcgatggaagccggcagccctgtgagcacatcccccgagccagtggagacctgcagcttctgcttccctgagtgcagggcgcccacgcaggagagcgcagtcacgcctgggacccccgaccccacttgtgctggaaggtgggggtgccacaccaggaccacagtcctgcagccttgcccacacatcccagacagtggccttggcattgtgtgtgtgcctgcccaggaggggggcccaggtgcataaatgggggtcagggagggaaaggaggagggagagagatggagaggaggggagagagaaagagaggtggggagaggggagagagatatgaggagagagagacagaggaggcagaaagggagagaaacagaggagacagagagggagagagagacagagggagagagagacagaggggaagagaggcagagagggaaagaggcagagaaggaaagagacaggcagagaaggagagaggcagagagggagagaggcagagagggagagaggcagagagacagagagggagagagggacagagagagatagagcaggaggtcggggcactctgagtcccagttcccagtgcagctgtaggtcgtcatcacctaaccacacgtgcaataaagtcctcgtgcctgctgctcacagcccccgagagcccctcctcctggagaataaaacctttggcagctgcccttcctcaaaaaaaaaaaaaaaaaaaa

SEQ ID NO: 373 - DNA, 1279 bp, Homo sapiens
  Genbank Accession No. AF025887
gggggaccgctgacctggcgctttgtgcggctccaggcctccgagtggactccagaaagcctgaaaagctatcatggcagcaaggcccaagctccactatcccaacggaagaggccggatggagtccgtgagatgggttttagctgccgccggagtcgagtttgatgaagaatttctggaaacaaaagaacagttgtacaagttgcaggatggtaaccacctgctgttccaacaagtgcccatggttgaaattgacgggatgaagttggtacagacccgaagcattctccactacatagcagacaagcacaatctctttggcaagaacctcaaggagagaaccctgattgacatgtacgtggaggggacactggatctgctggaactgcttatcatgcatcctttcttaaaaccagatgatcagcaaaaggaagtggttaacatggcccagaaggctataattagatactttcctgtgtttgaaaagattttaaggggtcacggacaaagctttcttgttggtaatcagctgagccttgcagatgtgattttactccaaaccattttagctctagaagagaaaattcctaatatcctgtctgcatttcctttcctccaggaatacacagtgaaactaagtaatatccctacaattaagagattccttgaacctggcagcaagaagaagcctccccctgatgaaatttatgtgagaaccgtctacaacatctttaggccataaaacaacacatccatgtgtgagtgacagtgtgttcctagagatggtattgtctacagtcatgtcttaatggatcccagctctgtcatggtgctatctatgtattaagttgggtcctaagttgggtcttttgtgtcaaagagatcatctcttctagaaatatcaaccttttttgtccagtaaataattgttaggggatctttattggaaaacttttttggagaggctggtatttaagttagatctgattgggctactcatgttcctgtagccagttcatcctcataataagaatgggcaggatctcttgttctctcctgagtgtctttctactctcctgagcgtctttctgctctccttatcctgttctcttatccttatcccctccagtctctgcctaatttttagtgtttaataacaaccgaatgtctagtaaatgactctcctctgagctgtaataaataaaatggtagtaatgaatgcaatcagtgttagccaaaataaagaatttatgagtcattaaaaaaaaaaaaaaaaaaa

SEQ ID NO: 374 - DNA, 2840 bp, Homo sapiens
  Genbank Accession No. AF026692
cagcggccgctgaattctagggcgggttcgcgccccgaaggctgagagctggcgctgctcgtgccctgtgtgccagacggcggagctccgcggccggaccccgcggccccgctttgctgccgactggagtttgggggaagaaactctcctgcgccccagaagatttcttcctcggcgaagggacagcgaaagatgagggtggcaggaagagaaggcgctttctgtctgccggggtcgcagcgcgagagggcagtgccatgttcctctccatcctagtggcgctgtgcctgtggctgcacctggcgctgggcgtgcgcggcgcgccctgcgaggcggtgcgcatccctatgtgccggcacatgccctggaacatcacgcggatgcccaaccacctgcaccacagcacgcaggagaacgccatcctggccatcgagcagtacgaggagctggtggacgtgaactgcagcgccgtgctgcgcttcttcttctgtgccatgtacgcgcccatttgcaccctggagttcctgcacgaccctatcaagccgtgcaagtcggtgtgccaacgcgcgcgcgacgactgcgagcccctcatgaagatgtacaaccacagctggcccgaaagcctggcctgcgacgagctgcctgtctatgaccgtggcgtgtgcatttcgcctgaagccatcgtcacggacctcccggaggatgttaagtggatagacatcacaccagacatgatggtacaggaaaggcctcttgatgttgactgtaaacgcctaagccccgatcggtgcaagtgtaaaaaggtgaagccaactttggcaacgtatctcagcaaaaactacagctatgttattcatgccaaaataaaagctgtgcagaggagtggctgcaatgaggtcacaacggtggtggatgtaaaagagatcttcaagtcctcatcacccatccctcgaactcaagtcccgctcattacaaattcttcttgccagtgtccacacatcctgccccatcaagatgttctcatcatgtgttacgagtggcgttcaaggatgatgcttcttgaaaattgcttagttgaaaaatggagagatcagcttagtaaaagatccatacagtgggaagagaggctgcaggaacagcggagaacagttcaggacaagaagaaaacagccgggcgcaccagtcgtagtaatccccccaaaccaaagggaaagcctcctgctcccaaaccagccagtcccaagaagaacattaaaactaggagtgcccagaagagaacaaacccgaaaagagtgtgagctaactagtttccaaagcggagacttccgacttccttacaggatgaggctgggcattgcctgggacagcctatgtaaggccatgtgccccttgccctaacaactcactgcagtgctcttcatagacacatcttgcagcatttttcttaaggctatgcttcagtttttctttgtaagccatcacaagccatagtggtaggtttgccctttggtacagaaggtgagttaaagctggtggaaaaggcttattgcattgcattcagagtaacctgtgtgcatactctagaagagtagggaaaataatgcttgttacaattcgacctaatatgtgcattgtaaaataaatgccatatttcaaacaaaacacgtaatttttttacagtatgttttattaccttttgatatctgttgttgcaatgttagtgatgttttaaaatgtgatgaaaatataatgtttttaagaaggaacagtagtggaatgaatgttaaaagatctttatgtgtttatggtctgcagaaggatttttgtgatgaaaggggattttttgaaaaattagagaagtagcatatggaaaattataatgtgtttttttaccaatgacttcagtttctgtttttagctagaaacttaaaaacaaaaataataataaagaaaaataaataaaaaggagaggcagacaatgtctggattcctgttttttggttacctgatttccatgatcatgatgcttcttgtcaacaccctcttaagcagcaccagaaacagtgagtttgtctgtaccattaggagttaggtactaattagttggctaatgctcaagtattttatacccacaagagaggtatgtcactcatcttacttcccaggacatccaccctgagaataatttgacaagcttaaaaatggccttcatgtgagtgccaaattttgtttttcttcatttaaatattttctttgcctaaatacatgtgagaggagttaaatataaatgtacagagaggaaagttgagttccacctctgaaatgagaattacttgacagttgggatactttaatcagaaaaaaagaacttatttgcagcattttatcaacaaatttcataattgtggacaattggaggcatttattttaaaaaacaattttattggccttttgctaacacagtaagcatgtattttataaggcattcaataaatgcacaacgcccaaaggaaataaaatcctatctaatcctactctccactacacagaggtaatcactattagtattttggcatattattctccaggtgtttgcttatgcacttataaaatgatttgaacaaataaaactaggaacctgtatacatgtgtttcataacctgcctcctttgcttggccctttattgagataagttttcctgtcaagaaagcagaaaccatctcatttctaacagctgtgttatattccatagtatgcattactcaacaaactgttgtgctattggatacttaggtggtttcttcactgacaatactgaataaacatctcaccggaattc

SEQ ID NO: 375 - DNA, 708 bp, Homo sapiens
  Genbank Accession No. AF027204
attcaccgcctgtctttcctgaacacctcaccatgtgtacgggaaaatgtgcccgctgtgtggggctctccctcattaccctctgcttcgtctgcattgtggccaacgccctcctgctggtacctaatggggagacctcctggaccaacaccaaccatctcagcttgcaagtctggctcatgggcggcttcattggcgggggcctaatggtactgtgtccagggattgcagccgttcgggcagggggcaagggctgctgtggtgctgggtgctgtggaaaccgctgcaggatgctgcgctcggtcttctcctcggcgttcggggtgcttggtgccatctactgcctctcggtgtctggagctgggctccgaaatggacccagatgcttaatgaacggcgagtggggctaccacttcgaagacaccgcgggagcttacttgctcaaccgcactctatgggatcggtgcgaggcgccccctcgcgtggtcccctggaatgtgacgctcttctcgctgctggtggccgcctcctgcctggagatagtactgtgtgggatccagctggtgaacgcgaccattggtgtcttctgcggcgattgcaggaaaaaacaggacacacctcactgaggctccactgaccgccgggttacacctgctccttcctggacgctcactccctgctcgctagaataaactgctttgcgctctc

SEQ ID NO: 376 - DNA, 3794 bp, Homo sapiens
  Genbank Accession No. AF027208
ccaagttctacctcatgtttggaggatcttgctagctatggccctcgtactcggctccctgttgctgctggggctgtgcgggaactccttttcaggagggcagccttcatccacagatgctcctaaggcttggaattatgaattgcctgcaacaaattatgagacccaagactcccataaagctggacccattggcattctctttgaactagtgcatatctttctctatgtggtacagccgcgtgatttcccagaagatactttgagaaaattcttacagaaggcatatgaatccaaaattgattatgacaagccagaaactgtaatcttaggtctaaagattgtctactatgaagcagggattattctatgctgtgtcctggggctgctgtttattattctgatgcctctggtggggtatttcttttgtatgtgtcgttgctgtaacaaatgtggtggagaaatgcaccagcgacagaaggaaaatgggcccttcctgaggaaatgctttgcaatctccctgttggtgatttgtataataataagcattggcatcttctatggttttgtggcaaatcaccaggtaagaacccggatcaaaaggagtcggaaactggcagatagcaatttcaaggacttgcgaactctcttgaatgaaactccagagcaaatcaaatatatattggcccagtacaacactaccaaggacaaggcgttcacagatctgaacagtatcaattcagtgctaggaggcggaattcttgaccgactgagacccaacatcatccctgttcttgatgagattaagtccatggcaacagcgatcaaggagaccaaagaggcgttggagaacatgaacagcaccttgaagagcttgcaccaacaaagtacacagcttagcagcagtctgaccagcgtgaaaactagcctgcggtcatctctcaatgaccctctgtgcttggtgcatccatcaagtgaaacctgcaacagcatcagattgtctctaagccagctgaatagcaaccctgaactgaggcagcttccacccgtggatgcagaacttgacaacgttaataacgttcttaggacagatttggatggcctggtccaacagggctatcaatcccttaatgatatacctgacagagtacaacgccaaaccacgactgtcgtagcaggtatcaaaagggtcttgaattccattggttcagatatcgacaatgtaactcagcgtcttcctattcaggatatactctcagcattctctgtttatgttaataacactgaaagttacatccacagaaatttacctacattggaagagtatgattcatactggtggctgggtggcctggtcatctgctctctgctgaccctcatcgtgattttttactacctgggcttactgtgtggcgtgtgcggctatgacaggcatgccaccccgaccacccgaggctgtgtctccaacaccggaggcgtcttcctcatggttggagttggattaagtttcctcttttgctggatattgatgatcattgtggttcttacctttgtctttggtgcaaatgtggaaaaactgatctgtgaaccttacacgagcaaggaattattccgggttttggatacaccctacttactaaatgaagactgggaatactatctctctgggaagctatttaataaatcaaaaatgaagctcacttttgaacaagtttacagtgactgcaaaaaaaatagaggcacttacggcactcttcacctgcagaacagcttcaatatcagtgaacatctcaacattaatgagcatactggaagcataagcagtgaattggaaagtctgaaggtaaatcttaatatctttctgttgggtgcagcaggaagaaaaaaccttcaggattttgctgcttgtggaatagacagaatgaattatgacagctacttggctcagactggtaaatcccccgcaggagtgaatcttttatcatttgcatatgatctagaagcaaaagcaaacagtttgcccccaggaaatttgaggaactccctgaaaagagatgcacaaactattaaaacaattcaccagcaacgagtccttcctatagaacaatcactgagcactctataccaaagcgtcaagatacttcaacgcacagggaatggattgttggagagagtaactaggattctagcttctctggattttgctcagaacttcatcacaaacaatacttcctctgttattattgaggaaactaagaagtatgggagaacaataataggatattttgaacattatctgcagtggatcgagttctctatcagtgagaaagtggcatcgtgcaaacctgtggccaccgctctagatactgctgttgatgtctttctgtgtagctacattatcgaccccttgaatttgttttggtttggcataggaaaagctactgtatttttacttccggctctaatttttgcggtaaaactggctaagtactatcgtcgaatggattcggaggacgtgtacgatgatgttgaaactatacccatgaaaaatatggaaaatggtaataatggttatcataaagatcatgtatatggtattcacaatcctgttatgacaagcccatcacaacattgatagctgatgttgaaactgcttgagcatcaggatactcaaagtggaaaggatcacagatttttggtagtttctgggtctacaaggactttccaaatccaggagcaacgccagtggcaacgtagtgactcaggcgggcaccaaggcaacggcaccattggtctctgggtagtgctttaagaatgaacacaatcacgttatagtccatggtccatcactattcaaggatgactccctcccttcctgtctatttttgttttttacttttttacactgagtttctatttagacactacaacatatggggtgtttgttcccattggatgcatttctatcaaaactctatcaaatgtgatggctagattctaacatattgccatgtgtggagtgtgctgaacacacaccagtttacaggaaagatgcattttgtgtacagtaaacggtgtatataccttttgttaccacagagttttttaaacaaatgagtattataggactttcttctaaatgagctaaataagtcaccattgacttcttggtgctgttgaaaataatccattttcactaaaagtgtgtgaaacctacagcatattcttcacgcagagattttcatctattatactttatcaaagattggccatgttccacttggaaatggcatgcaaaagccatcatagagaaacctgcgtaactccatctgacaaattcaaaagagagagagagatcttgagagagaaatgctgttcgttcaaaagtggagttgttttaacagatgccaattacggtgtacagtttaacagagttttctgttgcattaggataaacattaattggagtgcagctaacatgagtatcatcagactagtatcaagtgttctaaaatgaaatatgagaagatcctgtcacaattcttagatctggtgtccagcatggatgaaacctttgagtttggtccctaaatttgcatgaaagcacaaggtaaatattcatttgcttcaggagtttcatgttggatctgtcattatcaaaagtgatcagcaatgaagaactggtcggacaaaatttaacgttgatgtaatggaattccagatgtaggcattccccccaggtcttttcatgtgcagattgcagttctgattcatttgaataaaaaggaacttgg

SEQ ID NO: 377 - DNA, 5121 bp, Homo sapiens
  Genbank Accession No. AF030339
gcgaggaggaaacggtgccggagcgcgcagggcttgctgccgccaccgccgctgcacaggctgccggagcgagcctgccgcgcgccgccctccccgctctccttcctgggcgagctgcggggatggggcggccgcgggagcccgagcgcgcgcaggaaccgccgccgccgccgcccgcgtctccgttgccgcgcgcctgagccgccgtcgccgccgcgcgccctgcccgggggcggcccccccagccccatggaggtctcccggaggaaggcgccgccgcgccccccgcgccccgcagcgccactgcccctgctcgcctatctgctggcactggcggctcccggccggggcgcggacgagcccgtgtggcggtcggagcaagccatcggagccatcgcggcgagccaggaggacggcgtgtttgtggcgagcggcagctgcctggaccagctggactacagcctggagcacagcctctcgcgcctgtaccgggaccaagcgggcaactgcacagagccggtctcgctggcgccccccgcgcggccccggcccgggagcagcttcagcaagctgctgctgccctaccgcgagggggcggccggcctcggggggctgctgctcaccggctggaccttcgaccggggcgcctgcgaggtgcggcccctgggcaacctgagccgcaactccctgcgcaacggcaccgaggtggtgtcgtgccacccgcagggctcgacggccggcgtggtgtaccgcgcgggccggaacaaccgctggtacctggcggtggccgccacctacgtgctgcctgagccggagacggcgagccgctgcaaccccgcggcatccgaccacgacacggccatcgcgctcaaggacacggaggggcgcagcctggccacgcaggagctggggcgcctcaagctgtgcgagggcgcgggcagcctgcacttcgtggacgcctttctctggaacggcagcatctacttcccctactacccctacaactatacgagcggcgctgccaccggctggcccagcatggcgcgcatcgcgcagagcaccgaggtgctgttccagggccaggcatccctcgactgcggccacggccaccccgacggccgccgcctgctcctctcctccagcctagtggaggccctggacgtctgggcgggagtgttcagcgcggccgctggagagggccaggagcggcgctcccccaccaccacggcgctctgcctcttcagaatgagtgagatccaggcgcgcgccaagagggtcagctgggacttcaagacggccgagagccactgcaaagaaggggatcaacctgaaagagtccaaccaatcgcatcatctaccttgatccattccgacctgacatccgtttatggcaccgtggtaatgaacaggactgttttattcttggggactggagatggccagttacttaaggttattcttggtgagaatttgacttcaaattgtccagaggttatctatgaaattaaagaagagacacctgttttctacaaactcgttcctgatcctgtgaagaatatctacatttatctaacagctgggaaagaggtgaggagaattcgtgttgcaaactgcaataaacataaatcctgttcggagtgtttaacagccacagaccctcactgcggttggtgccattcgctacaaaggtgcacttttcaaggagattgtgtacattcagagaacttagaaaactggctggatatttcgtctggagcaaaaaagtgccctaaaattcagataattcgaagcagtaaagaaaagactacagtgactatggtgggaagcttctctccaagacactcaaagtgcatggtgaagaatgtggactctagcagggagctctgccagaataaaagtcagcccaaccggacctgcacctgtagcatcccaaccagagcaacctacaaagatgtttcagttgtcaacgtgatgttctccttcggttcttggaatttatcagacagattcaactttaccaactgctcatcattaaaagaatgcccagcatgcgtagaaactggctgcgcgtggtgtaaaagtgcaagaaggtgtatccaccccttcacagcttgcgacccttctgattatgagagaaaccaggaacagtgtccagtggctgtcgagaagacatcaggaggaggaagacccaaggagaacaaggggaacagaaccaaccaggctttacaggtcttctacattaagtccattgagccacagaaagtatcgacattagggaaaagcaacgtgatagtaacgggagcaaactttacccgggcatcgaacatcacaatgatcctgaaaggaaccagtacctgtgataaggatgtgatacaggttagccatgtgctaaatgacacccacatgaaattctctcttccatcaagccggaaagaaatgaaggatgtgtgtatccagtttgatggtgggaactgctcttctgtgggatccttatcctacattgctctgccacattgttcccttatatttcctgctaccacctggatcagtggtggtcaaaatataaccatgatgggcagaaattttgatgtaattgacaacttaatcatttcacatgaattaaaaggaaacataaatgtctctgaatattgtgtggcgacttactgcgggtttttagcccccagtttaaagagttcaaaagtgcgcacgaatgtcactgtgaagctgagagtacaagacacctacttggattgtggaaccctgcagtatcgggaggaccccagattcacggggtatcgggtggaatccgaggtggacacagaactggaagtgaaaattcaaaaagaaaatgacaacttcaatatttccaaaaaagacattgaaattactctcttccatggggaaaatgggcaattaaattgcagttttgaaaatattactagaaatcaagatcttaccaccatcctttgcaaaattaaaggcatcaagactgcaagcaccattgccaactcttctaagaaagttcgggtcaagctgggaaacctggagctctacgtcgagcaggagtcagttccttccacatggtattttctgattgtgctccctgtcttgctagtgattgtcatttttgcggccgtgggggtgaccaggcacaaatcgaaggagctgagtcgcaaacagagtcaacaactagaattgctggaaagcgagctccggaaagagatacgtgacggctttgctgagctgcagatggataaattggatgtggttgatagttttggaactgttcccttccttgactacaaacattttgctctgagaactttcttccctgagtcaggtggcttcacccacatcttcactgaagatatgcataacagagacgccaacgacaagaatgaaagtctcacagctttggatgccctaatctgtaataaaagctttcttgttactgtcatccacacccttgaaaagcagaagaacttttctgtgaaggacaggtgtctgtttgcctccttcctaaccattgcactgcaaaccaagctggtctacctgaccagcatcctagaggtgctgaccagggacttgatggaacagtgtagtaacatgcagccgaaactcatgctgagacgcacggagtccgtcgtcgaaaaactcctcacaaactggatgtccgtctgcctttctggatttctccgggagactgtcggagagcccttctatttgctggtgacgactctgaaccagaaaattaacaagggtcccgtggatgtaatcacttgcaaagccctgtacacacttaatgaagactggctgttgtggcaggttccggaattcagtactgtggcattaaacgtcgtctttgaaaaaatcccggaaaacgagagtgcagatgtctgtcggaatatttcagtcaatgttctcgactgtgacaccattggccaagccaaagaaaagattttccaagcattcttaagcaaaaatggctctccttatggacttcagcttaatgaaattggtcttgagcttcaaatgggcacacgacagaaagaacttctggacatcgacagttcctccgtgattcttgaagatggaatcaccaagctaaacaccattggccactatgagatatcaaatggatccactataaaagtctttaagaagatagcaaattttacttcagatgtggagtactcggatgaccactgccatttgattttaccagattcggaagcattccaagatgtgcaaggaaagagacatcgagggaagcacaagttcaaagtaaaagaaatgtatctgacaaagctgctgtcgaccaaggtggcaattcattctgtgcttgaaaaactttttagaagcatttggagtttacccaacagcagagctccatttgctataaaatacttttttgactttttggacgcccaggctgaaaacaaaaaaatcacagatcctgacgtcgtacatatttggaaaacaaacagccttcctcttcgcttctgggtaaacatcctgaagaaccctcagtttgtctttgacattaagaagacaccacatatagacggctgtttgtcagtgattgcccaggcattcatggatgcattttctctcacagagcagcaactagggaaggaagcaccaactaataagcttctctatgccaaggatatcccaacctacaaagaagaagtaaaatcttattacaaagcaatcagggatttgcctccattgtcatcctcagaaatggaagaatttttaactcaggaatctaagaaacatgaaaatgaatttaatgaagaagtggccttgacagaaatttacaaatacatcgtaaaatattttgatgagattctaaataaactagaaagagaacgagggctggaagaagctcagaaacaactcttgcatgtaaaagtcttatttgatgaaaagaagaaatgcaagtggatgtaagcactctggggcctggcttaatctggcaaagttcttcagacgacttgggagcaaaatggctgcttgagctactctgtgtcgttaatttgttgtttgcacataggttccactttgggcactgtctttttaagagaccaaggcacatgcacagcttttagaaagcaa

SEQ ID NO: 378 - DNA, 865 bp, Homo sapiens
  Genbank Accession No. AF030428
gctgcctagggtctggaaagctcgggcaccctccctctccggggctcctgctcccacccctccggcccccccaccgtcgcgctcctccaggctgggcctgtggccgcggtgcttttaattttcccccagctcagaatcttgctgctcggcccccaggagagcaacaactcaacgggaacgatgtggaaggtgtcagctctgctcttcgttttgggaagcgcgtcgctctgggtcctggcagaaggagccagcacaggccagccagaagatgacactgagactacaggtttggaaggcggcgttgccatgccaggtgccgaagatgatgtggtgactccaggaaccagcgaagaccgctataagtctggcttgacaactctggtggcaacaagtgtcaacagtgtaacaggcattcgcatcgaggatctgccaacttcagaaagcacagtccacgcgcaagaacaaagtccaagcgccacagcctcaaacgtggccaccagtcactccacggagaaagtggatggagacacacagacaacagttgagaaagatggtttgtcaacagtgaccctggttggaatcatagttggggtcttactagccatcggtttcattggtggaatcatcgttgtggttatgcgaaaaatgtcgggaaggtactcgccctaaagagctgaagggttacgccctgcttgccaacgtgctttaaaaaaagaccgtttctgactctgtggccctgtccctgagctcgtggggagaagatgaccctgggaacatttgcgggcccattcagattccacggtgactttccgtttgccaaattaaccgaggaaagacctttcaccagatttggttcttaaacttt

SEQ ID NO: 379 - DNA, 1342 bp, Homo sapiens
  Genbank Accession No. AF030455
actcaaactcctctctctgggaaaacgcggtgcttgctcctcccggagtggccttggcagggtgttggagccctcggtctgccccgtccggtctctggggccaaggctgggtttccctcatgtatggcaagagctctactcgtgcggtgcttcttctccttggcatacagctcacagctctttggcctatagcagctgtggaaatttatacctcccgggtgctggaggctgttaatgggacagatgctcggttaaaatgcactttctccagctttgcccctgtgggtgatgctctaacagtgacctggaattttcgtcctctagacgggggacctgagcagtttgtattctactaccacatagatcccttccaacccatgagtgggcggtttaaggaccgggtgtcttgggatgggaatcctgagcggtacgatgcctccatccttctctggaaactgcagttcgacgacaatgggacatacacctgccaggtgaagaacccacctgatgttgatggggtgataggggagatccggctcagcgtcgtgcacactgtacgcttctctgagatccacttcctggctctggccattggctctgcctgtgcactgatgatcataatagtaattgtagtggtcctcttccagcattaccggaaaaagcgatgggccgaaagagctcataaagtggtggagataaaatcaaaagaagaggaaaggctcaaccaagagaaaaaggtctctgtttatttagaagacacagactaacaattttagatggaagctgagatgatttccaagaacaagaaccctagtatttcttgaagttaatggaaacttttctttggcttttccagttgtgacccgttttccaaccagttctgcagcatattagattctagacaagcaacacccctctggagccagcacagtgctcctccatatcaccagtcatacacagcctcattattaaggtcttatttaatttcagagtgtaaattttttcaagttgctcattaggttttataaacaagaagcctacatttttggccccttaaracacctaccttacagtgttatgaccttgtatacacatatattggtatcaaaggggataaaagcccaatttgtctgttacatttcctttcacgtatttcttttagcagcacttctgctactaaagttaatgtgtttactctctttccttcccacattctcaattaaaaggtgagctaagcctcctcggtgtttctgattaacagtaaatcctaaattcaaactgttaaatgacatttttatttttatgtctctccttaactatgagacacatcttgttttactga

SEQ ID NO: 380 - DNA, 1972 bp, Homo sapiens
  Genbank Accession No. AF035299
cgcggccggcagcgccagcgctggaatcgcccccgcgcctgggagtggcctcgcgaggcgggcgcgcgccccggggccgaggaatccgcctgcccgcccaggcgtcggccacgagagagcgggagcctcgctggtccccatttcagaggtggaggaagacctgggccgtgctctacccggccagtccccacggcgtagcgcggctcgagttctttgaccataaggggtcgagctctgggggtggccgagggagctcgcgccgcctggactgcaaagtgatccgtctggctgagtgtgtgagtgtggcccccgtcaccgtggagaccccccctgagcccggcgccactgccttccgcctggacactgctcagcgctcgcacctgctggcggccgacgcgccgtccagtgcagcctgggtgcagacgctgtgccgaaacgcctttccgaaaggcagctggactctggcgcctaccgataacccacctaagctttctgccctggagatgctggagaactccttgtacagccctacctgggaaggatcccaattctgggtaacggtgcagaggactgaggccgccgagcgctgtggcctgcatggctcctacgtgctgagggtggaggctgaaaggctgactctcctgaccgtgggggcccagagtcagatactggagccactcctgtcctggccctacactctgttgcgtcgctatggccgggacaaggtcatgttctctttcgaggccggccgccgctgcccctcaggccctggaaccttcaccttccagacggcacagggaaatgacatcttccaggcagttgagactgccatccaccggcagaaggcccagggaaaggccggacaggggcacgatgttctcagagctgactcccatgaaggggaggtggcagaggggaagttgccttccccacctggcccccaagagctcctcgacagtcccccagccctgtatgctgagcccttagactccctgcgcattgctccatgcccttcccaggactccctatactcagaccccttggacagcacgtctgctcaggcaggagagggagtacaacggaagaaacctctctattgggacttgtatgagcatgcgcagcagcagttgctgaaggccaagctgacagaccccaaagaggatcccatctatgatgaacctgagggcctggccccagtccctccccagggcctttatgatctgcctcgggagcccaaggatgcatggtggtgccaagctcgggtgaaggaggagggctatgagctcccctacaaccctgccactgatgactacgctgtgccaccccctcggagcacaaagcccctccttgctcccaagccccagggcccagccttccctgaacctggtactgcaactggcagtggcatcaaaagccacaactcagccctgtacagccaggtccagaagagcggggcctcagggagctgggactgtgggctctctagagtagggactgacaagactggggtcaagtcagagggctctacctgagaaggacggcaaggctgaggtggctaagggggaccatggggaggtggcactagggatcaaagaagatggttagaaccagcagaagccagagggtgggaggggccatgctgtgtgagaccaggggaccagagggatgggagagtcaagggaaggacaatcccaggaagtcctaagaagtggggcagatggcagggctgaggatgggctctgcatcccccaaagccatcccttccctacttccccaaatgaagggacggctgtgggaccaggtctgtggaaagtggtgcatggtcagaatgggtgcagtttgaggggcctgtgtggaggcctcagggagatgttggactgtgcctggatccttactcctgcattgttctttgccagagacctatttaaaaattttaaaattctcattaaagtcaaaaaaaaaaaaaaaaaaa

SEQ ID NO: 381 - DNA, 2771 bp, Homo sapiens
  Genbank Accession No. AF037335
  unsure (1)..(2762): n = a or c or g or t
gtactcgccacggcacccaggctgcgcgcacgcggtcccggtgtgcagctggagagcgagcggccaccgggagcccccggcacagcccgcgcccgccccgcaggagcccgcgaagatgccccggcgcagcctgcacgcggcggccgtgctcctgctggtgatcttaaaggaacagccttccagcccggccccagtgaacggttccaagtggacttattttggtcctgatggggagaatagctggtccaagaagtacccgtcgtgtgggggcctgctgcagtcccccatagacctgcacagtgacatcctccagtatgacgccagcctcacgcccctcgagttccaaggctacaatctgtctgccaacaagcagtttctcctgaccaacaatggccattcagtgaagctgaacctgccctcggacatgcacatccagggcctccagtctcgctacagtgccacgcagctgcacctgcactgggggaacccgaatgacccgcacggctctgagcacaccgtcagcggacagcacttcgccgccgagctgcacattgtccattataactcagacctttatcctgacgccagcactgccagcaacaagtcagaaggcctcgctgtcctggctgttctcattgagatgggctccttcaatccgtcctatgacaagatcttcagtcaccttcaacatgtaaagtacaaaggccaggaagcattcgtcccgggattcaacattgaagagctgcttccggagaggaccgctgaatattaccgctaccgggggtccctgaccacacccccttgcaaccccactgtgctctggacagttttccgaaaccccgtgcaaatttcccaggagcagctgctggctttggagacagccctgtactgcacacacatggacgacccttcccccagagaaatgatcaacaacttccggcaggtccagaagttcgatgagaggctggtatacacctccttctcccaagtgcaagtctgtactgcggcaggactgagtctgggcatcatcctctcactggccctggctggcattcttggcatctgtattgtggtggtggtgtccatttggcttttcagaaggaagagtatcaaaaaaggtgataacaagggagtcatttacaagccagccaccaagatggagactgaggcccacgcttgaggtccccggagctcccgggcacatccaggaaggaccttgctttggaccctacacacttcggctctctggacacttgcgacacctcaaggtgttctctgtagctcaatctgcaaacatgccaggcctcagggatcctctgctgggtgcctccttgccttgggaccatggccaccccagagccatccgatcgatggatgggtgcatctcagaccaagcagcaggaattcaaagctgcttgctgtaactgtgtgagattgtgaagtggtctgaattctggaatcacaaaccaagccatgctggtgggccattaatggttggaaaacactttcatcggggctttgccagagcgtgctttcaagtgtcctggaaagtctgctgcttctccaagctttcagacaagaatgtgcactctctgcttagtttgcttgggaaactcaacttctttcctctggagacggggcatctccctctgatttccttctgctatgacaaaacctttaatctgcaccttacaactcggggacaaatgggacaggaaggatcaagttgtagagagaaaaaagaaaacaagagatatacattgtgatatattagggacactttcacagtcctgtcttctggatcacagacactgcacagaccttagggaatggcaggttcaagttccacttcttggtggggatgagaagggagagagagctagagggacaaagagaatgagaagacatggatgatctgggagagtctcagtttggaatcagaattggaatcacattctgtttatcaagccataatgtaaggacagaataatacaatattaagtccaaatccaacctcctgtcagtggagcagttatgttttatactctacagattttacaaataatgaggctgttccttgaaaatgtgttgttgctgtgtcctggaggagacatgagttccgagatgacccaatctgcctttgaatctggaggaaataggcagaaacaaaatgactgtagaacttattctctgtaggccaaatttcatttcagccacttctgcaggatccctactgccaacctggaatggagacttttatctacttctctcttctctgaagatgtcaaatcgtggtttagatcaaatatatttcaagctataaaagcaggaggttatctgtgcagggggctggcatcatgtatttaggggcaagtaataatggaatgctactaagatactccatattcttccccgaatcaacacagacagtttctgacaggcgcaactcctccattttcctcccgcaggtgagaaccctgtggagatgagtcagtgccatgactgagaaggaaccgacccctagttgagagcaccttgcagttccccgagaactttctgattcacagtctcattttgacagcatgaaatgtcctcttgaagcatagctttttaaatatctttttccttctactcctccctctgactctaagaattctntnttctggaatcgcttgaacccaggaggcggaggttgcagtaagccaaggtcatgccactgcactctagcctgggtgacagagcgagactccatntcaaaaaaaaaaaaaaaa

SEQ ID NO: 382 - DNA, 1077 bp, Homo sapiens
  Genbank Accession No. AF038451
accgcatcctagccgccgactcacacaaggcaggtgggtgaggaaatccagagttgccatggagaaaattccagtgtcagcattcttgctccttgtggccctctcctacactctggccagagataccacagtcaaacctggagccaaaaaggacacaaaggactctcgacccaaactgccccagaccctctccagaggttggggtgaccaactcatctggactcagacatatgaagaagctctatataaatccaagacaagcaacaaacccttgatgattattcatcacttggatgagtgcccacacagtcaagctttaaagaaagtgtttgctgaaaataaagaaatccagaaattggcagagcagtttgtcctcctcaatctggtttatgaaacaactgacaaacacctttctcctgatggccagtatgtccccaggattatgtttgttgacccatctctgacagttagagccgatatcactggaagatattcaaatcgtctctatgcttacgaacctgcagatacagctctgttgcttgacaacatgaagaaagctctcaagttgctgaagactgaattgtaaagaaaaaaaatctccaagcccttctgtctgtcaggccttgagacttgaaaccagaagaagtgtgagaagactggctagtgtggaagcatagtgaacacactgattaggttatggtttaatgttacaacaactattttttaagaaaaacatgttttagaaatttggtttcaagtgtacatgtgtgaaaacaatattgtatactaccatagtgagccatgattttctaaaaaaaaaataaatgttttgggggtgttctgttttctccaacttggtctttcacagtggttcgtttaccaaataggattaaacacacacaaaatgctcaaggaagggacaagacaaaaccaaaactagttcaaatgatgaagaccaaagaccaagttatcatctcaccacaccacaggttctcactagatgactgtaagtagacacgagcttaatcaacagaagtatcaagccatgtgctttagcataaaaaaaaaaaaaaaaaa

SEQ ID NO: 383 - DNA, 2377 bp, Homo sapiens
  Genbank Accession No. AF038564
ggtgacaaagagccaacagagacaataggagacttgtcaatttgtcttgatgggctacagttagagtctgaagttgttaccaatggtgaaactacatgttcagaaagtgcttctcagaatgatgatggctccagatccaaggatgaaacaagagtgagcacaaatggatcagatgaccctgaagatgcaggagctggtgaaaataggagagtcagtgggaataattctccatcactctcaaatggtggttttaaaccttctagacctccaagaccttcacgaccaccaccacccaccccacgtagaccagcatctgtcaatggttcaccatctgccacttctgaaagtgatgggtctagtacaggctctctgccgccgacaaatacaaatacaaatacatctgaaggagcaacatctggattaataattcctcttactatatctggaggctcaggccctaggccattaaatcctgtaactcaagctcccttgccacctggttgggagcagagagtggaccagcacgggcgagtttactatgtagatcatgttgagaaaagaacaacatgggatagaccagaacctctacctcctggctgggaacggcgggttgacaacatgggacgtatttattatgttgaccatttcacaagaacaacaacgtggcagaggccaacactggaatccgtccggaactatgaacaatggcagctacagcgtagtcagcttcaaggagcaatgcagcagtttaaccagagattcatttatgggaatcaagatttatttgctacatcacaaagtaaagaatttgatcctcttggtccattgccacctggatgggagaagagaacagacagcaatggcagagtatatttcgtcaaccacaacacacgaattacacaatgggaagaccccagaagtcaaggtcaattaaatgaaaagcccttacctgaaggttgggaaatgagattcacagtggatggaattccatattttgtggaccacaatagaagaactaccacctatatagatccccgcacaggaaaatctgccctagacaatggacctcagatagcctatgttcgggacttcaaagcaaaggttcagtatttccggttctggtgtcagcaactggccatgccacagcacataaagattacagtgacaagaaaaacattgtttgaggattcctttcaacagataatgagcttcagtccccaagatctgcgaagacgtttgtgggtgatttttccaggagaagaaggtttagattatggaggtgtagcaagagaatggttctttcttttgtcacatgaagtgttgaacccaatgtattgcctgtttgaatatgcagggaaggataactactgcttgcagataaaccccgcttcttacatcaatccagatcacctgaaatattttcgttttattggcagatttattgccatggctctgttccatgggaaattcatagacacgggtttttctttaccattctataagcgtatcttgaacaaaccagttggactcaaggatttagaatctattgatccagaattttacaattctctcatctgggttaaggaaaacaatattgaggaatgtgatttggaaatgtacttctccgttgacaaagaaattctaggtgaaattaagagtcatgatctgaaacctaatggtggcaatattcttgtaacagaagaaaataaagaggaatacatcagaatggtagctgagtggaggttgtctcgaggtgttgaagaacagacacaagctttctttgaaggctttaatgaaattcttccccagcaatatttgcaatactttgatgcaaaggaattagaggtccttttatgtggaatgcaagagattgatttgaatgactggcaaagacatgccatctaccgtcattatgcaaggaccagcaaacaaatcatgtggttttggcagtttgttaaagaaattgataatgagaagagaatgagacttctgcagtttgttactggaacctgccgattgccagtaggaggatttgctgatctcatggggagcaatggaccacagaaattctgcattgaaaaagttgggaaagaaaattggctacccagaagtcatacctgttttaatcgcctggacctgccaccatacaagagctatgagcaactgaaggaaaagctgttgtttgccatagaagaaacagaaggatttggacaagagtaacttctgagaacttgcaccatgaatgggcaagaacttatttgcaatgtttgtccttctctgcctgttgcacatcttgtaaaattggacaatggctctttagagagttatctgagtgtaagtaaattaatgttctcatttaaaaaaaaaaaaaaaaaaa

SEQ ID NO: 384 - DNA, 1559 bp, Homo sapiens
  Genbank Accession No. AF039555
agcggctgggcttgcaaggcgcgatccaagagggatttaagcagcccagagctccagagaaaaagagagcgagagagaaccacacacagagacggcttaagcgtttacccgaattaaatatatatttttaaaaagaactgttgagttttatcattttcgttaagtgaccgtgcgcagcgctgtaactgcaggatggggaagcagaatagcaaactggcccctgaagtgatggaggacctggtgaagagcacagagtttaatgagcatgaactcaagcagtggtacaaaggatttctcaaggactgtccaagtgggaggctaaatctcgaggaatttcagcagctctatgtgaagttctttccttatggagacgcctccaagtttgcccagcatgccttccgaaccttcgacaagaatggggacggcaccattgacttccgagagttcatctgcgctctgtccatcacctccaggggcagctttgagcagaagctgaactgggccttcaatatgtatgacctggatggtgatggcaagatcacccgagtggagatgctggagatcatcgaggctatctacaaaatggtaggcactgtgatcatgatgaaaatgaatgaggatggcctgacgcctgagcagcgagtagacaagattttcagcaagatggataagaacaaagatgaccagattacactggatgaattcaaagaagctgcaaagagcgacccttccattgtattacttctgcagtgcgacatccagaaatgagctgatgtcaatgctatggactgcacaaaagtctcaatgttccattcagtctgcagctattcacacacacacacacacacacacacacacacacacacacacacacacacaaatattgcttggactacctataaatggacttgcttcttgtgtttgaaacactcgtgtgcatgagaatgtcatttgctaatgaattttaaaagcatatataaaacaaaacaaacaacctgccacaatgtgatatgtgtaatatcatttcataaaatccctcttcctccaaagcctgggcagaaatgtgctgcaaagagttatatgacttcttgttcatgttttgctaatgctcgtatctccttgattacataatgttagtagcactgagacccccatggtaatgtaacttaattataagctatgtcactaccctcctgtaaaatactattggacagacacagagggacccttggctcctgtgtctggtccacacaccacagaagcttgtattatcagtgaatataaatgtactacatttgcatgccttttgggtttgccttaattcttacctcatttgcatcctatcgatctggaaagagctgttttggatgaatgcagtataaaatgtaaaaaccctgctaaatgacttattgattaagtatatctatctatatatacatatacacaaagatattatttatcgaaagtaaaaaagatggaagtgtattggtttctgtttgaattttcaaaggcttccaatgtggtggcaataaatgtcccaaataaatttataacaattg

SEQ ID NO: 385 - DNA, 2813 bp, Homo sapiens
  Genbank Accession No. AF041260
ctccaccgacagccaggcactgggcagcacgcactggagacccaggaccctgtgcaggagcagctccgggtgacacgaggggactgaagatactcccacaggggctcagcaggagcaatgggtaaccaaatgagtgttccccaaagagttgaagaccaagagaatgaaccagaagcagagacttaccaggacaacgcgtctgctctgaacggggttccagtggtggtgtcgacccacacagttcagcacttagaggaagtcgacttgggaataagtgtcaagacggataatgtggccacttcttcccccgagacaacggagataagtgctgttgcggatgccaacggaaagaatcttgggaaagaggccaaacccgaggcaccagctgctaaatctcgttttttcttgatgctctctcggcctgtaccaggacgtaccggagaccaagccgcagattcatcccttggatcagtgaagcttgatgtcagctccaataaagctccagcgaacaaagacccaagtgagagctggacacttccggtggcagctggaccggggcaggacacagataaaaccccagggcacgccccggcccaagacaaggtcctctctgccgccagggatcccacgcttctcccacctgagacagggggagcaggaggagaagctccctccaagcccaaggactccagcttttttgacaaattcttcaagctggacaagggacaggaaaaggtgccaggtgacagccaacaggaagccaagagggcagagcatcaagacaaggtggatgaggttcctggcttatcagggcagtccgatgatgtccctgcagggaaggacatagttgacggcaaggaaaaagaaggacaagaacttggaactgcggattgctctgtccctggggacccagaaggactggagactgcaaaggacgattcccaggcagcagctatagcagagaataataattccatcatgagtttctttaaaactctggtttcacctaacaaagctgaaacaaaaaaggacccagaagacacgggtgctgaaaagtcacccaccacttcagctgaccttaagtcagacaaagccaactttacatcccaggagacccaaggggctggcaagaattccaaaggatgcaacccatcggggcacacacagtccgtgacaacccctgaacctgcgaaggaaggcaccaaggagaaatcaggacccacctctctgcctctgggcaaactgttttggaaaaagtcagttaaagaggactcagtccccacaggtgcggaggagaatgtggtgtgtgagtcaccagtagagattataaagtccaaggaagtagaatcagccttacaaacagtggacctcaacgaaggagatgctgcacctgaacccacagaagcgaaactcaaaagagaagaaagcaaaccaagaacctctctgatggcgtttctcagacaaatgtcagtgaaaggggatggagggatcacccactcagaagaaataaatgggaaagactccagctgccaaacatcagactccacagaaaagactatcacaccgccagagcctgaaccaacaggagcaccacagaagggtaaagagggctcctcgaaggacaagaagtcagcagccgagatgaacaagcagaagagcaacaagcaggaagccaaagaaccagcccagtgcacagagcaggccacggtggacacgaactcactgcagaatggggacaagctccaaaagagacctgagaagcggcagcagtcccttgggggcttctttaaaggcctgggaccaaagcggatgttggatgctcaagtgcaaacagacccagtatccatcggaccagttggcaaacccaagtaaacaaatcagcacggttcccaccaggttctcctgccaccaagatgtgttctccttactccatctcctccccaaacacgctccatgtatatattcttctgatggccagcaaatgaaattctgcctagaaattaagcccgagctgttgtatattgaggtgtattatttacgtctctggtccagtcttttctggcaaataacagtaaagatggtttagcaggtcacctagttgggtcagaagagtcgatgatcaccaagcaggaaagggagggaatagaggaatgtgttcgggttaagtgatgaaaatggcagtggtggccgggcgtggtggctctcgcctgtaatctcagcactttgggaggccgaggcaggtggatcacctgaggtcaggagttcaagactagcctggccaacatcatgaaaccccgtctctactaaaaatacaaaaattagccaggcatggtggcacacacctgtagtcccagctactcgggagcccaacgcacgagaaccgcttgtacccaggaggtggaggttgcagtgagccgaagttgcaccattgcactccaccctgggcgacagagcaagattctatcaaaaaaaaaaggcagtggcaagtaagttatagaagagaaatgctgctagaaggaattaagcgttgtagtaaacgcgtgctcatcctctaagcttgaagaagggagacgaaaatccatttgtttaaattcacatctcaaggagggagaacccgggctgtgttgggtggttgccaatttcctagaacggaatgtgtggggtatagaaaaaggaatgaataagcgttgtttttcaaatagggtccttgtaagttattgatgagagggaaaagattgactggggagggcttaaaatgatttgggaaaacaattgcttttgaggctcagtgacaacggcaaagattacaactt

SEQ ID NO: 386 - DNA, 990 bp, Homo sapiens
  Genbank Accession No. AF043498
  unsure (1)..(981): n = a or c or g or t
agggagaggcagtgaccatgaaggctgtgctgcttgccctgttgatggcaggcttggccctgcagccaggcactgccctgctgtgctactcctgcaaagcccaggtgagcaacgaggactgcctgcaggtggagaactgcacccagctgggggagcagtgctggaccgcgcgcatccgcgcagttggcctcctgaccgtcatcagcaaaggctgcagcttgaactgcgtggatgactcacaggactactacgtgggcaagaagaacatcacgtgctgtgacaccgacttgtgcaacgccagcggggcccatgccctgcagccggctgccgccatccttgcgctgctccctgcactcggcctgctgctctggggacccggccagctataggctctggggggccccgctgcagcccacactgggtgtggtgccccaggcctttgtgccactcctcacagaacctggcccagtgggagcctgtcctggttcctgaggcacatcctaacgcaagtttgaccatgtatgtttgcaccccttttccccnaaccctgaccttcccatgggccttttccaggattccnaccnggcagatcagttttagtganacanatccgcntgcagatggcccctccaaccntttntgttgntgtttccatggcccagcattttccacccttaaccctgtgttcaggcacttnttcccccaggaagccttccctgcccaccccatttatgaattgagccaggtttggtccgtggtgtcccccgcacccagcaggggacaggcaatcaggagggcccagtaaaggctgagatgaagtggactgagtagaactggaggacaagagttgacgtgagttcctgggagtttccagagatggggcctggaggcctggaggaaggggccaggcctcacatttgtggggntcccgaatggcagcctgagcacagcgtaggcccttaataaacacctgttggataagccaaaaaa

SEQ ID NO: 387 - DNA, 1062 bp, Homo sapiens
  Genbank Accession No. AF044253
atgtatccagaatcaacgacgggctccccggctcggctctcgctgcggcagacgggctcccccgggatgatctacaggaacctgggcaagtctggcctgcgggtctcctgcctgggacttggaacatgggtgaccttcggaggccagatcaccgatgagatggcagagcagctcatgaccttggcctatgataatggcatcaacctcttcgatacagcagaagtctacgcagccggcaaggctgaagtggtactgggaaacatcattaagaagaaaggatggaggcggtccagcctcgtcatcaccaccaagatcttctggggcggaaaggcggagacggagcggggcctgtccaggaagcacataatcgaaggtctgaaagcttccctggagcgactgcagctggagtacgtggatgtggtgtttgccaaccgcccggaccccaacaccccgatggaagagaccgtccgcgccatgacccacgtcatcaaccaggggatggccatgtactggggcacgtcacgctggagctccatggagatcatggaggcctactccgtggcccggcagttcaacctgaccccgcccatctgcgagcaggctgagtaccacatgttccagcgtgagaaagtggaggtgcagctgccggagctgttccacaagataggagtgggcgccatgacctggtcccctctggcctgtggcattgtttctggcaagtacgacagtggcatcccaccctactcaagagcctccttgaagggctaccagtggctgaaggacaagatcctcagtgaggagggccggcgccagcaagccaagctgaaggagctgcaggccatcgccgagcgcctgggctgcaccctgccccagctggccatagcctggtgcctgaggaatgagggagtcagctccgtgctcctgggggcctccaatgcggaccagctcatggagaacattggggcaatacaggtccttccgaaactgtcatcttccattatccacgagattgatagtattttgggcaataaaccctacagcaaaaaggactacagatcctaa

SEQ ID NO: 388 - DNA, 4606 bp, Homo sapiens
  Genbank Accession No. AF044311
agggagatccagctccgtcctgcctgcagcagcccaaccctgcacacccaccatggatgtcttcaagaagggcttctccatcgccaaggagggcgtggtgggtgcggtggaaaagaccaagcagggggtgacggaagcagctgagaagaccaaggagggggtcatgtatgtgggtaagtggggcatggcagggtgggacagtgtggtggccaaagggtgagtgcccagttaccttcgccagaccttactccccagccccagggaggcattttgggagggggcgaggccctggctatcaaggtggggtctccacaccctggagcacccacaatgccctgtgcacacctatgtgtgtttgtctttggcctcctcggggcctctgggtgtcagagacagcagacagggctggctacctgtctgtgcacgcacacacacattcccaagcataccaccctcccctgagcgtggagcccctgaagccatgagcagcctgtgctcaggtggcccccaccctctccacacgggagcggctacagccaggtcacggatcccctccctccccagagagaaggggcaggctgggggatgaaacctaggctcagtgttccctcccccgcatcctctcctggcactctccagaggaggaaggggaggtcaagccaatgactcagctctggcccatcctgtcctgttgctgcttctgaggcccggccacacccgggcagggggtggaccctgggtttagccagtgtccctacctcaggcctgctctctcttgtcccccacattctgtcctgtccccttcccatccatccacttcttccagacacagcaggaagaggccctctgaaggggccgccggcccccagacaccatccttacccccccaccgaccccacagtttgtccagctgttctgttgtgtttgtcctgaccgcccccaacacctcgagggaggtctgggctgacagctccatttcctccccaggagccaagaccaaggagaatgttgtacagagcgtgacctcaggtgagaagccccagggccaggggacacatgggggataggacccctggggctcctgcatcctagtgctggggctcaaacctagagtcctgccttacccccaactggggtcccaagccctacagacccctgcagaccataaggataaagtagggtgggcgtgtctttacccccaccagcatcagaggtgccctggagtcagagggagcaggggagggtcccagcagggccagggctctgagctcctgggaagggggtgcgagcctgactccagcaggcctgccttggggctggggctggggtggaggccagccagtgtcctcccatagtggccgagaagaccaaggagcaggccaacgcggtgagcgaggctgtggtgagcagcgtcaacactgtggccaccaagaccgtggaggaggcggagaacatcgcggtcacctccggggtggtgcgcaaggtgagccccggccctcaaacctgcccagtcctctcctgggcccagaaaggctgctgggcggaggcggcatcactccactccacaccccaggaaacaacacggggggctgcggctggcttcagtttcagtacccactgagcgccggcatggggtggggtccatgcttgctgttcgacctgcattcgggtctggaatcaccacaaccaccccttcgggggacttgggagcccatctcatagacaaggaaagtgaggctcaaaaccacatcttccggacggctctcagcacttaagaaacaccccattttataagtgaaaacaggatcccacacggtgacaggcaccctcccgggcagtggtcaccaggccgggggctgaataacaccagccccgcccccagggcctacctccctccctgggctgggcggggcacctgcctcctgctgggagcctcagggaagtacgtccctagtggtaagaaagcagtgctgcttctgacctaccctctgcagctgcctttgtgtgtgtgtgcacgtgtgttgagtgaacatgtgggtgcatttgtgagaatgtgtgggtgtacatgcgtgtgaatgtacacatgcgtgtgcggcccaatagcaaacagcacaggagcagtggggcgcaccccagggacgggtgttggctgggtgagctgtcccagcacctgtgacacagcaagctctgctttacgcattgtacccttattagttcatttaatagacacaaaatccatgagacggtgtggaaactaaggcccagagagattaatgtgcccaaggtcccatggctagttcatgtgagcttggaattccctgagcagcctgtactctgagagacctgtggcagtgtaagtggtggcctgggctaagatccctacctgggggtggggcgggggagcaatgtccagctctcctacctgctccaggcctcctaggtggtggagtctgaggctctgagcactgagaatccctgcgttaggagtgggtgggtggaagggtgggggctgccctactcctcttggctctggggcgatgcccaggtgtctgcttccagggccagcacagggtctccatgtccttggaactggcagccgctccctctcctagttctcctttctcgttgtatgaccttgagaagcaaaggaacctctctgggcctccgtgttctcatctgcaagatgggggtgagagtgtcggcttccctgggctgtgtgatgaggcagggccatgacttccatgaagcaattctcctggtctatgtgagcacccagcagaggaaggtgaccatcatcatcatcatcatcatgtgtcccaggcagaacacatagagccccagggggctcctccctcctcacccccagcaaaagaggccctggggtgagggtgcccgggcattccttgtgaatcccggagcagggctagtgagcccttggagccacctcgagggagactcatttcctggtgacaccccaaaaccagtcacgactcatctcccagtgaactgtgaaaggcctcagcagggactatctgaccactcatacccctggcctcatcatcagccttagggcagcaggactcagcaggtggccacctgccctgcccctggatagcctggccgactcccgccagcacagcactgcccttttatgccccactccgccaaggggcaggatggccctggggcaacacagaggtgacagtatccccgccttcccccccgtcccccgccagaggcaggtgctgaggccagagtgcagggcaatcaccagtgtggtcctacacacccagctgtcatgatatctcacgcaagtgtctggccggcatggagtgcaggagatagaagatgggaagtgagagaggactgtgtaacctctgttggccctgaccagcctgagcccagagcctgtccaggaggcaaagagagggagccatgctcctgtggactgaagtgggcctgaagcaagcctgatctgatgccaacacaccccaccactttgagttggaaggccctgagctgcatgccaagcctccctggcctcagagtccctatgtgaaccccaatcagtcttccttgtagggctactgaggtggggtcagacctggggcttcaggggcttttgcccattttaacccccattccaccttaccccacccaggttcttcatcagtgaagcccaactaggggcttcccagagactggggaccagcttgaggggtgaagctgggctccagggtacttggtgcccctggaaggcctcggcatcatcagagccccgggtattgtctgaattgcacgcccccaatacctccagcccctccaagtacaacaaggccacgaggggcctgtgctcttccttgaggccagggtagacaaggccctggttgcagggcagctaggggtctctgcattctccacatggtctcatgcccccttttgtcccctacaggaggacttgaggccatctgccccccaacaggagggtgtggcatccaaagagaaagaggaagtggcagaggaggtaggagctgggctcctggggtgcaccatggggggttccttggtagggaccccatcccccacagacgcactgcttccctcctgggctcccagggcccagaggggcctcctgaccttccacagcccctacagggactgtgtacagggctaaccctgaacctgagtgggaggtccccccacggatgacccctcaggcatggggcacagaagacaacttttctcagcccactcagggtggcccattaaggctggggcctggagctgggtgtgcaggtcattctctctcccaggcccagagtgggggagactagagggctacaggccagcgtggatgacctgaagagcgctcctctgccttggacaccatcccctcctagcacaaggagtgccgccttgagtgacatgcggctgcccacgctcctgccctcgtcttcctggccacccttggcctgtccacctgtgctgctgcaccaacctcactgccctccctcggccccacccaccctctggtccttctgaccccacttatgctgctgtgaattttttttttaaatgattccaaataaaacttgagcccactcct

SEQ ID NO: 389 - DNA, 2347 bp, Homo sapiens
  Genbank Accession No. AF045941
cagatcctccccagggaatcactacaggctggttagccaaaaagtcctgattttctgctcaatagaggtccttactggaaggcagcatgtccaatgttaccttgagaaaaatgtctcccacaggaaatgagatgaagagcaccactcagggaaccacacggaagcagcaggattttcacgaggtgaacaaaagaagaactttcttacaggataacagttggataaagaaacgccctgaagaagaaaaagatgaaaattacggtagggtggtgctcaaccgacataattcccatgatgcattggacaggaaagtaaatgagagagatgtgccaaaagctacaattagtcggtacagttctgatgacactttggacaggatctcagacagaaatgatgctgctaaaacatataaggccaataccttggataaccaactaaccaataggagcatgtccatgtttagatcactggaagtaacaaagttgcaacctggcggttcattgaatgccaacacctccaacaccatagcatccacttctgctactactcctgtaaagaagaagaggcagtcctggtttccaccgccccctccaggttacaatgcctcttcgagcacaggaaccaggagacgggaaccaggtgttcaccctccaatacctccaaagcccagttctcctgtttcttctcctaaccagctgagacaggataataggcagatacatccacctaaaccaggtgtatatacagaaaccaacagatctgctgaaagaaatataagtgaagaattggataatctcatcaaaatgaacaaaagcttgaataggaatcaaggtcttgatagtctcttcagagcaaatccaaaggtagaagaaagagagaaaagagccaaaagccttgaaagtctcatctatatgagtacccggacagataaagatggcaaaggaatccaaagccttggaagtccgattaaagttaatcaaaggactgacaaaaatgagaaaggaagacaaaatctcgaatctgttgctaaagtggatgccaggacgaataaaacgagcagaagaagtgaagaccttgataatgctactgaagtaaatcccaaaggacatgaaaataccactggaaaaaaagaccttgatgggcttattaaagtggatcctgaaacaaataaaaatattacgaggggccagagccttgataatctcatcaaagtgacccctgaagtaaagagaagtaaccaaggttccaaagaccttaataacttcatcaaagtgtatccaggaacagaaaaaagtactgaagggggccaaagtctcgacagcctcattaaagtgactcctgaaagaaacagaactaaccaagggaaccaagacttggaaaatcttatcaaagtgatcccttcagcaaacaaaagcagtgaacaaggtcttgatgaacatattaatgtcagccccaaagctgtcaaaaacactgatggaaaacaagatcttgataaactcatcaaggtgaatcctgaaattttcacaaacaaccaaagaaaccaagatcttgctaacctcatcaaagtaaatcctgcagtaatcagaaacaatcagagccaagacttggacaatcttattaaagtgaaaccttcagctcttagaaacactaatcgagaccagaacctggaaaatttaattgaagtaaattctcatgtgtctgaaaacaagaatggaagctctaacactggagccaagcaggcaggaccacaggatactgttgtgtacacaaggacatatgtggagaatagtaaatcacccaaggatggatatcaggagaatatctctggaaaatacatacaaactgtttattcaacttctgataggtctgtcattgaaagagatatgtgcacttactgccgaaaacccttgggtgtagaaactaaaatgattttagatgaattacaaatttgctgccattctacttgctttaagtgtgaaatatgcaagcagcctttggaaaatctrcaagcgggtgatagtatttggatttatagacagacaatacactgtgaaccttgctactctaaaattatggcaaagtggattccataactctggcacaaggaaatcaagatgaaaagcactcattaaggaattaaagttacaagttttatcttaataatatgtaatctagaaaagctttcacattgaagatcaactcttgtacaaaattaacaattctgttattgcataagtaatctaattgtcttcaataaggtcacacacataaaaagagccatctggtctctggctagagttagcaataaaaagttcaaatggttccagaaaaaaaaaaaaaaaaaaaa

SEQ ID NO: 390 - DNA, 449 bp, Homo sapiens
  Genbank Accession No. AF046798
tttattcctgtcattttccctcatgaaatgtgtttgatgtgcttggctgatgttcattataaagctcactgcgcactgggactctgggctgtatatgcatatgttgtttacagaatccaaaggcctggaacacaatggtactcaaaaacatagctgcctcggggaaattctccagtgaccgaacaattaaagaatatgcccaaaacatctggaacgtggaaccttcagatctaaagatttctctatccaatgaatctaacaaagtcaatggaaattgaactctacaatgtctctagaaaacatagcttcttactgaacttgaacatttttacaacattcactggtttttgttttgttagctaataatctataatagttgagtatctctgggaatggggagggaaattatatgtaatagagcttaaaaataaagtgtcaatttccaagga

SEQ ID NO: 391 - DNA, 2745 bp, Homo sapiens
  Genbank Accession No. AF046889
acaatcctcgccttgtctgtggcgccggcatctggagctttctgtagcctccggatacgcctttttttcagggcgtagcccctagccaagctgctccccgcggcggccgcacagcagcccgagcgccccctttccagagctcccctccggagctgggatccaggcgcgtagcggagatcccaggatcctgggtgctgtttgggcccgctccccaccatgacctcctcggggcctggaccccggttcctgctgctgctgccgctgctgctgccccctgcggcctcagcctccgaccggccccggggccgagacccggtcaacccagagaagctgctggtgatcactgtggccacagctgaaaccgaggggtacctgcgtttcctgcgctctgcggagttcttcaactacactgtgcggaccctgggcctgggagaggagtggcgagggggtgatgtggctcgaacagttggtggaggacagaaggtccggtggttaaagaaggaaatggagaaatacgctgaccgggaggatatgatcatcatgtttgtggatagctacgacgtgattctggccggcagccccacagagctgctgaagaagttcgtccagagtggcagccgcctgctcttctctgcagagagcttctgctggcccgagtgggggctggcggagcagtaccctgaggtgggcacggggaagcgcttcctcaattctggtggattcatcggttttgccaccaccatccaccaaatcgtgcgccagtggaagtacaaggatgatgacgacgaccagctgttctacacacggctctacctggacccaggactgagggagaaactcagccttaatctggatcataagtctcggatctttcagaacctcaacggggctttagatgaagtggttttaaagtttgatcggaaccgtgtgcgtatccggaacgtggcctacgacacgctccccattgtggtccatggaaacggtcccactaagctgcagctcaactacctgggaaactacgtccccaatggctggactcctgagggaggctgtggcttctgcaaccaggaccggaggacactcccgggggggcagcctcccccccgggtgtttctggccgtgtttgtggaacagcctactccgtttctgccccgcttcctgcagcggctgctactcctggactatccccccgacagggtcacccttttcctgcacaacaacgaggtcttccatgaaccccacatcgctgactcctggccgcagctccaggaccacttctcagctgtgaagctcgtggggccggaggaggctctgagcccaggcgaggccagggacatggccatggacctgtgtcggcaggaccccgagtgtgagttctacttcagcctggacgccgacgctgtcctcaccaacctgcagaccctgcgtatcctcattgaggagaacaggaaggtgatcgcccccatgctgtcccgccacggcaagctgtggtccaacttctggggcgccctgagccccgatgagtactacgcccgctccgaggactacgtggagctggtgcagcggaagcgagtgggtgtgtggaatgtaccatacatctcccaggcctatgtgatccggggtgataccctgcggatggagctgccccagagggatgtgttctcgggcagtgacacagacccggacatggccttctgtaagagctttcgagacaagggcatcttcctccatctgagcaatcagcatgaatttggccggctcctggccacttccagatacgacacggagcacctgcaccccgacctctggcagatcttcgacaaccccgtcgactggaaggagcagtacatccacgagaactacagccgggccctggaaggggaaggaatcgtggagcagccatgcccggacgtgtactggttcccactgctgtcagaacaaatgtgtgatgagctggtggcagagatggagcactacggccagtggtcaggcggccggcatgaggattcaaggctggctggaggctacgagaatgtgcccaccgtggacatccacatgaagcaggtggggtacgaggaccagtggctgcagctgctgcggacgtatgtgggccccatgaccgagagcctgtttcccggttaccacaccaaggcgcgggcggtgatgaactttgtggttcgctaccggccagacgagcagccgtctctgcggccacaccacgactcatccaccttcaccctcaacgttgccctcaaccacaagggcctggactatgagggaggtggctgccgcttcctgcgctacgactgtgtgatctcctccccgaggaagggctgggcactcctgcaccccggccgcctcacccactaccacgaggggctgccaacgacctggggcacacgctacatcatggtgtcctttgtcgacccctgacactcaaccactctgccaaacctgccctgccattgtgcctttttagggggcctggcccccgtcctgggagttgggggatgggtctctctgtctccccacttcctgagttcatgttccgcgtgcctgaactgaatatgtcaccttgctcccaagacacggccctctcaggaagctcccggagtccccgcctctctcctccgcccacaggggttcgtgggcacagggcttctggggactccccgcgtgataaattattaatgttccgcagtctcactctgaataaaggacagtttgtaaatcttaaaaaaaaaa

SEQ ID NO: 392 - DNA, 1524 bp, Homo sapiens
  Genbank Accession No. AF052124
gcagagcacagcatcgtcgggaccagactcgtctcaggccagttgcagccttctcagccaaacgccgaccaaggaaaactcactaccatgagaattgcagtgatttgcttttgcctcctaggcatcacctgtgccataccagttaaacaggctgattctggaagttctgaggaaaagcagctttacaacaaatacccagatgctgtggccacatggctaaaccctgacccatctcagaagcagaatctcctagccccacagacccttccaagtaagtccaacgaaagccatgaccacatggatgatatggatgatgaagatgatgatgaccatgtggacagccaggactccattgactcgaacgactctgatgatgtagatgacactgatgattctcaccagtctgatgagtctcaccattctgatgaatctgatgaactggtcactgattttcccacggacctgccagcaaccgaagttttcactccagttgtccccacagtagacacatatgatggccgaggtgatagtgtggtttatggactgaggtcaaaatctaagaagtttcgcagacctgacatccagtaccctgatgctacagacgaggacatcacctcacacatggaaagcgaggagttgaatggtgcatacaaggccatccccgttgcccaggacctgaacgcgccttctgattgggacagccgtgggaaggacagttatgaaacgagtcagctggatgaccagagtgctgaaacccacagccacaagcagtccagattatataagcggaaagccaatgatgagagcaatgagcattccgatgtgattgatagtcaggaactttccaaagtcagccgtgaattccacagccatgaatttcacagccatgaagatatgctggttgtagaccccaaaagtaaggaagaagataaacacctgaaatttcgtatttctcatgaattagatagtgcatcttctgaggtcaattaaaaggagaaaaaatacaatttctcactttgcatttagtcaaaagaaaaaatgctttatagcaaaatgaaagagaacatgaaatgcttctttctcagtttattggttgaatgtgtatctatttgagtctggaaataactaatgtgtttgataattagtttagtttgtggcttcatggaaactccctgtaaactaaaagcttcagggttatgtctatgttcattctatagaagaaatgcaaactatcactgtattttaatatttgttattctctcatgaatagaaatttatgtagaagcaaacaaaatacttttacccacttaaaaagagaatataacattttatgtcactataatcttttgttttttaagttagtgtatattttgttgtgattatctttttgtggtgtgaataaatcttttatcttgaatgtaataagaatttggtggtgtcaattgcttatttgttttcccacggttgtccagcaattaataaaacataaccttttttactgcctaaaaaaaaaaaaaaaaaaaa

SEQ ID NO: 393 - DNA, 2178 bp, Homo sapiens
  Genbank Accession No. AF055008
gtagtctgagcgctacccggttgctgctgcccaaggaccgcggagtcggacgcaggcagaccatgtggaccctggtgagctgggtggccttaacagcagggctggtggctggaacgcggtgcccagatggtcagttctgccctgtggcctgctgcctggaccccggaggagccagctacagctgctgccgtccccttctggacaaatggcccacaacactgagcaggcatctgggtggcccctgccaggttgatgcccactgctctgccggccactcctgcatctttaccgtctcagggacttccagttgctgccccttcccagaggccgtggcatgcggggatggccatcactgctgcccacggggcttccactgcagtgcagacgggcgatcctgcttccaaagatcaggtaacaactccgtgggtgccatccagtgccctgatagtcagttcgaatgcccggacttctccacgtgctgtgttatggtcgatggctcctgggggtgctgccccatgccccaggcttcctgctgtgaagacagggtgcactgctgtccgcacggtgccttctgcgacctggttcacacccgctgcatcacacccacgggcacccaccccctggcaaagaagctccctgcccagaggactaacagggcagtggccttgtccagctcggtcatgtgtccggacgcacggtcccggtgccctgatggttctacctgctgtgagctgcccagtgggaagtatggctgctgcccaatgcccaacgccacctgctgctccgatcacctgcactgctgcccccaagacactgtgtgtgacctgatccagagtaagtgcctctccaaggagaacgctaccacggacctcctcactaagctgcctgcgcacacagtgggggatgtgaaatgtgacatggaggtgagctgcccagatggctatacctgctgccgtctacagtcgggggcctggggctgctgcccttttacccaggctgtgtgctgtgaggaccacatacactgctgtcccgcggggtttacgtgtgacacgcagaagggtacctgtgaacaggggccccaccaggtgccctggatggagaaggccccagctcacctcagcctgccagacccacaagccttgaagagagatgtcccctgtgataatgtcagcagctgtccctcctccgatacctgctgccaactcacgtctggggagtggggctgctgtccaatcccagaggctgtctgctgctcggaccaccagcactgctgcccccagggctacacgtgtgtagctgaggggcagtgtcagcgaggaagcgagatcgtggctggactggagaagatgcctgcccgccgggcttccttatcccaccccagagacatcggctgtgaccagcacaccagctgcccggtggggcagacctgctgcccgagcctgggtgggagctgggcctgctgccagttgccccatgctgtgtgctgcgaggatcgccagcactgctgcccggctggctacacctgcaacgtgaaggctcgatcctgcgagaaggaagtggtctctgcccagcctgccaccttcctggcccgtagccctcacgtgggtgtgaaggacgtggagtgtggggaaggacacttctgccatgataaccagacctgctgccgagacaaccgacagggctgggcctgctgtccctaccgccagggcgtctgttgtgctgatcggcgccactgctgtcctgctggcttccgctgcgcagccaggggtaccaagtgtttgcgcagggaggccccgcgctgggacgcccctttgagggacccagccttgagacagctgctgtgagggacagtactgaagactctgcagccctcgggaccccactcggagggtgccctctgctcaggcctccctagcacctccccctaaccaaattctccctggaccccattctgagctccccatcaccatgggaggtggggcctcaatctaaggccttccctgtcagaagggggttgtggcaaaagccacattacaagctgccatcccctccccgtttcagtggaccctgtggccaggtgcttttccctatccacaggggtgtttgtgtgtgtgcgcgtgtgcgtttcaataaagtttgtacactttcaaaaaaaaaaaaaaaaaaaaaaaaaaaaaa

SEQ ID NO: 394 - DNA, 1788 bp, Homo sapiens
  Genbank Accession No. AF055012
gtatgagcgcattggcttgtctgccgcaggcacagaagggtagaaagccacagcagggggcagtccagcagactctgactcaactttctaggcacctagcagagaaagataagatcaaaaggtgtttggtttttcttttaatttttattgtagtttttttgggtgggtgggggaagtaaactagactgaagcgatggatttttttttttcttttttttctttagtgtttttccctttgttcttgaacacttttgccctgcagcctcagttttgaattcttttagcaacttggattagaggggcccatatgtcagaagctcccagcacctcctacttgggagaaaagtgagccatctgctggtcaggaagtcctccagagaggcagcttttcccacaatggtggcaggaaactttggggaaagcaggaatggtgtccactgctgcggaggaactgccttcagagaaggtggggctggaaaagggttagaagcctcctagctgggattgtctttgtttcacctttctttaaattagaattacagaagcccctgcccagtgaacagataacaattggtcttatgctcctccctttcccccattttttcttttgctgttttgttttttgttttttgtttgtttgtttgtttttttgagacagagtcatgctctgtcacccgggctggagtgcagtggtgcgatctcagctcactgtaacctccgcctcccgggttcaagcaattatttgcctcagcctcccgagtagctgggattataggcacccgccaccatgtctggcttttagtagagacggggtttcaccatcttggccaggctggtcttggaactcctgacctcgtgagccaccacgcccagcctcttttgctgtttcattgctgacagtgttcaacaatatgccccatctttatatatcctaagaaacactaatcctaggttattgctagccaaaatatttttgtcctgagtagtgtcactgggccaaaagatagatcaggacgacagcctttagttttcctgaaatcaccaggtcaggcacaaggagaaaaggttcctggatactgactaacttgggtgggtctagccaggagaaagacagtaacatgtgttctgtactttctgggaagatccctgaagccatcacagaggctccccaacttctgagtcgcccatctgttgctgtgggagtgtgaacggatcgctgaaggagagggagctttgctctctctaggtgggcaagtttcctgggctctctgtgttgcctccctctggcttcttcctcccgtgccctctccccgtgtgccccagggggatcagggatcctcaccctcctgaggcccagtggggaagaatgaacatggcttcatccaggttaactgatgctgccatttgcccagcctcttccatcccagccctgtcagtgagcccaggtctggtgcaactgctgcaggatgcctgtagtagggaactctggaagtgtattgggctgaggtgggattttccctccccacagtgcactgagcaatggagggtggtgagggagccatgctgctgaattctggttggcatttccccattatgtaaaatggggtgttgggtagggcagactctgcttgggtttggttgtaagataaacctggaggagaagcacagttgtcccattgaattatttgagcaaaaactactgtaaataacttttttgtcttttgtcaaataaaatttttttttgtttttttaagcagaaaaaaaaaaaaaaaaaaaaaaaaaaaaaaa

SEQ ID NO: 395 - DNA, 1883 bp, Homo sapiens
  Genbank Accession No. AF055022
cctcgtgccaagcttggcacgaggaggaagcattcagcatctgcccttgtcctccatggtcacaaccagaactgtgactgtagcccggacatcaccttgaagatacagtttttgaggcttcttcagagcttcagtgaccaccacgagaacaagtacttgttactcaacaaccaggagctgaatgaactcagtgccatctctctcaaggccaacatccctgaggtggaagctgtcctcaacaccgacaggagtttggtgtgtgatgggaagaggggcttattaactcgtctgctgcaggtcatgaagaaggagccagcagagtcgtctttcaggttttggcaagctcgggctgtggagagtttcctccgagggaccacctcctatgcagaccagatgttcctgctgaagcgaggcctcttggagcacatcctttactgcattgtggacagcgagtgtaagtcaagggatgtgctccagagttactttgacctcctgggggagctgatgaagttcaacgttgatgcattcaagagattcaataaatatatcaacaccgatgcaaagttccaggtattcctgaagcagatcaacagctccctggtggactccaacatgctggtgcgctgtgtcactctgtccctggaccgatttgaaaaccaggtggatatgaaagttgccgaggtactgtctgaatgccgcctgctcgcctacatatcccaggtgcccacgcagatgtccttcctcttccgcctcatcaacatcatccacgtgcagacgctgacccaggagaacgtcagctgcctcaacaccagcctggtgatcctgatgctggcccgacggaaagagcggctgcccctgtacctgcggctgctgcagcggatggagcacagcaagaagtaccccggcttcctgctcaacaacttccacaacctgctgcgcttctggcagcagcactacctgcacaaggacaaggacagcacctgcctagagaacagctcctgcatcagcttctcatactggaaggagacagtgtccatcctgttgaacccggaccggcagtcaccctctgctctcgttagctacattgaggagccctacatggacatagacagggacttcactgaggagtgaccttgggccaggcctcgggaggctgctgggccagtgtgggtgagcgtgggtacgatgccacacgccctgccctgttcccgttcctccctgctgctctctgcctgccccaggtctttgggtacaggcttggtgggagggaagtcctagaagcccttggtccccctgggtctgagggccctaggtcatggagagcctcagtccccataatgaggacagggtaccatgcccacctttccttcagaaccctggggcccaggccacccagaggtaagaggacatttagcattagctctgtgtgagctcctgccggtttcttggctgtcagtcagtcccagagtggggaggaagatatgggtgacccccaccccccatctgtgagccaagcctcccttgtccctggcctttggacccaggcaaaggcttctgagccctgggcaggggtggtgggtaccagagaatgctgccttcccccaagcctgcccctctgcctcattttcctgtagctcctctggttctgtttgctcattggctgctgtgttcatccaagggggttctcccagaagtgaggggcctttccctccatcccttgaggcacggggcagctgtgcctgccctgcctctgcctgaggcagccgctcctgcctgagcctggacatggggcccttccttgtgttgccaatttattaacagcaaataaaccaattaaatggagactattaaataactttattttaaaaaaaaaaaaaaaaaaa

SEQ ID NO: 396 - DNA, 5574 bp, Homo sapiens
  Genbank Accession No. AF055481
ttggggtcaaaagggaaggtcccgccaggggtccctgggcagaggataccagcggcagaccacaggcagggcagaggcacgtctgggtcccctccctccttcctatcggcgactcccaggtgaagctacctgcaccccacccgggttggggtggattgcgagaggatgggtgggaacccccgggccacaggcaggagccggcttagagcctcggtttctccactgcgggacgcggaagtccccccgctgtgaggttgagaaagaggctcccactggctccgagcctcggatccccaccccgcgcgtgaaggagggggaaacctcgggcgcggcgtggctgcagccagggtagctggggcgcggagagcgctccactcgggcacagggaggacgggaagatgccgcgaggggcgtcattagggtaattgtgcccattaccgtgttccagcccgaatctcccgtctgccagcccctggggttatcggctgcaggtcaaaagggtgcttgcgggctggggtggcccaggctgggcggatgagcgcggcgaggtgggggtctctaacggagcatctgttttaacccgcccctgcacacaccccagcagatcctggccatgagagctccgcacctccacctctccgccgcctctggcgcccgggctctggcgaagctgctgccgctgctgatggcgcaactctggggtaaggtgggggacagggggcggggagaggcgccggtgggaggcacgggcgggagggcaatgtgttcccgtcaccaagccccgcgcacctctcctcccccgagaccccagcacccacccagcgctccggagcacggcccgcccccaagtcagctgggcccttcttctggctcggcccctgggtgacccgccccactcaggccctgtccgatttctgccacccggatcctcgctcttccgtggactcttcggcgtgttctttctcctcctcttacgccgccccatcccggccccgctccattttacactaccgtgttttgttttgtttgtttgtttgtttgagacggagtctcgctctgtcgcccaggctggagtgcagtggcgcgatctcggctcactgcaagctccgcctcccgggttcacaccattctcctgcctcagcctcccgagtagctgggactacaggcgcccgccaccaagcccggctagttttttgtatttttagtagagatgggatttcaccgtggtctcgatctcctggcctcgtgatccgcctgcctcggcctcccaaagtgctgggattacaagcgtgagccaccgctcccggccacaccacagtgttttatcctgagtcttgccttaccgctttttgccctctcccctcactttttttcttcctctttccctttctctctcttttttctttttctttctttcttttctttctttcgttcttcttttccttccttcctttccttccttcctttcgtttgtttcttctttcttgttttactttctctcttattttttcttctttctttcttgttttttttctttctctctctttttctttccttctttttttttttttttttttgagacagggcagtgctctgtctccgtggctggagtacagtggcccaatcagagctcactgcagcctcgacctcctgggctcaagcgatactcagcctccagagtagctggtaccacaggcatgcaccaccacatccggctttttttttttttttttttttttttttttttgagacagggtctcactctgtcgcccagactggagtgcagtggcccaatctcggctcattgcaacctccacctcctgggctcaagcgatcctcccacctcagcctcccaggtagctgtgactacaggcgcatgcctccgcgactacttttttgttgttgttgttgtttgtttgtttttgtagagactgggtcttgctgtgttgcccgggctggtcttgaattcccgagctcaagcggtccaaccgcctcggcttcccaaagtgctgggattacaggcgtaaaccactgcgccccacccctctcctggttttcaatcccgttttgttattcacaccccttcctctccccgatccccgagttctatccccgcacccttacctccccgccgcgttcaatccccgcccctctatcgaccagcgacgttctagccagctctccaggcgcgctgcgttcagtccctgccctccagacccaccctattctgtctcattactccacgctaccctatcccagcttccttccactttcacgcgcttcttctcctcccattccttcggtgcacgcgaaacccccaatatttccctaccaccctcgcgttctggctgcgtcccccgtccccgaacgcagtccagtgccacagcccagctccaaccccaaacccagaccctgccctccgtgctttgattccgtcccctttctttctcccagccgcagaggcggcgctgctcccccaaaacgacacgcgcttggaccccgaagcctatggcgccccgtgcgcgcgcggctcgcagccctggcaggtctcgctcttcaacggcctctcgttccactgcgcgggtgtcctggtggaccagagttgggtgctgacggccgcgcactgcggaaacaagtaggaggagatccatccccgaggacgccacggggggctgtggaggcggcctccagggaggagcgggcagggcggggtctctcggaactcccacagctggaggtgcggtccccggtgtccttccagcaggaggagagaccgggcttgcgctgtggccgccaggggacggtgtggtccttttccgcatttctgggcccgtcactcctctcccgctgattctccttgagctctaggaggaggtggttgcctgcaacggatagaagccagggtccggtgtggtcaggaatttagaactaaaggaaaaggttcacttcgtgagtccccgttgaaggaggaagggttgggtattaccacagagaaaatgtggagttgggctgggctcggtggctcacgcctgtaatcccagcactttgggaggccaaggcgggtggatcacctgaggtcaggagttcaagaccagcctggccaacatggtgaaaccacttctcaactaaaaataaaataaaataaaaaataaaaaattttaaaaaaattaaaaaaaaaaaaaggctgggtgtggtggcgggtgcctgtaatcccagctactcaggaaggaggctgaggcaggagaactgcttgaacctgggaggtggaggttgcagtgagccgagattgcgccattgcattctagcctgggtgacaagagcgaaactctgtttcaacaaagaaaagaaaaagagaaaagaaaatgtggaaggcttacctaggtgtccaggcccccagccctcctcaattcctgcagatcctcagagctcaaacaactgattcctcctccccatgtccactgaggtccccttctcccacaaggccctcttccctcagactcttcctatctccaggccctgcttcactgcccacctgctttcccagtccctgtgaagggtttgccttcacatgcctcttccttcccccaggccactgtgggctcgagtaggggatgaccacctgctgcttcttcagggcgagcagctccgccggacgactcgctctgttgtccatcccaagtaccaccagggctcaggccccatcctgccaaggcgaacggatgagcacgatctcatgttgctaaagctggccaggcccgtagtgccggggccccgcgtccgggccctgcagcttccctaccgctgtgctcagcccggagaccagtgccaggttgctggctggggcaccacggccgcccggagaggcaagagctggggctctgaggccagaacctcaggaggagggggctgagggcctgaacccctgggtctgaggaaggatgggctggggactggattcctggatctgagggaggacgggctggggtcctagatgcctgggtctgtgagtctgaggggaggaggggctgggggcctggactcctgggtctaagtggggaggggctggggccaggattcttgagtctgaaggaggaggggctggggcttaggatagaaacggtcttgtatctggactcctggctccccaaggattgggggctggacccagggattactggcatattctcccttcagtgaagtacaacaagggcctgacctgctccagcatcactatcctgagccctaaagagtgtgaggtcttctaccctggcgtggtcaccaacaacatgatatgtgctggactggaccggggccaggacccttgccaggtagggtctgaacagggagagtctctgactcctgggagggaggacagggaggttatgggaaaagagcagaccctgtgcccgatcccaaactccattcccaaacccatccttgaccccaactcttacccagacctaaccccctcctcatccctatcctcaatcccatttccatcctaaccccaccccattcccatctccaagcccattttcatcccctcaccttccatgaactacaatcccaacccaagtctcactgtgccttcattctcatcccccagcccaacctcccataacctgaagtccacctccattcctaccttccagctcatacctaattccaaccccatcccatcctcgtctttatcccaacccaaccccttccttccccaccactgccccagatcccaaagtgacagctctcacgttggcacatttatttgatctctcctttctgccacccccagagtgactctggaggccccctggtctgtgacgagaccctccaaggcatcctctcgtggggtgtttacccctgtggctctgcccagcatccagctgtctacacccagatctgcaaatacatgtcctggatcaataaagtcatacgctccaactgatccagatgctacgctccagctgatccagatgttatgctcctgctgatccagatgcccagaggctccatcgtccatcctcttcctccccagtcggctgaactctccccttgtctgcactgttcaaacctctgccgccctccacacctctaaacatctcccctctcacctcattcccccacctatccccattctctgcctgtactgaagctgaaatgcaggaagtggtggcaaaggtttattccagagaagccaggaagccggtcatcacccagcctctgagagcagttactggggtcacccaacctgacttcctctgccactccccgctgtgtgactttgggcaagccaagtgccctctctgaacctcagtttcctcatctgcaaaatgggaacaatgacgtgcctacctcttagacatgttgtgaggagactatgatataacatgtgtatgtaaatcttcatgtgattgtcatgtaaggcttaacacagtgggtggtgagttctgactaaaggttacctgttgtcgtgatctgaccacgtcccggtgaaagcgtgtgtccagggaagaagtgcacagggtagcccccaatcccaaccttccatccccaacccttagggatgatggaaga

SEQ ID NO: 397 - DNA, 1360 bp, Homo sapiens
  Genbank Accession No. AF059214
cagcctcgcaatgagctgccacaactgctccgacccccaggtcctttgcagctccgggcagctgttcctgcagcccctctgggaccacctgaggagctgggaggccctcctacagtcgcccttcttcccggtcatcttctccatcaccacatacgtgggcttttgcctgcccttcgtggtcctggatatcctgtgctcctgggtgcccgccctgcggcgctacaagatccaccctgacttctcgccatccgcgcagcagctgctaccttgcctggggcagaccctctaccagcatgtgatgtttgtgttccccgtgacgctgctgcattgggcccgcagcccggccctcctgccccacgaagctcccgagctgctcctgctgctgcaccacatcctgttctgcctgctactcttcgacatggagttcttcgtgtggcacctgctgcaccacaaggtgccctggctgtaccgcaccttccacaaggtgcaccaccagaactcgtcctcgttcgcgctggcaacgcagtatatgagcgtctgggaactgttttctttgggcttcttcgacatgatgaacgtcacactgctcgggtgccacccgctcaccaccctgaccttccacgtggtcaacatctggctttccgtggaggaccactccggctacaacttcccttggtccactcacagactggtgcccttcgggtggtacgggggtgtggtgcaccacgacctgcatcactctcactttaactgcaacttcgctccgtactttacacactgggacaaaatactgggaacgctgcggactgcatctgtcccagcgcggtgatgtggctgcggtgggtgcccctaagactcgggactgctgtgcctttcacacttgaatgaagagaaacacctgagctatatatttttttaaagcaactaacttattgctttatgtttatctatgaaaaccatagataaaatctgatgcatttttgtaatctgacaaagtaatttacatactgtttgtgtatcaatacaattttgtgttcttggtattcttagtctagctcacctcaatagccttgaatcctgcatatgaattagacattcatcactggcatatttagaatatctctaaaaggacttgtttgtagaataaggaattttctatgtttcaaagtgttctaaaacctggctaaaagaatgtatttttgtggatggtgttgacttctgactctaaaagcaatcaaacatgtttctgctggacagtgaccaagaattatagtaccttcttatatttttttatagaactgtatatttattttgaaagaaatgttattcgtgctttaaaaaggaaaaaaaaccataaaaa

SEQ ID NO: 398 - DNA, 4827 bp, Homo sapiens
  Genbank Accession No. AF059611
gcggtggcgctgcggagacccggtccagacgcctggcggccgccggcacacaaggcgctttctagctccctcccccgagcgcacagcccgcctccttccgcggcgcctgcagtggcaggcttgctctgccctaccgtgacgcgctccggagacgctctgcgggtcctggacaccgggtccgcggcgtggggacgacagacggaggcgaacgccatcggtagccggtccgcgagccatcgttcggggcgcagtcctctccccggctggccctcctttctccggggcattcgccaccgcttccctgggctgagacgaccggttcgtcgcctccttgcccgtgaccgtcgctagaactcagttgtgcgttgcggccagtcgccactgctgagtggaagcaaaatgtcagtcagtgtgcatgagaaccgcaagtccagggccagcagcggctccattaacatctatctgtttcacaagtcctcctacgctgacagcgtcctcactcacctgaatcttttacgccagcagcgtctcttcactgacgtccttctccatgccggaaataggaccttcccttgccaccgggcagtgctggctgcatgcagtcgctactttgaggccatgttcagtggtggcctgaaagagagccaggacagtgaggtcaactttgacaattccatccacccagaagtcttggagctgctgcttgactatgcgtactcctcccgggtcatcatcaatgaagaaaatgcagaatcgctcctggaagctggtgacatgctggagtttcaagacatccgggatgcatgtgcagagttcctggaaaagaacctgcatcccaccaactgcctgggcatgctgctgctgtctgatgcacaccagtgcaccaagctgtacgaactatcttggagaatgtgtctcagcaacttccaaaccatcaggaagaatgaagatttcctccagctgccccaggacatggtagtgcaactcttgtccagtgaagagctggagacagaggatgaaaggcttgtgtacgagtctgcaattaactggatcagctatgacctgaagaagcgctattgctacctcccagaactgttgcagacagtaaggctggcacttctgccagccatctatctcatggagaatgtggccatggaggaactcatcaccaagcagagaaagagtaaggaaattgtggaagaggccatcaggtgcaaactgaaaatcctgcagaatgacggtgtggtaaccagcctctgtgcccgacctcggaaaactggccatgccctcttccttctgggaggacagactttcatgtgtgacaagttgtatctggtagaccagaaggccaaagaaatcattcccaaggctgacattcccagcccaagaaaagagtttagtgcatgtgcgattggctgcaaagtgtacattactggggggcgggggtctgaaaatggggtctcgaaagatgtctgggtttatgataccctgcacgaggagtggtccaaggctgcccccatgctggtggccaggtttggccatggctctgctgaactgaagcactgcctgtatgtggttggggggcacacggccgcaactggctgcctcccggcctccccctcagtctctctaaagcaggtagaacattatgaccccacaatcaacaaatggaccatggtggccccactccgagaaggcgttagcaacgccgcagtagtgagtgccaaacttaagttatttgctttcggaggtaccagtgtcagtcatgacaagctccccaaagttcagtgttacgatcagtgtgaaaacaggtggactgtaccggccacctgtccccagccctggcgttacacagcagcagctgtgctggggaaccagatttttattatggggggtgatacagaattctctgcctgctctgcttataaattcaacagtgagacttaccagtggaccaaagtgggagatgtgacagcaaagcgcatgagctgccatgctgtggcctctggaaacaaactctacgtggttggaggatactttggcattcagcgatgcaagactttggactgctacgatccaacattagacgtgtggaacagcatcaccactgtcccgtactcgctgattcctactgcatttgtcagcacctggaaacatctgccttcttaaatgcagtacattctaaagagagtgagcatgagctcactccatcactcgatgagataatatgagatttctacttcggagaggccaagtctaatgaagagaaaaaaaggaaaagaagttgcaagactcgaataaaatctgctgcaccttgtaaatgctctaactggacatgaaggaaaggggcgagggaggggggtgggatttttggtgcaagtagcacatggtttaaatatgaatgaacaaacctgtgatctagtccttgtcttgtaattgtggattaatgtcaatgttaatcagcccctcaaagggagagaaaagctggaccttttcccttgctgtaccatattcagcatttgatttccatgggccccaccatttatgtgtagaatttgaaatggttgtcacctctctctgaggacagagcttgaagcctccacaccagctgctgctggagattcaaagcccaactgtgggtccgagagggaagctggctgggctggctgaagaatgaagaccactggactctccgttaatctctaaggggtctgctccccaggaacgtttctgaacaatggggactttgttggtagccatttggtagatgttcttttctatttataagtgactttaaactttcccttggctgttaagaagtttgttatagatttagctatttattgttcgatgcctgcatgctgaaacaatgcctacagctgtcttcacatgtatggacgtgtgtgaatggttgtacgttttgcacattttgtggctgttgagatgtgctttgctgcacaaacatgaaaatttttgagttacaatttggagcataactggagggtgggctggggaggggtggatttttaaaatgtcaagacagggaaggatgacaaaatggaaatttaaatgacatcctagaggtagagaaaccgtggagatcgcttttctcagactcaccaacttttaatgggatttcatggggtttggttgtgctgatagggtaaggggaggctgctttctgcccttctccccactcccatctgatttacttaattcagtctcagctgctgaaatttggaaaggaccaaattgctttacagtttttttctttgtgtagtatcttgaaatcctggaaaattctatggaatagttctgtatatagggcacaagtaaaggcattgtccaaagtttatttatttatttattaccctaagaatgctttgccataaccacatttaatgggaaaaacggcatgtatcacagatgtaaattaactcaccagatttactgggcctgaactcattctcttcttgctatatgatttagcaagttctagaaggtctccaagacaataattacattggcacaatgtatacttcagtgctcacccgtagcaaatctctttttaaaaaactctttggtgcacaagtaacacatttggccacaaaacaccaaagaattgtaggcagtggcccctattgagaagttttccggtagagttggaaatcagttgtgaatacattctttgctagttggagtgcttgtttactaagcatgtgccgtcgtaggtattagtgctagtctcaaataggtgcttcccctgaggtgcaggggaagaccaaagtttgcaactcgaactgctttcgtccatgtttctcacattgctgtattttagaaaataggggttaagactgataacaaccttttacattgtgactgtgtttgcattgtctaatgacagataaatccttaacatttctctccaccttagtactttagactaattgtgtttgtccgtccatgccatgaatgagtgggctgtagttgggcctaaataaatgagctgttggaagaaaagaatcacagtactttccagcagtcagtccctggttcctagatgtgttctaagcaatgcaaatgtctaattgtcccccagtgggcatagtcagtgtcgtttatattgtagcagttacagctctgtagtttatgatgcaaatctgccaagagagatgtatgtgtcactgcatggcttctgaaagcaggatgaattttctgcagctgtttcaaagttggggtctgttcttgaatcctctattaattactgtgtgtgagccagagggagctgtggtaagggttgggcccccagcctgtagggaactttctggactcccactctttgaatcgatataggcatttggtctcactacttgaccattctcaccctgtgaaacgtcccacactttgaagcaaatacaattcacagcacagtacacacaaaaaccttggcataagacagagaaggttcttcttattttgtgggctggttgctgtagaaacatataacaaagggcagccctccacttctggtataattgtgtagccccttttctttgggcttgacacctgtcttgaataagagtgattagagctgcataatgtccctctcttggctattgaccatgtggttcacgtacaaaactctgtataagttgaaggaaaatgttcatgttcatatgtacttgtttgctatgactacattttgaggttttgtaaaactgttatttttttttttttcacaatgtgaaactgaaggtcaataaattattagagattttctcttcaaaaaaaaaaaaaaaaaaaaaaaaaaaaaaaaaaaaaaaaaaa

SEQ ID NO: 399 - DNA, 1588 bp, Homo sapiens
  Genbank Accession No. AF061812
ccctccttggcaccatgaccacctgcagccgccagttcacctcctccagctccatgaagggctcctgcggcatcggaggcggcatcgggggcggctccagccgcatctcctccgtcctggccggagggtcctgccgtgcccccagcacctacgggggcggcctgtctgtctcctctcgcttctcctctgggggagcctgcgggctggggggcggctatggcggtggcttcagcagcagcagcagctttggtagtggcttcgggggaggatatggtggtggccttggtgctggcttcggtggtggcttgggtgctggctttggtggtggttttgctggtggtgatgggcttctggtgggcagtgagaaggtgaccatgcagaacctcaatgaccgcctggcctcctacctggacaaggtgcgtgctctggaggaggccaacgccgacctggaagtgaagatccgtgactggtaccagaggcagcggcccagtgagatcaaagactacagtccctacttcaagaccatcgaggacctgaggaacaagatcattgcggccaccattgagaatgcgcagcccattttgcagattgacaatgccaggctggcagccgatgacttcaggaccaagtatgagcacgaactggccctgcggcagactgtggaggccgacgtcaatggcctgcgccgggtgttggatgagctgaccctggccaggactgacctggagatgcagatcgaaggcctgaaggaggagctggcctacctgaggaagaaccacgaggaggagatgcttgctctgagaggtcagaccggcggagatgtgaacgtggagatggatgctgcacctggcgtggacctgagccgcatcctgaatgagatgcgtgaccagtacgagcagatggcagagaaaaaccgcagagacgctgagacctggttcctgagcaagaccgaggagctgaacaaagaagtggcctccaacagcgaactggtacagagcagccgcagtgaggtgacggagctccggagggtgctccagggcctggagattgagctgcagtcccagctcagcatgaaagcatccctggagaacagcctggaggagaccaaaggccgctactgcatgcagctgtcccagatccagggactgattggcagtgtggaggagcagctggcccagctacgctgtgagatggagcagcagagccaggagtaccagatcttgctggatgtgaagacgcggctggagcaggagattgccacctaccgccgcctgctggagggcgaggatgcccacctttcctcccagcaagcatctggccaatcctattcttcccgcgaggtcttcacctcctcctcgtcctcttcgagccgtcagacccggcccatcctcaaggagcagagctcatccagcttcagccagggccagagctcctagaactgagctgcctctaccacagcctcctgcccaccagctggcctcacctcctgaaggcccgggtcaggaccctgctctcctggcgcagttcccagctatctcccctgctcctctgctggtggtgggctaataaagctgactttctggttgat

SEQ ID NO: 400 - DNA, 1278 bp, Homo sapiens
  Genbank Accession No. AF065388
gccaggcgtccctctgcctgcccactcagtggcaacacccgggagctgttttgtcctttgtggagcctcagcagttccctctttcagaactcactgccaagagccctgaacaggagccaccatgcagtgcttcagcttcattaagaccatgatgatcctcttcaatttgctcatctttctgtgtggtgcagccctgttggcagtgggcatctgggtgtcaatcgatggggcatcctttctgaagatcttcgggccactgtcgtccagtgccatgcagtttgtcaacgtgggctacttcctcatcgcagccggcgttgtggtctttgctcttggtttcctgggctgctatggtgctaagactgagagcaagtgtgccctcgtgacgttcttcttcatcctcctcctcatcttcattgctgaggttgcagctgctgtggtcgccttggtgtacaccacaatggctgagcacttcctgacgttgctggtagtgcctgccatcaagaaagattatggttcccaggaagacttcactcaagtgtggaacaccaccatgaaagggctcaagtgctgtggcttcaccaactatacggattttgaggactcaccctacttcaaagagaacagtgcctttcccccattctgttgcaatgacaacgtcaccaacacagccaatgaaacctgcaccaagcaaaaggctcacgaccaaaaagtagagggttgcttcaatcagcttttgtatgacatccgaactaatgcagtcaccgtgggtggtgtggcagctggaattgggggcctcgagctggctgccatgattgtgtccatgtatctgtactgcaatctacaataagtccacttctgcctctgccactactgctgccacatgggaactgtgaagaggcaccctggcaagcagcagtgattgggggaggggacaggatctaacaatgtcacttgggccagaatggacctgccctttctgctccagacttggggctagatagggaccactccttttaggcgatgcctgactttccttccattggtgggtggatgggtggggggcattccagagcctctaaggtagccagttctgttgcccattcccccagtctattaaacccttgatatgccccctaggcctagtggtgatcccagtgctctactgggggatgagagaaaggcattttatagcctgggcataagtgaaatcagcagagcctctgggtggatgtgtagaaggcacttcaaaatgcataaacctgttacaatgttaaaaaa

SEQ ID NO: 401 - DNA, 1869 bp, Homo sapiens
  Genbank Accession No. AF069735
atgtcagagcgagaagagcggcggtttgtggagatccctcgggagtctgtccggctcatggcggagagcacgggcctggagctgagcgatgaggtggcggcgctgctcgcagaggacgtgtgctatcgtctgagagaggccacgcagaatagctctcagttcatgaagcacaccaaacgccggaagctgacggttgaggacttcaacagggccctcagatggagcagcgtggaggctgtgtgtggttacggatcacaggaggcactgcccatgcgccccgccagggagggtgaactctactttcctgaggatcgagaggtgaacctggtggagctggccctggctaccaacatccccaaaggctgtgctgagacagctgtcagagttcatgtctcctacctggatggcaaagggaacctggcacctcaaggatcggtgcccagtgctgtgtcttcactgacagatgaccttctcaagtactatcaccaggtgactcgtgctgtgctaggggatgatccgcaactgatgaaggttgcactccaggacttgcagacgaactccaagattggggcactcctgccttactttgtttatgtggtcagtggggtgaaatctgtaagccatgacctggagcaactgcaccggctgctgcaggtggcacggagcctatttcgtaatccgcacctgtgcttggggccctatgtccgctgtctggtgggcagtgtcctctactgtgtcctggagccactggctgcctccatcaaccccctgaatgaccactggactctgcgggatggggctgccctcctgctcagccacatcttctggactcatggggaccttgtaagtggcctctatcagcatatcctgctatccctgcagaagatcctggcagatcctgtgcggccgctctgctgccactatggagccgtggtggggctgcatgctcttggctggaaggcagtagaacgagtcctgtacccacacctgtccacctactggacaaacttgcaggctgtgctggatgattattcagtatctaatgcccaggtcaaagcagatggacacaaagtctatggagccattctggtggcggtagagcgactgctgaagatgaaggcccaggcagcagagcccaacaggggtggcccaggtggcagggggtgccggcgcctggacgacctgccatgggacagccttctctttcaagagtcgtcctccgggggcggtgcagaacccagctttgggtccggcctcccgctgccgccagggggcgcggggccggaggacccttctctttcggtgaccctggccgacatctaccgggagctctacgccttcttcggtgacagcttggccacacgctttggcaccggccagcctgcacccacggctccgcggccgcccggggacaagaaggagccggcggcagccccggactcggtgcggaagatgccgcagctgacggcaagcgccatagtcagcccgcacggcgacgagagcccccggggcagcggcggaggcggccccgcgtcggcctctgggcccgccgcctctgagagcaggcccttgccgcgcgtgcatcgggcgcgcggggcaccccggcagcagggccccgggaccggcacccgcgacgttttccagaagagccgtttcgccccgcgcggcgccccgcactttcgtttcatcatagccgggcggcaggctgggaggcgctgccgcgggcgccttttccagactgccttccccgcgccgtacgggcctagcccggcctcgcgctacgtgcagaaactgcccatgatcggccgtaccagccgccccgcccgccggtgggcgctctcggactactcgctgtacttgccgctctga

SEQ ID NO: 402 - DNA, 1599 bp, Homo sapiens
  Genbank Accession No. AF082868
ggaccaaagctgacagtttctttacttgcaggtagctgacagcatctactcctgaagaccggaaacatggcttgtaccatccaaaaggcagaagcacttgacggggctcatttgatgcagatcctctggtatgatgaggaagagtctctctacccagctgtatggttgagagacaactgtccgtgctctgattgctacctggattctgcaaaagcacggaaacttctagtggaagctcttgatgtgaacattggaattaaaggcttgatatttgacagaaaaaaggtgtacatcacatggcccgatgagcattacagtgaattccaggctgattggctgaagaaaagatgcttttccaagcaggccagagcaaagctccaaagagaattgttttttccagaatgccaatactggggctcagagctccagctacccactttggattttgaagatgttttaagatatgatgaacatgcatacaagtggctctccaccctcaagaaagtaggcatagtaagactcaccggagcatctgacaaaccaggagaagtttcaaaacttgggaaaaggatgggtttcctctatctcacattttatggacatacttggcaagtgcaagacaaaatcgatgcaaacaatgtggcttacacaactgggaagctaagctttcacactgattatccagccctccatcatccacctggggttcagcttcttcactgcataaagcaaacagtcacagggggtgattcagaaattgtagatgggtttaatgtgtgccaaaaactaaagaaaaataatcctcaggcattccagattttgtcctctacctttgtggactttacagacattggagtggattactgtgatttttctgtacaatcaaaacataaaattatagagttagatgataaaggccaagtggttcgcatcaacttcaataacgcaactagggacacaatatttgatgtacctgttgaaagagttcagcctttttatgctgctctgaaggagtttgttgacctcatgaacagcaaagaatccaagtttaccttcaagatgaatccaggtgatgtgattacttttgataactggcgcttacttcatggccgacgtagctatgaagcaggaactgagatatcccgccatctagaaggagcttatgctgactgggatgtggtcatgtcaaggcttcgtatcttaaggcagagggtggagaatggaaactgaagtcacctgtagataattttaataagattccaatgaccatattttgtgagatatggcacattattcacagaccatgatctttgtgatttacatataatttccttaacaatgaacatgtaacttctctcacaagagtactctttactttgtaatcatatacaatgtcaactttttagatgtttcaccactcttttgcaaataaagcatcctttctgctctgttgcatgcctgctctaatttcttttgcccatatatgagtatctccagaatgtctacaaatagtttttgtagcaaatgaaaatttcttcaaataagccttttgtttcaaataaaacttgtctcaaaacatgcttcaaaaaaaaaaaaaaa

SEQ ID NO: 403 - DNA, 5346 bp, Homo sapiens
  Genbank Accession No. AF085692
ccgcgctcgccttccttgcagccgcgcctcggccccatggacgccctgtgcggttccggggagctcggctccaagttctgggactccaacctgtctgtgcacacagaaaacccggacctcactccctgcttccagaactccctgctggcctgggtgccctgcatctacctgtgggtcgccctgccctgctacttgctctacctgcggcaccattgtcgtggctacatcatcctctcccacctgtccaagctcaagatggtcctgggtgtcctgctgtggtgcgtctcctgggcggaccttttttactccttccatggcctggtccatggccgggcccctgcccctgttttctttgtcacccccttggtggtgggggtcaccatgctgctggccaccctgctgatacagtatgagcggctgcagggcgtacagtcttcgggggtcctcattatcttctggttcctgtgtgtggtctgcgccatcgtcccattccgctccaagatccttttagccaaggcagagggtgagatctcagaccccttccgcttcaccaccttctacatccactttgccctggtactctctgccctcatcttggcctgcttcagggagaaacctccatttttctccgcaaagaatgtcgaccctaacccctaccctgagaccagcgctggctttctctcccgcctgtttttctggtggttcacaaagctgctaaaccctgaccctctgcggggctgcctgccgggcttcacctccccccaggatggccatctatggctaccggcatcccctggaggagaaggacctctggtccctaaaggaagaggacagatcccagatggtggtgcagcagctgctggaggcatggaggaagcaggaaaagcagacggcacgacacaaggcttcagcagcacctgggaaaaatgcctccggcgaggacgaggtgctgctgggtgcccggcccaggccccggaagccctccttcctgaaggccctgctggccaccttcggctccagcttcctcatcagtgcctgcttcaagcttatccaggacctgctctccttcatcaatccacagctgctcagcatcctgatcaggtttatctccaaccccatggccccctcctggtggggcttcctggtggctgggctgatgttcctgtgctccatgatgcagtcgctgatcttacaacactattaccactacatctttgtgactggggtgaagtttcgtactgggatcatgggtgtcatctacaggaaggctctggttatcaccaactcagtcaaacgtgcgtccactgtgggggaaattgtcaacctcatgtcagtggatgcccagcgcttcatggaccttgcccccttcctcaatctgctgtggtcagcacccctgcagatcatcctggcgatctacttcctctggcagaacctaggtccctctgtcctggctggagtcgctttcatggtcttgctgattccactcaacggagctgtggccgtgaagatgcgcgccttccaggtaaagcaaatgaaattgaaggactcgcgcatcaagctgatgagtgagatcctggacggcatcaaggtgctgaagctgtacgcctgggagcccagcttcctgaagcaggtggagggcatcaggcagggtgagccccagctgctgcgcacggcggcctacctccacaccacaaccaccttcacctggatgtgcagccccttcctggtgaccctgatcaccctctgggtgtacgtgtacgtggacccaaacaatgtgctggacgccgagaaggcctttgtgtctgtgtccttgtttaatatcttaagacttcccctcaacatgctgccccagttaatcagcaacctgactcaggccagtgtgtctctgaaacggatccagcaattcctgagccaagaggaacttgacccccagagtgtggaaagaaagaccatctccccaggctatgccatcaccatacacagtggcaccttcacctgggcccaggacctgccccccactctgcacagcctagacatccaggtcccgaaaggggcactggtggccgtggtggggcctgtgggctgtgggaagtcctccctggtgtctgccctgctgggagagatggagaagctagaaggcaaagtgcacatgaagggctccgtggcctatgtgccccagcaggcatggatccagaactgcactcttcaggaaaacgtgcttttcggcaaagccctgaaccccaagcgctaccagcagactctggaggcctgtgccttgctagctgacctggagatgctgcctggtggggatcagacagagattggagagaagggcattaacctgtctgggggccagcggcagcgggtcagtctggctcgagctgtttacagtgatgccgatattttcttgctggatgacccactgtccgcggtggactctcatgtggccaagcacatctttgaccacgtcatcgggccagaaggcgtgctggcaggcaagacgcgagtgctggtgacgcacggcattagcttcctgccccagacagacttcatcattgtgctagctgatggacaggtgtctgagatgggcccgtacccagccctgctgcagcgcaacggctcctttgccaactttctctgcaactatgcccccgatgaggaccaagggcacctggaggacagctggaccgcgttggaaggtgcagaggataaggaggcactgctgattgaagacacactcagcaaccacacggatctgacagacaatgatccagtcacctatgtggtccagaagcagtttatgagacagctgagtgccctgtcctcagatggggagggacagggtcggcctgtaccccggaggcacctgggtccatcagagaaggtgcaggtgacagaggcgaaggcagatggggcactgacccaggaggagaaagcagccattggcactgtggagctcagtgtgttctgggattatgccaaggccgtggggctctgtaccacgctggccatctgtctcctgtatgtgggtcaaagtgcggctgccattggagccaatgtgtggctcagtgcctggacaaatgatgccatggcagacagtagacagaacaacacttccctgaggctgggcgtctatgctgctttaggaattctgcaagggttcttggtgatgctggcagccatggccatggcagcgggtggcatccaggctgcccgtgtgttgcaccaggcactgctgcacaacaagatacgctcgccacagtccttctttgacaccacaccatcaggccgcatcctgaactgcttctccaaggacatctatgtcgttgatgaggttctggcccctgtcatcctcatgctgctcaattccttcttcaacgccatctccactcttgtggtcatcatggccagcacgccgctcttcactgtggtcatcctgcccctggctgtgctctacaccttagtgcagcgcttctatgcagccacatcacggcaactgaagcggctggaatcagtcagccgctcacctatctactcccacttttcggagacagtgactggtgccagtgtcatccgggcctacaaccgcagccgggattttgagatcatcagtgatactaaggtggatgccaaccagagaagctgctacccctacatcatctccaaccggtcagaagccgcctccctcgctccctgctcctccaggaattcccagcaggctctctggtgttcagggtccttgtccctcctttcccctaagcagaaaactggccctgccctgcccctgccccatttcctcctcatctgatcccccataggtggctgagcatcggagtggagttcgtggggaactgcgtggtgctctttgctgcactatttgccgtcatcgggaggagcagcctgaacccggggctggtgggcctttctgtgtcctactccttgcaggtgacatttgctctgaactggatgatacgaatgatgtcagatttggaatctaacatcgtggctgtggagagggtcaaggagtactccaagacagagacagaggcgccctgggtggtggaaggcagccgccctcccgaaggttggcccccacgtggggaggtggagttccggaattattctgtgcgctaccggccgggcctagacctggtgctgagagacctgagtctgcatgtgcacggtggcgagaaggtggggatcgtgggccgcactggggctggcaagtcttccatgaccctttgcctgttccgcatcctggaggcggcaaagggtgaaatccgcattgatggcctcaatgtggcagacatcggcctccatgacctgcgctctcagctgaccatcatcccgcaggaccccatcctgttctcggggaccctgcgcatgaacctggaccccttcggcagctactcagaggaggacatttggtgggctttggagctgtcccacctgcacacgtttgtgagctcccagccggcaggcctggacttccagtgctcagagggcggggagaatctcagcgtgggccagaggcagctcgtgtgcctggcccgagccctgctccgcaagagccgcatcctggttttagacgaggccacagctgccatcgacctggagactgacaacctcatccaggctaccatccgcacccagtttgatacctgcactgtcctgaccatcgcacaccggcttaacactatcatggactacaccagggtcctggtcctggacaaaggagtagtagctgaatttgattctccagccaacctcattgcagctagaggcatcttctacgggatggccagagatgctggacttgcctaaaatatattcctgagatttcctcctggcctttcctggttttcatcaggaaggaaatgacaccaaatatgtccgcagaatggacttgatagcaaacactgggggcaccttaagattttgcacctgtaaagtgccttacagggtaactgtgctgaatgctttagatgaggaaatgatccccaagtggtgaatgacacgcctaaggtcacagctagtttgagccagttagactagtcccccggtctcccgattcccaactgagtgttatttgcacactgcactgttttcaaataacgattttatgaaatgacctctgtcctccctctgatttttcatattttcctaaagtttcgtttctgttttttaataaaaagctttttcctcctggaacagaagacagctgctgggtcaggccacccctaggaactcagtcctgtactctggggtgctgcctgaatccattaaaaatgggagtactgatgaaataaaactacatggtcaacagtaaaaaaaaaaaaaaaaaaa

SEQ ID NO: 404 - DNA, 1218 bp, Homo sapiens
  Genbank Accession No. AF085807
gtctgcggcagcagcggaggccgagaagggatctccagttgtggtgggcctgctagttgtgggcaatatcattattctgctgtcaggcctgtccctgtttgctgagaccatatgggtgacagccgaccagtaccgtgtatacccactgatgggagtctcaggcaaggatgacgtcttcgctggtgcctggattgccatcttctgcggcttctccttcttcatggtagccagttttggtgtgggtgccgcactctgccgccgccggtccatggtcctcacgtacctggtgctcatgctcatcgtctacatcttcgagtgcgcctcctgcatcacgtcctacacccaccgtgactacatggtgtccaacccatccctgatcaccaagcagatgctgaccttctacagcgcggacaccgaccagggccaggagctgacccgcctctgggaccgcgtcatgattgagcaagaatgctgtggcacatctggtcccatggactgggtgaacttcacgtcagccttccgggcggccactccggaggtggtgttcccctggcccccactgtgctgtcgccggacgggaaacttcatccccctcaacgaggagggctgccgcctggggcacatggactacctgttcaccaagggctgcttcgaacacatcggccacgccatcgacagctacacgtggggtatctcgtggtttgggtttgccatcctgatgtggacgctcccggtcatgctgatagccatgtatttctacaccatgctctgagggacaggaggggaaggcaacatacacaccccggactcctccgcatcctcctcctgcttcctccgctgggcctggatggctgcctcacctctcacctcccaacgtccctagcccttacgtccttccacttccaagatctttttccaggttcctgagccctactgtgtctcaggtgtgccctgaaaccccagggcttgtgtgcacatatccttagcccatctttcaagggacctctccatgatcccacctcccattcacagatacctctcttgtagctctctgacctcctccttcatggcaggcatcgccattcttgctgaaccgtttgtgattgccatttgagctctggaagcctctattgccatgagagttctgtcacggtcactttactgtccccatcatcacccagcacggggctaagcatatactagatagtcaataaataa

SEQ ID NO: 405 - DNA, 2302 bp, Homo sapiens
  Genbank Accession No. AF095448
ccaaggtctcccccagcactgaggagctcgcctgctgccctcttgcgcgcgggaagcagcaccaagttcacggccaacgccttggcactagggtccagaatggctacaacagtccctgatggttgccgcaatggcctgaaatccaagtactacagactttgtgataaggctgaagcttggggcatcgtcctagaaacggtggccacagccggggttgtgacctcggtggccttcatgctcactctcccgatcctcgtctgcaaggtgcaggactccaacaggcgaaaaatgctgcctactcagtttctcttcctcctgggtgtgttgggcatctttggcctcaccttcgccttcatcatcggactggacgggagcacagggcccacacgcttcttcctctttgggatcctcttttccatctgcttctcctgcctgctggctcatgctgtcagtctgaccaagctcgtccgggggaggaagcccctttccctgttggtgattctgggtctggccgtgggcttcagcctagtccaggatgttatcgctattgaatatattgtcctgaccatgaataggaccaacgtcaatgtcttttctgagctttccgctcctcgtcgcaatgaagactttgtcctcctgctcacctacgtcctcttcttgatggcgctgaccttcctcatgtcctccttcaccttctgtggttccttcacgggctggaagagacatggggcccacatctacctcacgatgctcctctccattgccatctgggtggcctggatcaccctgctcatgcttcctgactttgaccgcaggtgggatgacaccatcctcagctccgccttggctgccaatggctgggtgttcctgttggcttatgttagtcccgagttttggctgctcacaaagcaacgaaaccccatggattatcctgttgaggatgctttctgtaaacctcaactcgtgaagaagagctatggtgtggagaacagagcctactctcaagaggaaatcactcaaggttttgaagagacaggggacacgctctatgccccctattccacacattttcagctgcagaaccagcctccccaaaaggaattctccatcccacgggcccacgcttggccgagcccttacaaagactatgaagtaaagaaagagggcagctaactctgtcctgaagagtgggacaaatgcagccgggcggcagatctagcgggagctcaaagggatgtgggcgaaatcttgagtcttctgagaaaactgtacaagacactacgggaacagtttgcctccctcccagcctcaaccacaattcttccatgctggggctgatgtgggctagtaagactccagttcttagaggcgctgtagtatttttttttttttgtctcatcctttggatacttcttttaagtgggagtctcaggcaactcaagtttagacccttactctttttgtttgttttttgaaacaggatcttgctctgtcacccaggcttgagtgcagtggtgcgatcacagcccagtgcagcctcgaccacctgtgctcaagcaatcctcccatctccatctcccaaagtgctgggatgacaggcgtgagccacagctcccagcctaggcccttaatcttgctgttattttccatggactaaaggtctggtcatctgagctcacgctggctcacacagctctaggggcctgctcctctaactcacagtgggttttgtgaggctctgtggcccagagcagacctgcatatctgagcaaaaatagcaaaagcctctctcagcccactggcctgaatctacactggaagccaacttgctggcacccccgctccccaacccttcttgcctgggtaggagaggctaaagatcaccctaaatttactcatctctctagtgctgcctcacattgggcctcagcagctccccagcaccaattcacaggtcacccctctcttcttgcactgtccccaaacttgctgtcaattccgagatctaatctccccctacgctctgccaggaattctttcagacctcactagcacaagcccggttgctccttgtcaggagaatttgtagatcattctcacttcaaattcctggggctgatacttctctcatcttgcaccccaacctctgtaaatagatttaccgcatttacggctgcattctgtaagtgggcatggtctcctaatggaggagtgttcattgtataataagttattcacctgagtatgcaataaagatgtggtggccactctttcatggtggtggcagcaaaaaaaaaaaaaa

SEQ ID NO: 406 - DNA, 2568 bp, Homo sapiens
  Genbank Accession No. AF096870
gctgtcctgagcctgagtactctagctgccttgtcgccatcgcatctggctgccatccagcgccagcacacagtaatgagtggccgagcttcctctgggagggaggaaacagttaaaatcttgcagcagctgcaatcatctaggcgtggttctcttgtctgacttgggctgcacagatcctgggccaagggacagaagaaagacagcctaggagcagagcctcccagatggctgagttggatctaatggctccagggccactgcccagggccactgctcagcccccagcccctctcagcccagactctgggtcacccagcccagattctgggtcagccagcccagtggaagaagaggacgtgggctcctcggagaagcttggcagggagacggaggaacaggacagcgactctgcagagcagggggatcctgctggtgaggggaaagaggtcctgtgtgacttctgccttgatgacaccagaagagtgaaggcagtgaagtcctgtctaacctgcatggtgaattactgtgaagagcacttgcagccgcatcaggtgaacatcaaactgcaaagccacctgctgaccgagccagtgaaggaccacaactggcgatactgccctgcccaccacagcccactgtctgctttctgctgccctgatcagcagtgcatctgccaggactgttgccaggagcacagtggccacaccatagtctccctggatgcagcccgcagggacaaggaggctgaactccagtgcacccagttagacttggagcggaaactcaagttgaatgaaaatgccatctccaggctccaggctaaccaaaagtctgttctggtgtcggtgtcagaggtcaaagcggtggctgaaatgcagtttggggaactccttgctgctgtgaggaaggcccaggccaatgtgatgcccttcttagaggagaaggagcaagctgcgctgaaccaggccaacggtatcaaggcccacctggagtacaggagtgccgagatggagaagagcaagcaggagctggagaggatggcggccatcagcaacactgtccagttcttggaggagtactgcaagtttaagaacactgaagacatcaccttccctagtgtttacgtagggctgaaggataaactctcgggcatccgcaaagttatcacggaatccactgtacacttaatccagttgctggagaactataagaaaaagctccaggagttttccaaggaagaggagtatgacatcagaactcaagtgtctgccgttgttcagcgcaaatattggacttccaaacctgagcccagcaccagggaacagttcctccaatatgcgtatgacatcacgtttgacccggacacagcacacaagtatctccggctgcaggaggagaaccgcaaggtcaccaacaccacgccctgggagcatccctacccggacctccccagcaggttcctgcactggcggcaggtgctgtcccagcagagtctgtacctgcacaggtactattttgaggtggagatcttcggggcaggcacctatgttggcctgacctgcaaaggcatcgaccggaaaggggaggagcgcaacagttgcatttccggaaacaacttctcctggagcctccaatggaacgggaaggagttcacggcctggtacagtgacatggagaccccactcaaagctggccctttccggaggctcggggtctatatcgacttcccgggagggatcctttccttctatggcgtagagtatgataccatgactctggttcacaattttgcctgcaaattttcagaaccagtctatgctgccttctggctttccaagaaggaaagcgccatccggattgtagatctgggagaggaacccgagaagccagcaccgtccttggtggtgactgctccctagactccaggagccatatcccagacctttgccagctacagtgatgggatttgcattttagggtgatttgtgggcagaaataactgctgatggtagctggcttttgaaatcctatggggtctctgaatgaaaacattctccagctgctctcttttgctccatatggtgctgttctctatgtgtttgcagtaattcttttttttttttgagacggagtctcgcactgttgcccaggctggagagcagtggcgcgatctcggctcactgcaagctccgcctcccgagttcaagcaattctcctgcctcagcctcccgagtagctgggattacaggtgcctgccaccacacccagctaatgttttgtatttttagtagagatggggtttcaccatgttggccaggcagatctcaaactcctgacctcgtgatgcacccacctcggcctcccaaagtgctgggattacatgcgtgagccactgcgccctgcctgtttgtagtaatttttaggcaccaaatctccctcatcttctagtgccattctcctctctgttcaggtaaatgtcacactgtgcccagaatggatgaccagggaccttaaagagtggctgaaaagattgcagagttatcataataaattgctaacttgcgt

SEQ ID NO: 407 - DNA, 2861 bp, Homo sapiens
  Genbank Accession No. AF097021
tcgagcggccgcccgggcaggtcggcctctcatttctcctagcccttctgttcttccttggccaagctgcaggggatttgggggatgtgggacctccaattcccagccccggcttcagctctttcccaggtgttgactccagctccagcttcagctccagctccaggtcgggctccagctccagccgcagcttaggcagcggaggttctgtgtcccagttgttttccaatttcaccggctccgtggatgaccgtgggacctgccagtgctctgtttccctgccagacaccacctttcccgtggacagagtggaacgcttggaattcacagctcatgttctttctcagaagtttgagaaagaactttccaaagtgagggaatatgtccaattaattagtttgtatgaaaagaaactgttaaacctaactgtccgaattgacatcatgggagaaggatacatttcttacactgaactggacttcgagctgataaggtagaagtgaaggagatggaaaaactggtcatacagctgaaggagagttttggtggaagctcagaaattgttgaccagctggaggtggagataagaaatatgactctcttggtagagaagcttgagacactagacaaaaacaatgtccttgccattcgccgagaaatcgtggctctgaagaccaagctgaaagagtgtgaggcctctaaagatcaaaacacccctgtcgtccaccctcctcccactccagggagctgtggtcatggtggtgtggtgaacatcagcaaaccgtctgtggttcagctcaactggagagggttttcttatctatatggtgcttggggtagggattactctccccagcatccaaacaaaggactgtattgggtggcgccattgaatacagatgggagactgttggagtattatatactgtacaacacactggatgatttgctattgtatataaatgctcgagagttgcggatcacctatggccaaggtagtggtacagcagtttacaacaacaacatgtacgtcaacatgtacacaccgggaatattgccagagttaacctgaccaccaacacgattgctgtgactcaaactctccctaatgctgcctataataaccgcttttcatatgctaatgttgcttggcaagcatattgactttgctgtggatgagaatggattgtgggttatttattcaactgaagccagcactggttaacatggtgattagtaaactcaatgacaccacacttcaggtgctaaacacttggtataccaagcagtataaaccatctgcttctaacgccttcatggtatgtggggttctgtatgccacccgtactatgaacaccagaacagaagagattttttactattatgacacaaacacagggaaagagggcaaactagacattgtaatgcataagatgcaggaaaaagtgcagagcattaactataacccttttgaccagaaactttatgtctataacgatggttaccttctgaattatgatctttctgtcttgcagaagccccagtaagctgtttaggagttagggtgaaagagaaaatgtttgttgaaaaaatagtcttctccacttacttagatatctgcagatatctaagtaagtggagaagactattttttcaacaaacattttctctttcaccctaactcctaaacagcttactggggcttctgcaagacagaaagatcataattcagaaggtaaccatcgttatagacataaagtttctggtcaaaagggttatagttaatgctctgcactttttcctgcatcttatgcattacaatgtctagtttgccctctttccctgtgtttgtgtcataatagtaaaaaatctcttctgtttggcgtatagggattctttgtacaggaaatattgcccaatgactagtcctcatccatgtagcaccactaattcttccatgcctggaagaaacctggggacttagttaggtagattaatatctggagctcctcgagggaccaaatctccaacttttttttcccctcactagcacctggaatgatgctttgtatgtggcagataagtaaatttggcatgcttatatattctacatctgtaaagtgctgagttttatggagagaggcctttttatgcattaaattgtacatggcaaataaatcccagaaggatctgtagatgaggcacctgctttttcttttctctcattgtccaccttactaaaagtcagtagaatcttctacctcataacttccttccaaaggcagctcagaagattagaaccagacttactaaccaattccaccccccaccaacccccttctactgcctactttaaaaaaattaatagttttctatggaactgatctaagattagaaaaattaattttctttaatttcattatgaacttttatttacatgactctaagactataagaaaatctgatggcagtgacaaagtgctagcatttattgttatctaataaagaccttggagcatatgtgcaacttatgagtgtatcagttgttgcatgtaatttttgcctttgtttaagcctggaacttgtaagaaaatgaaaatttaatttttttttctaggacgagctatagaaaagctattgagagtatctagttaatcagtgcagtagttggaaaccttgctggtgtatgtgatgtgcttctgtgcttttgaatgactttatcatctagtctttgtctatttttcctttgatgttcaagtcctagtctataggattggcagtttaaatgctttactcccccttttaaaataaatgattaaaatgtgcttcgaaaaaaaaaaaaaaaaaaaaaaaaaaaaaaa

SEQ ID NO: 408 - DNA, 1810 bp, Homo sapiens
  Genbank Accession No. AF099731
  unsure (1)..(1810): n = a or c or g or t
gagaagaggcagcagtgntcagaaaggagagaaccatntcaaggntcagcccccntgaggaggagggccagggttgaaacagagggagcaggcagaatgtcccagctccaccagtnttcantntgcagaacntcaagaccagagcctcaggcccggggaggaatgagtggctccctggacctgcccttatccactggtattggtaagagntgggttntgganttaattacctatgctcaaatcccagccctgcacctaatagttgtgtaaccttgtatataatgccactaaacctcagctccctccctctacaaaatggggacagtagtagaacccagctcctctagtgatggtaaggatgaaatgtgatgacatatttctacaaagtgctcagagcaagtctgtgataaatgtaggaaatgattgttcttgtttccctgcagtagcagctgacgcgtgggtccaccatgaactggagtatctttgagggactcctgagtggggtcaacaagtactccacagcctttgggcgcatctggctgtctctggtcttcatcttccgcgtgctggtgtacctggtgacggccgancgtgtgtggagtgatgaccacaaggacttcgactgcaatactcgccagcccggctgctccaacgtctgctttgatgagttcttccctgtgtcccatgtgcgcctctgggccctgcagcttatcctggtgacatgcccctcactgctcgtggtcatgcacgtggcctaccgggaggttcaggagaagaggcaccgagaagcccatggggagaacagtgggcgcctctacctgaaccccggcaagaagcggggtgggctctggtggacatatgtctgcagcctagtgttcaaggcgagcgtggacatcgcctttctctatgtgttccactcattctaccccaaatatatcctccctcctgtggtcaagtgccacgcagatccatgtcccaatatagtggactgcttcatctccaagccctcagagaagaacattttcaccctcttcatggtggccacagctgccatctgcatcctgctcaacctcgtggagctcatctacctggtgagcaagagatgccacgagtgcctggcagcaaggaaagctcaagccatgtgcacaggtcatcacccccacggtaccacctcttcctgcaaacaagacgacctcctttcgggtgacctcatctttctgggctcagacagtcatcctcctctcttaccagaccgcccccgagaccatgtgaagaaaaccatcttgtgaggggctgcctggactggtctggcaggttgggcctggatggggaggctctagcatctctcataggtgcaacctgagagtggggagctaagccatgaggtaggggcaggcaagagagaggattcagacgctctgggagccagttcctagtcctcaactccagccacctgccccagctcgacggcactgggccagttccccctctgctctgcagctcggtttccttttctagaatggaaatagtgagggccaatgcccagggttggagggaggagggcgttcatagaagaacacacatgcgggcaccttcatcgtgtgtggcccactgtcagaacttaataaaagtcaactcatttgctggttccangtgccctctggttgtgcggccttcgtgaccctcacacgttcatggtgtcaatctctctgcccccgtgaagaactgcacttgatccaacctgtgaggggcatcctctcttccaaaaagggggccccantacaacccgggccntcaacaacccttcccc

SEQ ID NO: 409 - DNA, 654 bp, Homo sapiens
  Genbank Accession No. AF121164
gatcgtgagaccaggtcagaagggtcgttacgctcatcatgatactactgctttgaataccacacagaccagcgacatttcccattcatttccccaaccttgtgggaaaaattttcaggagtacggcatcaatgaagaacacagtgtcatgaaacacagatgccgtcacagatgacagtcacgttaccatgctgaattgtccagagaagctaaccagttactactcagggctgatgtacaatagatgcaacgccaaaatgagatgaaagagaattcagaataaaattccgtcccttggagcatattccattggctttctctgctcctgcttccgctggtatctggccttctggtagaaaatgatgatggttacagtgactatatttagaagaatgacgagcagtatgagccagaacgagtatccgtaactgtgggtcgttcctttactggtggttgccgggtaaagcatttggaacaactcttcggagagttggttggactgcgtgttcgccacaaacagtatcatggtcacaaaaaacgaaggatgcaccgagcccgttccaggtgtacacccccgtcggccccaggaatgtctggtaagggttgctgatgctgttgtagaaggtaaacccagagctcagcagcgacacgatc

SEQ ID NO: 410 - DNA, 1425 bp, Homo sapiens
  Genbank Accession No. AF150266
gagagcgagaaggtgtcaggagcagcccagttgtgtctctctctctacctctgtgaagggcgcgaatgggcagagcagaacttctagaagggaagatgagcacccaggatccctcagatctgtggagcagatccgatggagaggctgagctgctccaggacttggggtggtatcacggcaacctcacacgccatgctgctgaagctcttctcctctcaaatggatgtgacggcagctaccttctgagggacagcaatgagaccaccgggctgtactctctctctgtgagggccaaagattctgttaaacactttcatgttgaatatactggatattcatttaaatttggctttaatgaattctcatctttgaaggattttgtcaagcattttgcaaatcagcctttgattggaagcgagacaggcactctgatggttctaaaacatccctacccaagaaaagtggaagaaccctccatttatgaatctgtccgggttcacacagcaatgcagacaggaagaacagaagatgaccttgtgcccacagcaccttctctgggcaccaaagaaggttacctcaccaaacagggaggcctggtcaagacctggaaaacaagatggtttactctgcacaggaatgaactgaaatacttcaaagaccagatgtcaccagaaccaattcggatcctagacctaacagaatgttcagctgtacaattcgattattcacaagaaagggtaaactgtttttgtttggtatttccattcaggacattttatctctgtgcaaagaccggagtagaagctgatgagtggatcaagatattacgctggaaattgtcacaaataagaaaacagctcaaccaaggggaaggcacgatccgatctcggtcgttcatctttaaatagatctttcttgccaaggaatgctctggcccaggagcaaggtggaatgtttccctgacgctgtgatctgcagcaggcttcaaatgaaaaccgactaaggattttcttttcaaaaacaaatcagaagcagatgctgattgggacccatataccacgttgctgactcacgttgctgcccttccatgatgttgccatctccttgagaacactgaagcaatcaccattctgatagaaagtgcttaaaccaccactcttaggtctgctcactcttagaacacacaatggaagaggaagggtttttgttttcactcattgtggtccccaagcctattgacactagttgcctagagtcccactgtgagtcatggtcagcctgtctgacatccaggttgtgctattaaccaagaaggaaacagatacttggaggcttagatgacttctgcaggatttatattcagatagaaaacatcaaatattttcaggggagaggtttttttttttaatttttccccctttatac

SEQ ID NO: 411 - DNA, 600 bp, Homo sapiens
  Genbank Accession No. AI003579
ttttttgtatatcatagaacctttattatttatcctctaaattcttagaaacttacataacgcccgtgctctagttatgacaccatttagagacattggaaatgcatcttcatttataaatattttacatttggtccatagaacagataattttactaaataatgactgtattttttaaagcaggctctgtatatactttgaatatgtatatattacatatatttgttatatagagatagatttacttggtgttctgagaataaatccttattgcagagaagcatatatgatagtacagatatctttttccccccgtgcaaatactaaaaaaaagttacacatattcacagttctcacagtaattgtacaacacttaatattgtgctctataaggtaggtttggatggaaatcagttaggggatttcttgccaaacatctcacttagaattgcgtacaaacattaaatacactgcatttgtcttagagagacttggtctcagtgtcacattgaaggacaaaagagaaagctgtggagcttccttgccttttggtcaaagggattcacaaacagatgggagagtggggccaggagaccagg

SEQ ID NO: 412 - DNA, 517 bp, Homo sapiens
  Genbank Accession No. AI004207
tttccagaaatattatttttttaatacacagaatgtaagatggaattttatcaaataaaactatgaaaatgcaagtgggctcctatgccagaaaaacccacctggcgttccagatgcaagagggccagagcagaggcctggttctggggaagcctcaggatgctgcccaccaaggagtgatttccaaagagtaatccagggtgcccttttcccttctggggaagtgtggagaggtagagccccagaggagaatgtaaacaagcagccagcacctctgtataggcccggcctggatcagagagaggggagaactctgcagggtgtgggattgggctcagggacctccgagtgaggcagggactccctgctggctgctctgcagcagctgctggaacagggagtggggctggttgcgcagggtggccggggagtccagctctaccactctccccgcttgtagcaccagcacccggtctgagttcaaggacgtgttgagcctatgggcaatggtcagcac

SEQ ID NO: 413 - DNA, 481 bp, Homo sapiens
  Genbank Accession No. AI005278
tcgctgtcctccatcctccattccgtccaactcctagcccagtcccgggggcgcctacttcaggtctgagagtctgaactccgagatgctctgggtgtgtggatttccttcagctaccctgatgtccccacttccaagtcctgactcctttgagccatcccagggggtgtccggccactggaccacaggagcagaggcgagtctgtgactgtgtgaccagcaaggtgtgtgatgtgtgcgtgagcgagcacacgagtgtaaagaatggcacccagacctgagctaggacagagggagcctgggggccacaggcaagctcatttcttctccacacccctccccgcccgaccctgtctaaactaatggggtagtggtagccgcaagggcagggatgggagtggctgaagcctacttcactcccaaagatttctaaggaaaatggttctactgcatcctttggctgggccttgttgacccgtga

SEQ ID NO: 414 - DNA, 491 bp, Homo sapiens
  Genbank Accession No. AI005676
  unsure (1)..(491): n = a or c or g or t
ttttcaatttcttcaacaggtcatgttcaatttcttcaaagttttaacataaaaataatgagagccaggagtggggccggggctaggggggacgaaggtggtatgtgaacaaggttggcacacaggcctcaccctcctctgcctcagattcccaagtgggcaggtgggggtgaatggggctccgggtagcacctcagctcctctcagctcccctcagcctgttctccttccagacccagagagctgagaagagtagctgtgaggctcagggcagaggctctctgcgtttcaggaacagccctaaccctgctccccttgcttggcctcaggaaggtgccgcgagctctcctgccgtccctgggccgccctggctctgctgtgtccagatggtcaggctactgcgagctggggccttgctgctctgaagtcccaggaagccagnggtctgcaggagcctcttgcctccagcgtggttggggactcgtgccgag

SEQ ID NO: 415 - DNA, 311 bp, Homo sapiens
  Genbank Accession No. AI014820
tttttcaaataattaaaaagcaattttaaatttattcaactgttatgtagacccaaggcattttctttggttatgcgtgtctacattggctttctaatttattgttgtgcataaactacagataatgtctacaacttccattttggatttttaaaaatggatcaagatcttaaatcttttagtggagccatctgaatagtaaagtgttagatttttatccttccatcttagtttcctctcactcataattactgtaacatgttttgttcagtaatttgcttttattaggcctttacagagcattcaacttc

SEQ ID NO: 416 - DNA, 408 bp, Homo sapiens
  Genbank Accession No. AI016841
tttttttgttttaagccatctggtctatgacactttgttctggcaggcctaggaaagggatacacgtactgaggagggggacacttcattggcatagagggagagagtgtgaacttggccttttgtggaacagaggaggctcgggcagaggtggtgatagtgcagcccattcattctgagatgaaacttccactggtttccgtaaaggcgtcttggggagggaagggaaggggatggggacctcccagtggtatcccctgcttgggcactgagggaaagccacagtggctcgggggaaaaggcagggacgtcctctccccgcctgcctctgtccccagggagtctcgcctcctgttcccacctggggctagggtgatagaggagaggagatagctcaacctggcattt

SEQ ID NO: 417 - DNA, 431 bp, Homo sapiens
  Genbank Accession No. AI016894
ttttcaaggcaatcaagaataatttattatggccttgctaatacaaggttccaaaaaatgactggttttgatataacgtcatggtggctaggtaaaaacatacatgttccagaaatgcacactcaagtgtgcaggagtacaatcacacgctcgggatctgctttcaaattcctcagcagagaaaaaaggggaaaaaaatgttctcacaatcagtaattgctgaaggtccactctgcacccccactgcaacaggcaccagaggaacagcggtcagtcttgggcacgttgcacgtcgctgttcactagcagccttggtactcttctccttggcaattcccagatacagtggagaggtcggtaggacacaggagctggctggcaccgagaggctctgccccatgctggggcactgctgagccctgactagcgcg

SEQ ID NO: 418 - DNA, 461 bp, Homo sapiens
  Genbank Accession No. AI017165
gcggccgcaggctcgtccgctgtggagccgtgatatatgtctcgctccctttcgcttacagaaaggatttcttccgacagacgtgaccccagaaggctgccgagggagactttaggacaagaggcgttgtttttttagggaaggaagaggagcctgtgcagagttgaactggggtggagaggtgccttgtaaagtatggtttccagagatgtttcagcgtggccgcatttggaaaaggctgaaggtagaaaactctggaatggagaggctggcgactggagcaggatccaggggctttaaattttaacctgaatgcgatcgaatgcgcgactcccagaagagatagccaggcgtccgcccggccgctcaacccccgccaggactcggaatgccttgcttttggttcttttctacaaggatgtctgcgtggacattgaccgattcgacaacgttcgggctct

SEQ ID NO: 419 - DNA, 495 bp, Homo sapiens
  Genbank Accession No. AI022636
tttttttattccggcattaagggggttgaatataaattccataaatttacttttatagtccatataaagttttgactacaactaataatgtcaccttagctaacacttgtatagcacttcagaatgcattatcccagggtttctcaacctcagcactgctgactttgggacaaataattgggcccaccagggaggaagaaggggacggaatactgtcctgtatattgtgacgacatcaagcagatattagcatcccccgcctctacctacaacatgccagtagcacacataaacacacagccccaatactgacaaacaacagtgtctctagacattcccaaatgtcccctgggttagatataatcaccctcaagagaagttttaagcaatatgccccacgtggcggcagtcaggcaacttaaaactggtgaattcagattctcaactcattccatttaaatcacactacttttacatcagtatttctgtcccact

SEQ ID NO: 420 - DNA, 710 bp, Homo sapiens
  Genbank Accession No. AI022657
tttttgcccaagattcatcgtaggtcattcaattaaactaaattaaaattgattttagcagaaagtagaaatgtttcagaatataaaatatcacattactgattttacaatttgataacaactaaaaaaaaaatgcatgtcactaaaaaaatttttccagtcttttcccttctacccaggaaaattttacatgatgtcaccaacatgagcccttggtgatcttctgaagtcttccaaagattacacctttgcagacttactggtgatctccttcaactcgtctcttacgcactaagtcattgttttttgttatagcattagctgctctggttcgtggtccctgctgtgtaaactgatatccaaatttaaggatatttgtattttcctcaagcatcttggccatttccaattctacagctgtccccaactgctgcctctgattgtcaatcttgagctctgccagggtttcattatctcttaacgcatcaatcagtgccagaatcccaactcccgtgataaagttggactccacatttaagctcttcaaagttttgttcactttcagcatttctgcaaaagcagtagcaacagggtcattgctcccggtgggctgcagactgaaacatttcacatgtgtgttgtttccaaagcctttgcacaatcttttaaggtggaaattggatattctttatattattcaaattaacttc

SEQ ID NO: 421 - DNA, 501 bp, Homo sapiens
  Genbank Accession No. AI023259
tttgtaattaaaaccatttattcttacactaaatagtttacaccaaagcatacattattgtggcttttagactacttccatcattttttagggtctgtcttgcttttcatatccttttaaagctatcacatctgactgccatgacattctgttgcctccttagcttttttactttgctgctactatgtggggcgtgaacaagacgatgacacagttctgacgaggttaaataagtagactgaaaagtcttcttttctttgtaggccctctagtaactagcttgtcagtgttgaaataaaatctctcacactttaacgtttttaatggggctgggtgggaaaattttcagtgataagtgtggaccttgctctgatgccaaagtttggcgatctcctcatgtatggatttctttgagacgtaatcatcatcttcatagcctttcctcttcttcgtgattacgttaagtgcaagctcagcagaatgacatcgctccaacttctg

SEQ ID NO: 422 - DNA, 436 bp, Homo sapiens
  Genbank Accession No. AI023610
ttttttttatccggacaaagtgatctctttaatcacgtttttaagaagaaagtacagtgtgcactttgacaaaaatattgcagattatgaaacgtgacttttaacataaaaacaatttgggcagtacaataaatgcaaaacgtgctgagactcgtactgtgtttgtctacagtttttatgtaaatcaataccctcaccgcccagataaaacagtacaccccaccataaagctgagcaaaagctgaaagaaatctcttcacagacattttgtgagcatatacacaaaacacatgcttttaaaagtatcagactttgaagccaatttctagtttgctcattgacataactgttcccaacagtctcctctcagcattacatataaagtaataaaccccgacttttcatttataggtagttcaaatcaaattttgttaca

SEQ ID NO: 423 - DNA, 804 bp, Homo sapiens
  Genbank Accession No. AI031674
  unsure (1)..(804): n = a or c or g or t
tttttttttttttttttttttaaaaatgggaaatggtaacttttttcttatccaatttgcagaatagatttgaaatgattgctataggttttaatgttgataagaactggactataatacaactgaaatgcagttgagctgagcaagtacatttaaaaatgaagtcacagacatgatttttctatacatttttttgtttgaagaaaattatgataaagtcagcaagcagtcacagatgaaagaacaaataaaataggtggcttggatagttaagatgagaaacaaaaatatctgtttagagttaaaaatggacagagtggtttattttgcagcaagaagagaaaacggggtagtggatggcaactgatggaacaggagaatgctcagcagcatttgctcttccagcctgtcacgcctcctccactgctgatatctacattttcactgttgggctcttttacaggggtctttcgaaggatatcttcagctaacgtgaggaacgccttttcgatgtttatatttgcttttgcactagtctcaaaaaacctaataccatgctcccttgcaatctgttctccttttcctttangtacaactcttttgtcgtccatatcacacttgtttnctagtaacattctttccacatcttcattggcatgctcatctatgtttctaagccatttgctgatgttttcaaaccttttaccattggtgatggcatatactagcatgatacccatgcgcctctgtataggaaggtgtgatggtgtgaaatcgctcctgggcctgctgatcccatatctg

SEQ ID NO: 424 - DNA, 471 bp, Homo sapiens
  Genbank Accession No. AI032906
  unsure (1)..(471): n = a or c or g or t
ggctttatattattttttatttcccctagtgttttcttcattgccacagaatatttctaaccattaactgggtggtaaatctctgaaaaacaaatttttacttgacaaggtagacttcgaaaggatttttttttgtcacaggaagaaagaaatcttgcatcacaatatttattgctggaatcaactgaagtattcctatctatcaggttttccagcttcaaatctcagatataactaatccctttttcccttctttccttttctagcaaacttccagaaacaaaacagacaacactttgtgatgataaatagcacggttgccacacaagccagcaggaacccaatcacatccaaagagtggtactggaaccaggtgaggttgtgggctgcactcgaagatgtttggctctttgtggcgcatgacaattcaaccagaagactgccgatcaggggntcactggttgatcatgt

SEQ ID NO: 425 - DNA, 485 bp, Homo sapiens
  Genbank Accession No. AI033377
aattagggagaccactgtgatggggcaaggaatttggcaagttacgttactaacaaatctttaagctgatgttaacagcggaatctttagaattatttgacaggtttacaatgtttccagacactcaaaaaaccactagtacgttcttatcaggaagtattttacaacgtaataaagtaatgtaagtactgccatcctcagatagctccatgattcattcagcctgacactcagctgtggcaatagtagtggggagcaggaaccagggggagggcccagagaggaagaagatgccactcacagtataattgcactgagaaagctactttcaccagaaatctaagcttctcaaggtcaggagccatcccttattctttcctgaatattcagcagctaggacatgggccaaccagatacaggtatttattcagtgtaaatatttaaaagtcatcccggaatagtccattaacaaatatatgtttcat

SEQ ID NO: 426 - DNA, 432 bp, Homo sapiens
  Genbank Accession No. AI034221
gcgcggcgcccccgaacccggctgctcccccgaggtcgcgggcgccggcgggaaccgcagtagcgggagacatagccggcccagccgggcaccgctccttgccctcgccggagactgcccagcgccctgcgcctctccgccccggcctgcggcgcgctgggtggcgacgagtcggcctcggcgttgatcagcaccaggtgtgtgcgaacagtggccgcggcggggaggagccttggatgaaccgttgtccacattctgttttctgagtcaaagaggaggaagatctgtccatcgaaactgagctgccaagatccactgccgtgtccttcggctttctgctcacaagacatcctggcctgcagggtgaggggttctgcccccatcaaagagagatcagctctggccttgacagatattgagcccccatcctct

SEQ ID NO: 427 - DNA, 452 bp, Homo sapiens
  Genbank Accession No. AI038623
  unsure (1)..(452): n = a or c or g or t
ttttttttattagtaaaaatttattccttaagttcaaatgtgaaacatttgctcattatgaagtcagggagaacaatgccaccgtgttgaacacactggggcaggctgtggttgacagctgcaggcttctgccagcctagcatccaaattacttccttattgtgtttccttgctcagtgtcaaacaatcctgtcacaaagataagaattagcagatagtagaagttttataagagcccatcatgcagtactgcaacagccttctattaaagtgaaaacaggagtgataggaatatatttcgaagttgaatttctaacgatatctggctgcaggtggggagggtcatgttgtttttaattgcaaatacagaagtcagacaagaagcaccaagaacttaaaataagcactaacccaggcaagcaatctgttgtatggaatcanagaaaaatcaa

SEQ ID NO: 428 - DNA, 527 bp, Homo sapiens
  Genbank Accession No. AI039144
  unsure (1)..(527): n = a or c or g or t
tttttttttttttttttttttttttttttttcaggcatcgtatgtgtattccagcactttacagaaaaggtgggtggctctgaaaagagccttgggtttctgggactcgggatcactgacggatttgactagtaatcatttcacttgcccttggccttatggtggctctccgtcttcttaggcagcaatacggcctggatgttgggcaggacaccgccctgcgcgatggtcacgcgacctagaagcttatttagctcctcgtcgttgcggatggctagctgcaggtggcgcgggatgatgcgggtcttcttattgtcgcgagccggnttgccagctagctctaagatctcggccgtcagatattccagcaccgctgccaggtacactggagcgccggccccgactcgttcggagtagttgcctttgcggaggaggcggtgcacaccccaactggaaactgaagaccggccctggaagaacgctgtttagcttttgcgcgacatgtgccgccttctttccacgtcaga

SEQ ID NO: 429 - DNA, 435 bp, Homo sapiens
  Genbank Accession No. AI039291
tttttttttttttttttttttttttttggctgaaacatcagaaatttattttctcacagttctgagaaaggctagaagtccaagatcagggtgccagcagggtgttttttggttccagtgagatcttccttcctgctttgcatatggtctccttctcactgtgtcctcacatggtcttttcccatcttaatttcctctagtttcccaaatcagaagtgaggacaaatagcacaacttcattctttggatttttcttttctaatttatcatccagaaagtgcaaaggacaatgggtattcatctccatatatacaatcttaagtacatttcttgtcagattcatggctttgtttccgcatattgcttccccaactacttctccgggtgaggggtgagcctctcctcatgatcaatatatctatatcatggaaggaa

SEQ ID NO: 430 - DNA, 447 bp, Homo sapiens
  Genbank Accession No. AI039701
ttttttttacaaaaatcccacttaatatattttagcacaaaaatgtctaatatacactggataagcgtgcatttacgtacatacaactaggggaaacatttacagagggctacgggatgctaatgaacttaatgagtaataaaaaccagttgttatctgtaaaacagagaatctcaatactgtattctcagtcaagaattagaacataaacttcctcttaagctgaagcttaaaacacaaaattggagccattttagaaaatacagaaaatgcaatgatcattcaggtatgaaaaccaaaatgtcgagagcactccaacagaaaagtcttgtaatgcatctcattgtataaaacagtatgtatttagattggcacagttaaatacataagggaaagagaaagtctttgccctttccacaattttccttccactataaatattataca

SEQ ID NO: 431 - DNA, 416 bp, Homo sapiens
  Genbank Accession No. AI040048
ttttttcatttcaaaaaagaagtttgagggttcaagcattttgcacattcctgggaaaattgtctatacaatattcatttggatgtacaaattccatcactttttgaaaaaagtcaaagtgatctacagtcagtcctgccagttatcttcaaaggcaacgagcagaaatcacgcagtcaccacgtgctggggcactcttcccattcctctcctcttgggcaccttgtggcagaaactctcataaagtcactgacaagatccagatccagatccatgtatggcaggtgggttctgtagctgaagcttcaacagttttcgagctggtgagggatctaattgttgcatgcttctctttccgagctgtactgacaccttctggaagcactgggtactttcatccataaaggcctgcagct

SEQ ID NO: 432 - DNA, 450 bp, Homo sapiens
  Genbank Accession No. AI040273
ttttttgtatattcagtagaaacagggtttcaccatgttggccaggctggtctcaaactcctgacctcaggtgatccgcccaccttggtctcccaaagtgctgggattacaggcgtgagccactgcgcctggccccctcctggacttttaggatgtgacttccttcccatccagcctttctgtctgagcactacccacccagctagactgacttggtaactggatctaagaaggaggcgatattgctgttttcgaggtcgatgggccaggggcctgggctaaggcacttagacaagcccctgccctgcccacctggtcaccaccattcacagtgatcactcatctgtggcaagaggtgggcagcggaggaagctgactagagatacctgatgtataactttttggaggtttttacaaaagcagatacagtggccagtggcatcaaagaaa

SEQ ID NO: 433 - DNA, 535 bp, Homo sapiens
  Genbank Accession No. AI040381
ttttaatgaaataaaggtcgggcttggtggctcatgcctgtaatcccagtactttgggaatgcaagctgcaagctgggagatcgcttgaggccaaaagcctgaggccacagtgggctatgatcatatcactgcactccagcctgagtgacagaggagaccatgactctaaaaataaaatactagagtacatataagaataagcgtgtgcatatatagatatgaatgtgttatgtaccagaatatgacataaaatgtttttattactgtgagttgcagttaaaaacactttttgccatcaaatgaataaaatattgaatacagtttagacatgtttacaaagatactgtcagataatgaggagacaggaaatgcaaaatatatttagtcatacccaataaaataagtagataaatataccaaattatttgtttaaaatttacctgtgtaaatattccggagctttattcagcaaagtataatattgcctaacaactcccggcctacaagcagcggactgggctcttacataaccat

SEQ ID NO: 434 - DNA, 533 bp, Homo sapiens
  Genbank Accession No. AI042180
ttttttttttttttttttttttcaggggacaattttatttttattttttccagcaaagcaaagaaagactcaaaaattcatcctcataactccatttcccagtaaaacactccacattacgaaaacttcaagtatgtaattattttgttaagggtgaaagtgcttgaaatccaaacttcaggagaagagacagaaaacagcaccaagaatataagcctaaagcccatagcatttcactcatcagtttgtaggggttgaagccacacccaaagcaagaaccacagtgagctgatggatattttacaggaaaacttcaggttatgagtatgtgatggttccgtgagcaagactggcatccttggttggaagggccaagcacacacctaacaggcagctgggcctctcgacttggggtgcggagggggaacgtgtggagacaaccagggtgtctccagcatcttcaggacacctgttgtgatggatcctgaaggaattagcaggcgatgtatgctgatcccacacaaaggctggta

SEQ ID NO: 435 - DNA, 427 bp, Homo sapiens
  Genbank Accession No. AI050855
ttttttttttttttttttttttttttttttttttttttgatgggaaaaacatttataattttttggagttacagggggtattttcattataatcattcttacaataaatacagaagggctaaacagaccattatcacaggggcctgggggctgaggcacaggaactgaggggggctgcaaacaccagtgcttttccagggctggccaggacaccttcaaagaggctagtgaaaaggaaaggaatgtagggggaatttgaaatgggattaatagagtcaatgcagcacatgctaaaaacagatacagagttttttgggggtttttaactattttaccagatgatcctaacttaacaaaccgaacaaagaaagagattcaagatctcacatgagtgaaaatccagggccttcccctttggccctggccc

SEQ ID NO: 436 - DNA, 357 bp, Homo sapiens
  Genbank Accession No. AI050877
  unsure (1)..(357): n = a or c or g or t
ttttttttttttttttttttttttttttttttttttttttcgggaaaaggggacgggacatctttttattggttcagtctatgcctggcccagcggcagccccaggcccagggggggtctggttggaggtctttggacagtcaggggcagcatcagcaaaaaccctgggggtcggggggctgggggagtagcaacactggcccccgcgttgacaggggccctccttaaaccttttgcaaggaaatgttttgagccgggcagcccgctgggccacattttccgggggctccttccgcttgttctgaagcagcctgcgtttttcctccatagtttngtgggccgccttgccccctggcc

SEQ ID NO: 437 - DNA, 449 bp, Homo sapiens
  Genbank Accession No. AI051688
atgcatagattctttattcagggagtgaaaggaaagtgacaactgcacaggtggtggaagctcatgcccaggggacagacagacacagaaaacatcaacagaattctctaatggttcccagggagagagctgctctttcttctgaagctctgggagctggcacagcccaggacttcctttgctcagtctccacctggacagtggcagtatggcagcctcaaaaagaaaaccttttgctatcagagatcatcacaggccgatcacaggctaagaggaaagaagctccctgtgtatccctggatggctttgatgagaagatgcaggtggagctgtggaacgaggtgagccaattatccttatcctttcatgctcctgatgaatcctgaagctgttacttgctcttgggtggacactttggctggcagggtggggaaggtgtcacaggagga

SEQ ID NO: 438 - DNA, 757 bp, Homo sapiens
  Genbank Accession No. AI052020
  unsure (1)..(757): n = a or c or g or t
ttttttttttgtgattccaaaatagagatttatttattaaggattatttagtttctgcataaaaatctccaattgttcctcattgggttttttcttttaaaacacacatcaactcttttggggttgctttgtttgccccagcactttaaaaaatacagctctttttagcgccaggaagaacagttaaggttaaggcagtgaggcgttttcttggatcttagcagctgaagggttcatctctccccgtcaagagaatacacacggtaggtagtttcttaggttggaaaatctgtccctgaaggaaataattctgcagaagaatgcaaacggagtcatctatggtcaattgtttgtgccctatanctttgaaagaaacgcctcttggtcatcaagggcttgctggttggtttcagctgtaaaacaacaacaacaacaacaaaaaacaaccagaaaaaagaaaacaaacaaaaaaatctgtctagcgagacagaaagagcagggtttacaatagtgctgtgaggctgggctgtgcaaaccacatgagaatacacaccagtttgctttttaaaaaatcccacataggggccctgcataattttaaatcaaactctttatagtccttaaaataacaatacagcgagagcctcataaggtcacgtgcttttttttctttttttcttttttgagacagagtttcgcctttgttgcccaggctggaatgcaggggccgatctcggctactgaacctccaccctcc

SEQ ID NO: 439 - DNA, 567 bp, Homo sapiens
  Genbank Accession No. AI052110
ttttttacagtggtaaagcatcagtttttatttattacaaattctaaaaaagaatccaactttataagtaaaaaggaacactgatgatcacttaaaacatttaaatttaaaattactactaaaaaaaccctgtacattcacacaagtccaatgcctttgttggtttttacagacatagaatttctgtagggttttgggccctatcaacaatttttattaagtactgcaataacaaaatacagcaataaaacaactggacactcctaggggacaccaaagataaagggcccattaatcaggtgtaggccagagaaacccaacctgttggcaatatgacgctctttcccaactgggtcttggtgagacacgtggcacagcaaggctgtcagtgcatgtgcataaattgtagaccaggtcccactatgctacttcaggattcagccagcccttctatgagtcacagaggtcccttggtccttattcatcttgatatactcatgggatgtttggaattaaggagcccaaactaccttacttgcatttgaagtctttcacttcatatcctac

SEQ ID NO: 440 - DNA, 537 bp, Homo sapiens
  Genbank Accession No. AI052524
tttttttttttttttttttttgaattctttgcatattttatttttctttttttgatttccaactcacacacatttggcatattttacatctttgcaataaaacatggttacaatagcttaaggaatttatatatccaaaatatttcaccatgatctcaagatgaaatgaacttgtcttccaaatgttaagtatcctcccaattctaagctacaaactcaagatattgcttacagcctggggatgaataacttaatcattacgctgattccccataatttcagaatttcataaatacaaacaacagtgaagaaggaattcagtgctaaaacttactagtacaaggtggataaccaaataagtaatcacatcaataaataatgatatgtttctggtgcaaagtgccaatacaaagaacccattatcttgttttatctttttaaataaatgactgcgagtgagtgtaaattctgagaaaattacattcctgtaacatgcctcatagccctaccgacacaatatgtacatctatgacgata

SEQ ID NO: 441 - DNA, 290 bp, Homo sapiens
  Genbank Accession No. AI052526
ttttttttttgaatgtgaaacacaatttattctttgtggaaaggttgaacaaggtcaaaattgtccttagagggcaccgacccagccccgccctgcaggttcctggggtcagacgcctctgcccccccacccccacccctccccatgccccttgttaacaaaaaggaacgatttgaatggaattcatatataataattataataaaaatatacattaaacaaaacaaaataacaaacaagacagaaatctagccgaactgccagcaccgttcaccccatttcccctaccc

SEQ ID NO: 442 - DNA, 452 bp, Homo sapiens
  Genbank Accession No. AI052543
tttttttttttttttttttttttttttttagaggcagtatttggttttattattttgaagtaaaatttatacatagtgaaacgcttacgtctttaacatactatttgaggagttttgacaaatatataaactcttgtcaatatataaactcttgtcaatatatagagtattccaccaccccaaaacatttcctaaagtctctacccattactggctctactccacctggaaacgcagagaggcacagccctatcttttgcacccataaggacactcacagcatagactgggcgagggccagcatctctggactgactgcccatcagggagggcttaggcctcaaccaacttgttgagcaacgagagagtcccatagagggcagacaggggcatctttgcttctacatcccaggttgacctggggttatccagctccatcctaaggccacact

SEQ ID NO: 443 - DNA, 546 bp, Homo sapiens
  Genbank Accession No. AI053597
ttttttttttgagacagagtctcattctgtcgcccaggctggagtgcagtggtgtgatcttggctcactgcaacctccgcctcttgggttaaaagaattctcctgcctcagcctcctgagtagctgggattataggcacacaccaccacacccagctaatctttttgtattttttttttagtagagacagggtttcgccatgtcggccaggctggtcttgaactcctgacctcaggtggtccacccgcctcggcctcccaaagtgctggcattacaggcgtgaaccaccgtgcctggccggaagtctttaaaaaataaagtgattctactcttctaagcttacagagaccagaccaggtgaatgtaactggggaaaatcaagatggtacctctctgcattatcccgccagacactgtattttatgcattcatgtctaggatacagtgtgaaaattaaaaagtttagagggcagatgcaattgtggcaagtgacctgccaataaagcaggtgcagctatagaagctggcataggtatatccttaatg

SEQ ID NO: 444 - DNA, 337 bp, Homo sapiens
  Genbank Accession No. AI053741
cttttttttttttttttttttgagctcaaagagagttctcattttccctattcaaactaatacccatgccgtgttttttaccttggatttaaagtcaccttaggttggggcaacagattctcactcatgtttaagatcttgttatttcagcttcataagatcaaagaggagtctttcccttttctcttttaccctcaggattctcatcccttacagctgactcttccaggcaatttccatagatctgcagtcctgcctctgccacagtctctctgttgtccccacatctacccaacttcctgtactgttgcccttctgtcgtcttctcgcagccgta

SEQ ID NO: 445 - DNA, 490 bp, Homo sapiens
  Genbank Accession No. AI056075
ttttttacgttttatcaactgccaagatcctttattttttccaggccccttcctgcccactccacatcggggcagctccagcataagggagatgacatgatgaaggggctaagagtagggcctggccagcatccactgagggcccaaccagggaacagttgctagccgctctcttccatgcagctggagcactagcaaggccttccagaggctcccagggcgacctccacagcttgtgctctggagatggcagcaagtcctgcccggctggttgggtgcccctccccagagcaatcatggtccagtggatgccggtgcttgatgcagaagtttcggctacagcgttcacaggtcagtttcatcatttctcgctgccggcagccagcgcgttcacacttattggtgaagatcttacgtttttgctgtgctggatcagagcgacagtctctgtcaatgtgctctcccacagcacggtcagggggctccctct

SEQ ID NO: 446 - DNA, 361 bp, Homo sapiens
  Genbank Accession No. AI056542
gagggttacaaacttttttattttaccaaacaagaacacacattagagaaaaggacatgaaggtttaaggaacaatttaaggctgaaaaaaatggagaagtccccatcctgtccttttctttcctattttgccacaggctggcacctgccctccgctggtcattcaggaactgcgggggctcctggggctcaagcccccttgatcttggcttcaggtctgcaggacacaccgaccgtaaccactgctgagtcaagaagggggtctcccctcactcccttccccacattcctactgattcactcccactgatgactgggtagaaaagttgcagaacactgatttagatcatcgtattgatac

SEQ ID NO: 447 - DNA, 459 bp, Homo sapiens
  Genbank Accession No. AI056977
atctggtaacattaccaaaccctaaagggcaggcagagttctaattcgttcatctaggtgcacatattctttctttattccaaactatgctctttaataaaaattgtttcatttccttctatatattctgctgctgaaacccaacacatttcactcatgtaagactcaaacgggctacttctgatttcttcttttaacgtttaaatttatatgcttaaaaccatgaactcacatacctccttcaagaggatacaactgatggacaaacctaagtatgtatatgtaaagtcaaacagatgcaagctccctcaggacacactggcagcagtggtcttgctggttgcagacttttcatcagcagtttgaactggccatctttccctgaagtgagcagcacctcgttgaggacgtgtctgaaaacttaataaatatgaaaacatctactttttggtcattctg

SEQ ID NO: 448 - DNA, 536 bp, Homo sapiens
  Genbank Accession No. AI056993
ttttttttttttttaaagtgcaaatggcttttattgagggcctactgtgtgctgggcaacaggtctgcaagggtcctgctttacctccctgtactttgcaccggccagggaggagggtgctggggagacccaaacatcaagctgggggagggtgctgaggtggaggtagaagggggcagaggggcccctcagctgagtccttagggagggaagggatcctggggtctgcccagcttgaaacagaagctgggggccacaaggccctgaatcaggccaggcagggtacaggggcctgggagtcctgctcctttgctgtgagacctttagggaatgggatccatctctgagtggtttctcacgatgaaagacaggtccagagggcagagtggccatgcccaaggtggtggccaggtctgacaggatctgcagtccctgccaacaacctcctcctctgctctctgggcagtagtggcctgctcctggacactgctttgcagtcatcacctggacctagagctcatctcggggctggggtt

SEQ ID NO: 449 - DNA, 657 bp, Homo sapiens
  Genbank Accession No. AI057608
  unsure (1)..(657): n = a or c or g or t
tttttttttcataactctggtcactattttcatccgcatctgtcacttctgatgcgtctctaacatttataaaatttctctggggagggatttgacgtatccatgccccacctctttctacatttatgggattgagctctccaccagccacccatgggctgatgtctttggaatatggatctagtaccaacagagtcagaaaaagagatggggtccaatgggctacagttgggtggtggtcctgggatacacagcacagtggcctctactgggggatggcagctttccaggaaaagagtcgcaagcttgcctgtgggacttgtgtcttgtggagaggacagggctgcctcagcttggggagacagacagagtgttccgggtcccctctttccgccgcagcatgaagtctctgggggcgactggactcatggcatanaagacgttggcattgtcaggaatcaggagcacccggtccccaggaaggacttgaaagagctgatagtcacaggcccagggctggggcacattgtgcttctgcaaggctcgccggaccacgctgggggctttgtcctgactggtcagcaagatgcttcgatacaggttcccgggggcattgtcgatgctgacgcggatgacacgggcctccgagctctgctg

SEQ ID NO: 450 - DNA, 760 bp, Homo sapiens
  Genbank Accession No. AI066598
  unsure (1)..(760): n = a or c or g or t
ttttcttttcttttttcctccttagcagattacctgatgagcacaagggcgatgctaggaaaattcaaaaattccccaaactttgtcatttggaggagagagaaagatgcggatgatgccccacatccaaaagtttcttcaaagtctgtggcaaaataatggtagcaccttcagaatcttaaatagggatttttttttttccttaaaaaaatcacatacactgtgagagacaattgtgagcaccagcgatttcacagtgggaggtagcaaacgtgggcacccccagcccgaggatctcgccgcttcccacgcctggctgctccttcccatcctctcacctctttcccgggtgaaaaaaaaatagtaacgcaccttctttttgtttgtttaaataatatatatatacactnctgnctttccttttctccttttttcatgtctcctttctaatattgcacatcaatagctccctagcagggaccagctgacgagacgcccccttccctcaagttggcttgaatgtggggctctttgggcaggaagctggggagggaacggggtggccgcanagctgagaggccacggngctcaggcaggttgcaggtccagcttactctgggttgttgctattttcggatggccagtttaccctgaaaattcccgtgagaaagggagatgcggtagccagcgacgtgcccaccttgtgatttctggggccccttcttttcttttttgctggttcaagggactcaagtccagg

SEQ ID NO: 451 - DNA, 458 bp, Homo sapiens
  Genbank Accession No. AI073865
ttttttgtcacattctggctcttttatggggtgggaaatctttcagcttcaagaagtcctgtctcgcctacatatggccaagcccctcctgctggcccaggggcaggtgggaggtgggggtgagatgaccttagctgctgggtgcaagtcagggtccttgggagtagaagtgcccagtacaaaggggttctgtgtgtgcagggagccatgaaagaggcatctctgccccactccccctcctagttcataagacaataatcactgaaagggagtggggtgggggtgatctggggtccatgctgtacctggactgcaccatttcttccagtacactccaggtcctggaggtaccagtgccccttaggaaagagctagaggcacaagaaatacatcccaggcttcatgaggagatggctgaatattggaaggcacgctggctaccgctggcagttgccccc

SEQ ID NO: 452 - DNA, 585 bp, Homo sapiens
  Genbank Accession No. AI073984
ttttttttttttttaaaaaagagcattttattttaataaagaataaaagagatcaatatactgttttaatggatacaaaaataaatattcattcagcatattaaagatatgtgctttgacattcatttgaattggagattcaagcctattgttatcttatgaacacttcagcaaacaggactgccattcttaaaaatataatgctttgttggacaaaagggacaagccacgtcccctggtcctctcctctattcgcctgtgaactccatccacacgtaaaggacctctgggtctgactgtcccctccacaggcatggtgctgggaaaaggaaacaggcatatctggcttttcagattttaaaccggaaactctcacagtcacaaatccaccatgagacttgggagattggatgagctgtctcccaaaccctaacaccttccaccttctcaaaatgaaggctgccctttcactgggaggttctgaatgcgggatggtgctgactcaggctgggcacaaaggagaaaggaggacatggaaaatccgacaattcaaagtacaaatatttcaaacacatgtgaaaacca

SEQ ID NO: 453 - DNA, 458 bp, Homo sapiens
  Genbank Accession No. AI075710
ttttgaagcatcttttttttattcagatttttccagtcaagtaaattgtctcaaggcccctggcccaggtctgagtgtcactaccagaaggatccaccagatggcactccttcgctacttcctgtactcccaacttgccagagatgtcgcctctttccgctaaggcacaaaacttgcagagccaggtgttccccaggcgcttccccgcacgccaccgcccgcgccatccccccagcccccaccagcgtggtgagggtgtcctcggtccccaaggtctgcagtcttggccctctctgagtgtcatatggatgtgacacgatctggggccccgattcgcagggccccgggtgtgccacagtgaggttggcatcgggccgagcgcgggccgcctcctgcaggcggcagatctgggagtaggtgtgaccgtcggacccgcagagcggactctgcgaacgaca

SEQ ID NO: 454 - DNA, 603 bp, Homo sapiens
  Genbank Accession No. AI076180
tttttttttttttgtcacattgtactttatttaaaggtggccacagcattaaagtgtcagttcattttgtacaaccagaaatggaaaatgagtcagtcaagctgaagcagaagtttctaacaaagtctaaggcatagttctatataactaataataaggatacaatatttggcttactgaattcccaaactgaggtcactaaaatttaagaatatctaccaaaacttaagcgaaatctcagagaaactttaaaaataacattttatttttgatatttcaaaatgtttcaatcaatattctgagcctaaatgtgcaggtgagtgctttctccatctttgcacatgtgaagtgcgcctgaaccatagccccatatttctcaaacaccatcacactcatagaacagaaaggaaagggtagtttcaccagctagcccccacaagccactccctggggtcctccccagcacctgctaaatttgggaggcctgatttcaggggggtggataatgaactggcaaaataaacccaaaagaatcgtaattacaaagaccaactcaggttccagttagacagcccataccagtgcttttgatgttagctgcgg

SEQ ID NO: 455 - DNA, 441 bp, Homo sapiens
  Genbank Accession No. AI076326
tcccttgatgctctatatgttaagtagtaggagaaagatattaaaaagatgtctgtccccagtaaatttctaatctagcaatcgaggcaagtgaaagaaatactaggaaaccaccaggtaatgcatctgcaaaagctaaaatgacattgcacctactgtggcagctaagagggattaggagaggaaagacacacgctttgatataggaatatcaaattttctttcttggaattttcttgacaggcttcatggaaaggcagggcataaggtgggctttggtagagagcaaatttgtgagtttcaggaaacagtatttcagctgggtaacaagagcccagactcatggaaatggctgaaagtgttgctctgaaagggaagagaagggaagcagggatccttctgcccatgcctagagacctggcttatccttgcatgagtgca

SEQ ID NO: 456 - DNA, 516 bp, Homo sapiens
  Genbank Accession No. AI076809
tcttaccctaaataactaagagttggctgtacgccttttttggggggtggggagggaggtggtgaaaacagcttttattttttactattagcttccacaaaaatttaataatgcccacattattaaaatgaaacactggaatgaacttcgacctcactatacttttaaataaagtatgtaacctggcaaagctgatgactttgttttaagaagacctgggtgttgctacgtcacatcagacaagtgcagtaacctggaatgcacagacgaccaccctctctccctggagacctgctttagctcctacacagatgactagattttgagttaactgttttaacattctggcattttgttctcttgataaagaaaaatcacacccttgccaagttcatgtattttaaaaaatggaaaactctccaggtcacggagtgaagaaaacacttaagtgttttatgtctaaatgaagcaataacaattctgataccagcaacattccttttgatttaaaaaaga

SEQ ID NO: 457 - DNA, 589 bp, Homo sapiens
  Genbank Accession No. AI076929
tttttttcactgattctgcagaacctttatttattgggggattcagattcagcgtcccgactcagttactccagtaccatcagccaccaccacccaaatggcctcagctcggatggccccataccccaccctagcgacccacgggtgagtttgctgagtatgtgagattaactggtggctcagtggtcggctcctctagtggataattccattcaaagccaatgctcttgatgccaaggagttgatactggccatagatgcccaccagcacctgcccctcttggctggggtaggcagaggagatctggccatcaagcttcccaaaatagaaatagcggtccttgctggtgtacatgaccataccccggaggaaagcttggaaggcgacaaagacttttgtgatgtattcgcctggctgcagggtgacttcctgggtattcccacctaaggctcccagtttcacgtcccaggagtctccaagtttcacctggacacttttcaccaggagaagacctacagacacccgcagccctgtgatttcatggtcgtagtcttcagtggtgctgaaatacttgcctcctccagggcc

SEQ ID NO: 458 - DNA, 519 bp, Homo sapiens
  Genbank Accession No. AI080633
ttttttttttttttaaaaagccaattggaatatatttatttcatttacattgatacagtattagaagggactgaatataattatggagactgctgcaaacatttgatgccactaagtattctattaagcatcaggcatgcacagtagttaccttttaaagtttctcatgtatatatcttaacacatatatcttaagctacaatatgtttaaagcatttagtcattttaaacccaaatattttaattgacctatgtctaaatggagaaaaacagaaacttcctcctgtctcaatacccgatggcaatattaaaccttactccccaaattgatatttaaacttatttatgtcatctttaaaaatggcaaaattaatgaaaagtcttatcattactaaataagaagtacgattccccggcagcagtctacccaccacacacttacggcatgccaagcctttggggattacataagagtgatgtgctggtggctacagatgacaataattgaagagatcagcc

SEQ ID NO: 459 - DNA, 468 bp, Homo sapiens
  Genbank Accession No. AI081571
  unsure (1)..(468): n = a or c or g or t
ttagctttggaatacattcactttattggtatcagactttactcttgtccgtgggactttgcatacattgagcaactaacccgcatttcagttacattcatgtcacactttggtcatgatttagctctttggtaccaggggcaagctttgcttggtcagtagcatagggtgttgctgtgtttattggatggattccatggcccagactgagtaatgtcggggcaaggaacaacaggacaagtgctctagaaattcttgtctgtggggctgacatgacatgtctctgctttccctattaaatgtttcctgggctgaggcatgagatctcccaggcccctgaagcctggaaggggtcagaaagccaaggcagcaaggctagagggcactgcangggaaagtgacccacatctgtcccctcaaacatcagttcctctttccagggagatgggagctgtcaaacatggaatt

SEQ ID NO: 460 - DNA, 629 bp, Homo sapiens
  Genbank Accession No. AI082067
tttttcccgacaaagatgcctttattgggcgacagacgcggggtggggcgctagcgggggtgcacggcgggccggtaggccgccaggatctcggcgctgtgcggacacgtgtatttgaactctttctcctgcatcgcgctgtccaggtagcggcgtacgccgcgcagctccgcggggatgggcgcctggcggaagtgcgcgcacaccgtgtcgacgatgtgcagcttgggcaggaggctgcagtcggccagcgtgagcctgtcgccgtccaggaagcggcggcgggactcgcgcagctgcggctcccccgccagctcgtgctccaggggcgcgcgcaggtagctgtccagcctggcgagggcgcgcagcagctgctggtacagggcttcgtcctgcgcgggcaccgggttcttgatgaacgcggagaacttgtggaaaacgtcgttgccggcggtgttggactccctgtaacgaggcgccaggctggggaagtcgggcggccccagcgtctcctccagaaagtcctcgatctgcagcgtgtctgtcttggcgtcgctgtcatagagcaggatgggcagctgcgagccggggggcaagtccttcagcacgtccggggaccttgccgtgtc

SEQ ID NO: 461 - DNA, 552 bp, Homo sapiens
  Genbank Accession No. AI082244
tcacattgaatatttattggcttataagcacacaccagatgctgtacaaatcctaggcaggaggttaagatttacagacatgtttggtaaaagcaaaaaaacaaaaacaaaacaacaacaacaaaaggacagatggtacgtgctgaggtgaaatgaaacaagaggcagctggttgatgaattcttgctctacttaggaacttgtggtccaggatacaaaatagacagacacacacacacaaacacacacacacacacacacacacacacacacaaaccaggacaaggaaacacaggatacaccacagcacaaatgggaatgtgccagggcagtgagattatccaagccagatgagtgatttaggacctgtaagatgaggcctagatctttgaagtgagttcaaaaggcaaagaggaggtaagcccattaggacagatggggataatttcaccatcctgcaatttagatggtcacttcacccagccttcctgggcacagtacctacagtgacacagatcccctcccgccatcctggtcacactgaataacaaa

SEQ ID NO: 462 - DNA, 369 bp, Homo sapiens
  Genbank Accession No. AI082708
gtttgtttgtttgtttttttgtttttttctttatcactgggagcttttctttcagcaccacaacattgcacctagactttttaaacggctgccttcctctttgcactgaagaccaatttcgtctgcacttccagttattgctattacctgtaggactttcaatcctacttcacttcacccaccccactcctgaaacagttaaatgtatctatttctgtggaagtcattttctcattgaatgattagaaacaaagataaattctaacctgtaacggctcatttcgactcattgcttacaatagatctaagctcttttttctgcttattcgactccttccagcttcccatcacatctgtaacaaactttta

SEQ ID NO: 463 - DNA, 420 bp, Homo sapiens
  Genbank Accession No. AI086805
ttttttgtgaatcctaaccgctgattttatttaaccgaatatatccaaaatatgatcacttccaggtcctcagtacagaaccaccacgagggaaacccagacctaggtttccggcgccgactctgaggcccgggagttttcttcttgcgtcaccccagcgtgggcaccccggcccgcccccctccacctggagcgcctctgccttgcccccagacccaccagccaggagccagaggagggaggctgaggggcggggacgaggaagaggatgtggctggtgccctgggtggccgcagccgctgtctttcacgcctgtctcactccacacggtgccccgaccccagggtcccgaaagtcccaggctgttggacgtggtctgggtggggtgggagggacgacgctggcaaaggcgggctgaga

SEQ ID NO: 464 - DNA, 515 bp, Homo sapiens
  Genbank Accession No. AI087874
cataactaagtatttgtttaatggcaaaagttgttaaacttgttcaatagaaaaatactgaaggtcattatatcacttttgttaaataatctgtctatggtttgagtagcaaatgagctccatatgacagttgagttttgagaagggtgctgcaagctcccagagatgtatccacagcatatgaaaataaggcagggatccaaacctcccgctaattttcatactattccaatacatttcaaacaaaatatttacaaatgaagcactatgaaagcatttcaatggctgtttaaacattgaatttgttcattctgtgaattttcattgaatgttcaacaggctaggggaaaagtcagacacatgtatatgctactctggttggaagacagctttggctcatttctaggctgagatcatgcagtgctggtagagaagactctctccgtagtctccaatgccacagcactggctttctaaggaactttcaacagttccatttgcgctacagtctatgt

SEQ ID NO: 465 - DNA, 485 bp, Homo sapiens
  Genbank Accession No. AI088153
ttttttttgagttcaggaaaggtctttattaaaaggtgatcacctggctcagtaggactagcgtccaggaaagtctgagccctggataaagaaagcagccaccttttaagcagtcggtggccgggagtacgcgaggcaggaagcgtacttacagaagcgagagcaaaggcagttgttcagtcttttacatttatctatactacatgttccacatccctgggaaaccatgtttctgcatcaaccttgtaactttgcagctgcgctagggtggtgaagcaggaactcgctgagcctcaaggaatgtgaaactagcaagtacagataaggcttgctgagcacagaaggaaaaacaggcagttagtgttcttctttaacttagactatgggggagctacactacacttatcttttgaaggaaaaagtaaaaatttttggttgtctttgattatacttgtaaaattcatgaattccttcttcaacacaac

SEQ ID NO: 466 - DNA, 692 bp, Homo sapiens
  Genbank Accession No. AI091277
ttttacaatttaacaaataattatataaatacatcctctaatgtaagaaacccgtatttacgtggggtgtataattaagacatttcttgtttgtttacttaaggcatttgcctggtcattaagaatacccaaaccgtgcaatcccatcaggtggcggtcacccctcctccagggtaagtcaggggtgggagtttacgtaggaagagtcgagggagaaaaagaggttctcccaggtgaaatctgtgtatctgactgcaaacccagccaagtgcagccagggagggctccaaatctcgggttctggaaacgccgcagagtccaccctcctcagccaacagaaattaacgcgtggcgggaggagctccccgcacatcaatggaggaaaaggggctgggtctgggaggcttcaatgccaggtactttgttctaagtgagtcatttaagtcccagctaatggataccattaagagttcattatcatgctaatagcaatcaacactgtgaaggggtgggaacctcagcccatcaagtgtcccttcgcttgcacttgggtttcttctcgcccctccccaccccttcctgggcgccccctcccctccgctcaaacctgggacaatggcatctggctttggataagacacggagctcgccgtgcccgaccgccacgtcaggccagtggctgacgtcctgta

SEQ ID NO: 467 - DNA, 485 bp, Homo sapiens
  Genbank Accession No. AI091388
ttttttcaaggagtaattcaactttcaagcattgctatttaagaaataaattctgtaaggctatatttgccatatagatagcgattcctctgatggatctaggaaagtaaattaaaaccttctggaaataatttaccatcttggatgccattaaaaatactggtgattcatgggaggaggtcacagcatcaacatgaatgtgaatttggaagaagttgattccaaccctcctagtgggctttcaagacttcagtggaggaaattaactgcagatgtgacagaaatagtatgagaacttggccaggcatggtggctcacatcaatttgcaggaacgcacagccacagttacccacatcaatgtagccagtgggcactgccctctccagctgtagttctactttcaattgcccactcttgtcctgagggcagccgagccaaggtctccttggactatctgggtttagcaagttctctacaggatact

SEQ ID NO: 468 - DNA, 529 bp, Homo sapiens
  Genbank Accession No. AI092131
tattttttatattcattttatttggaacaattatctcaaaaatgaattttctgatgttctgcatggaatgaccacagagtgaagaccttgccacccttacatttgtaaggcatctgtccagtatgaattctctgatgtctaatgaggtgtgaacatgaagtaaaggctttgcacaatcatcacacttgtgaggtttctctcctgtatgaattctatgttttgcataggatgaagcttgactgaagaccttgtcacagtcatgatatttgtaaggtttctctccagtatgagttcactgatgaactacaagttatgaatgacgtctgaaaaatttgccacatttattacacttgtagatctctcttcaatatggattctgtaatgatttgcaatggttgtagcattactgaagactttgtgacaatcattacatttggtaacgtttccctacaccgatgggattgctttgatggtgaaatagtgttgactggtcaggtaagggcttgccacagtcattacactttgaagg

SEQ ID NO: 469 - DNA, 430 bp, Homo sapiens
  Genbank Accession No. AI092869
gagaccacaaggcacttgctttattgttccaggacaggggacaatgacaagccatcgcgggatctgcttatgcctcctataagcctggggccaacctgtggaagttcttgtcacccccaggcccagggtgggctgaggttccccctcgatggggtcaggctcatggcaggcacctgggccacaccccgcagggccaagggtatcccttgtgcttcccgggcaccctaggtctgccaagcagtcaaagcgggggtgctttgcatgggtgcttccctgtcaccctgtgccaggcttttctcctgaatgcccaggttgcctgagacagttggaagtaactaacaggtgctcctcaacttatgatggggctacatccggagaaacccatcgtgagtgggaaacatcgtaagtcgaaagtggtttttgactttcg

SEQ ID NO: 470 - DNA, 516 bp, Homo sapiens
  Genbank Accession No. AI092936
  unsure (1)..(516): n = a or c or g or t
taaatacaaatgttttattacgcaaaccacatgtaggtcccaggctcaggggcttaccctacagcccccactggtccctggctccaagcctgctccttgcccttgcccaccctggaaagccaggatctcctatggagtgtgtaggtgtccacgagtgtaccggtgtgcgggcctcctgggctgcaggcactcaggcatggtggcagcattgagggaaagacaggtgttggggagcggggtccccacctgcccaggctcaggagtcacaggggtctgcacagtcctttctgctgtggaacacgtgatagatgctggtcggggggaacatagcaacagcgccgagcagagagcccacctggatggccacgccggctgccagcaatgccggccggcccccgccatgcagcagggagctggctgccaccttcacgtangagaacacgccaagacacagcacccacgacagcacctgagggggacacagcaccagctgagcgtgagatgtgcctgctccag

SEQ ID NO: 471 - DNA, 471 bp, Homo sapiens
  Genbank Accession No. AI093188
ttttttttttttttttggttactctctgtattgcttaaactatcataacatacatcattttgtaattaattaaatattgtcaagaaaacaaaatggaaataacacaaattctatgcagtggatgtgttttacacaaagccccgagggaaccctgcagttcaggaaatgttgctcctctagaaggcaggcgccactatgtgaaaggcgccccctagtgggagggatgcagcctgaagcgctgcacagggcagcattggcaggacccgctctaatggacagaactccagaatacttgagaagtgattccacatcctgaagctcaaaattatgaaaattgtttcaaagtttggggcttttttccaaacactcaggtcaacacaaggcattcaacttctcgtctgggcactctcagatcttgtgggcccacgtccagaggtgactcagtcaaaacactggttccaggcagcagct

SEQ ID NO: 472 - DNA, 451 bp, Homo sapiens
  Genbank Accession No. AI093231
ccggaaaaacgtttaacttttatttgatgcttctgaacataataaaataaatgaacctaaaacagcgctttaggcagcttggaagggaagatacattccatttaggttaaaatacatgggaacgatatgtacatttgggcagatattctgaactctactgggttaatggttatgcctgtacttgagcacatcagtgagaagtttcccatcacattttatctgaaatgaacaagatgtcagggcaatctgctagcaaaacctgcgctcggggtcagcgatgcttctccctctggaacactcatcatgcccgtccctaggacacgttgcctctcttcttttgcaaagctttcatgaggtctgacatgaaatcttgctccccgcctcctgctccgccggggtgccctgggttctcttgcctcttggggggcacaggaggcctcttggccaccgc

SEQ ID NO: 473 - DNA, 452 bp, Homo sapiens
  Genbank Accession No. AI094860
tgagccagaaccaaacgtctccttttattgcaaggtcaaacccttttcattttgtctatttatacagaattttcactaaggactgctcgacgcaacagctgtgagtacattggtccaaccattaataaatagtcttaaataagaaaacaaacaggttgaaggaaagcaagctcatcgtcctgaacgagggattaaaggggggggggtgttcaaaagagctttggatggaaataaataatctctttgctttgtaacaactatttacaggtttaaatgtacaaatgatgctaaccagaggctggttgggtcagaaaactcacaccaagagggatcacacaaaaagccccagctctgccagcaaatgaaaccaaacataacaaaaaatactcctccccagtgactagagagtggaggctgcagcccaagctactaaagaagaaaaacatcaaaga

SEQ ID NO: 474 - DNA, 428 bp, Homo sapiens
  Genbank Accession No. AI095360
ttttttacatcttctttcttaaatttctactggttgattatattttagaatgtacatcttcatacagattaataagtatacatactgggtatgcataatcaattctttttttcctataggaatatacaatcacaaaagcttggagaccactgatctacatgccagaagcctgttaacagattgagcagaaatgaatagcaccccttcccaaaggcttctgagtgtgcaaggcggtaccccagggaccaaactcgggggtttcgggagttgtaacaaatgctagagctatgcaaaaacctcatccatttattatgctctacagaaaagacacatgtttacatgattttctcgtttggatgtgaaatgcttcctgtttacaacataacagctcattgagtctttcacaggacagatgttctttatcaggg

SEQ ID NO: 475 - DNA, 566 bp, Homo sapiens
  Genbank Accession No. AI096389
ttgtttgaagctttcctttttcccaaagccaattcattttacaacgaaggacaactgagcagccggttaagttatgcctttgttttcagagtggagtttatagcctcactagaagatttacaatccataaggccataagatgatgctgtgcttagatgaacaattttatagcgtgaagatactaagacatcccccaagagagtttgggtgctagatcagttatttattgggaattttttttctcttacaaaaccaaacaaaaaattctgctatggttcccaagcaacttataaatacttatctgtattttctcttagtgccttagtatttatatcagcaagtgccatcttacaatacaaaacaagccaccaaagaaactgcaacaaccgaaacaaaaacaagaaatcaaaaaccttcagcactaagatgatgtgacagattctacatattccacggtatacaaaatttaaataaggcttagcaaaagtaaaaaggatggtcacattcaagcaccaaatagctccagcgagtctctttgttacaaaaatgctgctctgtattaagac

SEQ ID NO: 476 - DNA, 586 bp, Homo sapiens
  Genbank Accession No. AI096493
ttttttttcagtggcagattttctttaatagatatatttcaaacagatacaacaaattaaaaaatctaattcacggcaggtaaacatgggtgctcaaaaagttccacatagacatttacacttgggccatcagtatttccctcacattcccttttgttaagtgtcccatcttcgcagtggcagtacaggagaaatctccaccgtcaccgcacaatccaccaggcgcattaccacctgaagtgaaggtctcatctcgaaggtgcgctcagccataaaaagaaaacatattacagaaaggaaaaataagtgtgctcttcccacccgcaaagcggtctcaccttcagttctagctttctttactccaaagtcttctgagtcttccaagcatctctttcgatttgttcccacactaatatgattaggaaatacattctgatgacccccatttaagatgccattgttatagaaatggttcagatgacaattctggaggttcaagagaaactgggcacactcttggaaaccctgggtttgtgcaatgtctgctgctgtcaggccactggcatttctcaggctgtacaacaca

SEQ ID NO: 477 - DNA, 447 bp, Homo sapiens
  Genbank Accession No. AI096692
ttttttttttttcattatttactattgtttattgatttaacaatatttccacagaccaaagtattttattacatatatagctgagcatgtaattcataattgtataatataaaaaataaacttcttggtattggcctcagcatttaataatgaaaaactagtgacaaacatttttagaaaaaaataataaaatagtccttcagtattaaaatttcctagtaaaaagcattagatcaaagttaagaatatgacatgttaatgcatagatgacttaggcataaataaaatgaatcaaatcccagctcttatagtaaatcaaaataggtgaaatctgcaggttcacagtttgtcataggtcaattgcaaaaacaatgcatcattcatatttttcatcattctgagggttttaatggatacaccatttaaaatatggcatacccaggatat

SEQ ID NO: 478 - DNA, 476 bp, Homo sapiens
  Genbank Accession No. AI097310
tgagtttccctttgtttatttttgcagccaacaaagtatgttttcgaggttaacaacgaagcacaggatagtacaagtggaagatcattaacatgactggataggaacctcttttaatttcccttccttggctttttccacaccctaggtggattacactcaccctgacacacctagaaaatacacccagataccagaattgcaaaattcaggaagaatgcactgcacactgtatccaggcaagccaagctcacctaaaaatggtctcaaaaagcaaagggctctgaccatcgactgatggggttgcaagcccagcctgtctgcaggaatttttaaatctgaaaccacactacagaaattattttatatattacttatttttaaaactcaactgtaaaaataagtgttacaggaagagtgaggaagagggaatttaaaagaggaagttgggactgaatctattcgttccaacctcc

SEQ ID NO: 479 - DNA, 603 bp, Homo sapiens
  Genbank Accession No. AI123601
ttttttttttttttttttaaagacaggttctcactctgttgtcctggctgcagtgcactggctattcataggcaagatcccattactgatcagcctgggagttttggcctgctccatttccaacctgggctgggttcacccgtcctgatgcaagtttgtggtttcctgcttcagggacatcaccatattgatgccaaacttacacccaactggcatagtgtaccacagcccagaactcctgggctctagggatcctcctgcttcagcctcctaagtagctggggctgtacgcatgtgccaccaaacctagcaattattatttttaatcttagaaaataaattgtgtatagaaaggaatagttagcacatttatgtctaaagaggaataaaaaaggacaactgggtttacacaaaatgcattgaagtgactgatttgaagcagcctatcaagtacattcaaaccaaatggcacaggagattgtcatctcagtaactcaacccattacagacatcatttacccatgtctaatctgctataaaacctcagttgaagacttcaactgttctagctatgaaagcaaaaatatctctcaaagcttctct

SEQ ID NO: 480 - DNA, 495 bp, Homo sapiens
  Genbank Accession No. AI123917
tatgtacgatttcatttatatgaatgtccagagtaggcaaatccatagagacagaaaagatatcagtggttgccaggggataatgcagggaggggaagaggagaatgactgcttaaaaggtttcctcttggggtgatgaaaatgttccagaactagatagtggtaacagtttcacaacattttaaatgtactaaagtcactgaattatacactttaaaatggtgaaaatgatgaattttaaccattcatagccatgttttatgaattttaccattttttaagtaaagggaaaagaaggttctgagattcaaacctttgcaatcaaaataaactgtcgaatacagaagcccgtaaacatgttctgaatactatttaatttttctgcccatgaaaccaagcctaattctaaataatataagagccaaaataaactgtctaagctggtattaacctttttcttaaattaaaaatgttatcaggttgataggtgcagca

SEQ ID NO: 481 - DNA, 416 bp, Homo sapiens
  Genbank Accession No. AI124631
cgagacggagtttattcagggcagggccacggggctcagtagcacacgccttccacgtctgccacgaccacagacacgttgacgtgggtgggtttacccgccaggcggtcgatggtcttctgggtgaagtgctcggccaggccctcatggcccaccacgcaggtgtagctttcattctggttccagtcctcggccggcacgcgcagcaggctggtgacggcgtaagttgtgggttcctggccgggctcatgcaggggcttccacaccaggaagctgtctttggggacctcctcgcctttgttcgtccagtacaccagcacgtccttggggctgaagccccgcaccaggcaggtcagcgtcaccagcgcgttgagggccagctcctccgatggcggcggcagcaggtggacctgggg

SEQ ID NO: 482 - DNA, 466 bp, Homo sapiens
  Genbank Accession No. AI125252
ttttttttaacagtaggtattgagatttttatttaaacagtaggtattgagatttttatttttctaccttataagacatacaataagacatacaatattgttgctcagattcagggtgatggtaacatttagctcagaatattcccattctgattaatttactgaatttaggagtgcaagtaatttttagataataaactatgggtatcacatctggctttcaattagctgtaaaatacttattgtgatcaatatccagttgttacagtttggaaggcaaagtaccactaccagaaaaatgctgacacctttcagctgaaccttaaatgccaataatactgtatctttatcatagtgggtttgccagccatcttgtttggtcaggcatagtgcctgacttaagaggaaactgtgggcactttgatggtgagaaacgtcctctttccaaccttcttcttaggctttg

SEQ ID NO: 483 - DNA, 512 bp, Homo sapiens
  Genbank Accession No. AI125923
  unsure (1)..(512): n = a or c or g or t
ttgaatgaaatgattacaactcatttattgaaaacatgcgtggctcttaaaagagcctttgggattaggtgtaaagatgcttacttggcaaagttacttggaactggtgtacttggtgacggccttggtgccctccgacacggcgtgcttggccagctcccccggaagcagcaggcgcacggccgtctggatctccctggaggtgatggtcgagcgcttgttgtaatgcgccaggcgggaagcctcgcctgcgatgcgctcgaagatgtcgttgacgaaggaattcatgatccccattgccttggaagagatgccggtgtcgggatggacctgcttcagcaccttgtacacatacactgaatagctctccttgcggctgcgcttgcgcttcttcccgtccttcttctgagccttagtcaccgccttcttggagcccctctttggggcaggagcagacttggtaggttcaggcatcgtagcgttatagnccttgtgccgaatcttagcctcga

SEQ ID NO: 484 - DNA, 503 bp, Homo sapiens
  Genbank Accession No. AI128031
tttttttttttaacttgcaaaagtaaatttattgaagcatagaaacaattaaagcaaagttgttaattcagctatttcaagagcattctaatgaggaaataagaagatgcagaaaagttggctagtcatccatttctggactgaagcttttcctgaaattatccagaaagatgcctagattgatgccatttcttcgcttgtgtccttcttgatttttttttctttgaaagacacttttgttgatctggaagttccttatttaactttcacctcagaaatactgctgacttgagacgagacaaccttgccatccaccaactcctctacgatagtcttagtcactctagtcttgcttgaatctcgtccttgaccagaacagcttccagatcttgagtcaccagataccagatccctggatcccatgtttacagatcctgagtttctaccaccaaattctgcaaactagaaccacctccctctccatcgagcaggcgggggtgggt

SEQ ID NO: 485 - DNA, 461 bp, Homo sapiens
  Genbank Accession No. AI130027
catgaaatcaatattttattcagtgtcaaagcatcttaactgaattgtgtaagtaattttgtctgtaattttagaagtaacatttgtagaaaatatcaatattatcagttgtgctactagaaataatattgaaggagttaattctgaatttattcatttatgcagttatctatatccacttaggtacaaaacttttgtaagaaagataacacttttattgctttataatttcatattttacaggagtcataatgcaaacttataagcataaatatatacatgatgctaccaaatggcaatgtaaccactaagagatttaaaacataaaactagaatttaacaagcaaaatacttaatatggcttttaatggaaaataactgtttagaaatgatttgttattgccccattctagtcattccccatcaagtgaacataaaaatatgatctccatttaaaatgg

SEQ ID NO: 486 - DNA, 432 bp, Homo sapiens
  Genbank Accession No. AI130878
tttttttaagaatggaactctactttattaaggaatactgagcatccatcctataagaactaagcccattctgagcacaggccccatgtgtaggaggaggcagtttcccatttcctggaaatgccttatctcctcttccttcacagcaaaccccttcacctgccgtcatgcccgtcttcactctccaggtgcgaggatcccgagaacaaagccctggtagcatcctgagatcaagggcgacacctgtaggacaaactcctgattcaagcccaaatatctccagggaacagatatgtcctcaaagttaacacttctttaaaaataatgttcttggccgggtgcgctggctcacgcctgtaatcccagcacttcgggaggccaaggcgggcagatcacgaggacaggagatcgaaaccatcctggctaacgcgg

SEQ ID NO: 487 - DNA, 482 bp, Homo sapiens
  Genbank Accession No. AI138884
tttgcgctaagcaaattctcaccctttagttttttgttttttgtttttcttcctttttctaaataaaccaaatgcttggtggagaagttgagcaggggagatgggcagtagaggttgccaagacagggcagggggtctggatgaggctgtccgatgcctgccagccacagtgatggtgcatggagggaaggaggagcagagagagaagataggcgtggcctccgggatgcccattctttttgcagagagcagcggcagtgggtccaggggtcctggaggggctggaagggggcagctggctggacatccagaagctttttcttccctcggccacgcctgcctggcggcctccagtccttagcctccgctccctctctctctccagatgcccgccccactccgtgtccatagcagtgacacagccacttccccagctccgtgtaattcccaagggagcagtgaaccccaccatctcaaagctg

SEQ ID NO: 488 - DNA, 426 bp, Homo sapiens
  Genbank Accession No. AI141151
ttatggggcataaatttattcttgtgcacaaaccaaagtattgtgactcacacccaacaagcaaaggaaattatcactttccagattacacagcaaacgtagctggtggtggtcttggtgagaagggagtccatactaagattggagatcaggacctgaagctgaaaagaagcaatagctggggttttgagggatggggtgggactgaaaggaggttttggctctgggtatttccctactctttcccaggcagtcatggcaagctgcagaagacacactgaagaacagactcaaggaaaatcacacagacaccaaccgttctttcaacactcagcacacaccctcacacctcccttccaccatcattcccttccattctaacattcttctccctcaaatttttttccaatccccctctcacacacg

SEQ ID NO: 489 - DNA, 571 bp, Homo sapiens
  Genbank Accession No. AI142832
tttttaaagaccgcttttggccagggtggcctttttatttgctgaattctgtactttaccaacagaaaaaaggagcacaacaaacatgcacatgttactgacttctgcattctcgtcgcattgcacacatacatttcacctgctgtctgcagtgtgcacacactgtcaacactttacagtagttcatggatcctccgtgttcatgcacatcccattttcagtgtggctgtgaccttcctccaggtcacctactgtagagctcgctaagccattcccctctgcaccggcattgggcttgaagtgaactcaacaccattgctcccatgattccttttctctcaaggattattctgggaaagtgggctctccaagccacccagtgtgtagagtccttgatcattctcatcatacaattatgtcctgctctccagaaacactgaatcagtcagactgtagagtgtcccagtttcctctagcttgcaagtgctgcgtgtatttagtgtacgtgtgtataatagagagagactctgtgtgtgtgtgtttacaggtgtgtaggtaatcccccatacag

SEQ ID NO: 490 - DNA, 436 bp, Homo sapiens
  Genbank Accession No. AI147256
aagttttgtctgtttattaaaaaacggaatattattttatgtacaaatatgcacatatttacataaaatgtacatgttaggatcttagatcttcaggctccacattcgaagtcctaggctggctggggaacgaaggatgggagcctctcccttaggccagaaatccagcagatttcagactaagaagagtttgggtactaaatctaggtattctggctgagtgtatctgggtgggccagctaaaaataaacctcattgaactccagccccaacccagagaaacatccagaagagccttgaattagtgatccaaaacccagggggaaaggcgacattctcacccccagcacctccttcacctcacctcaactcctactctctcggtctataatcactgctctctctctccccaacaccactattgaacaggagccct

SEQ ID NO: 491 - DNA, 733 bp, Homo sapiens
  Genbank Accession No. AI148745
tttttttccattcaagaacccaaaggcttttatttttattttttcaaaatagaagtaccttttttccttttattatacaagtaacatacttacggtcaagtcagtcaaatattacataaatttatcatgcggaaagggaaaatcacctataacccaattcctcagagataactgctgtcagaatattatttcagagttctgctatacacaaatacgcatgtttcaatgggtacttccagggaccgcatggagatcccttaagttgaaactggacaaacagaacagtggatggttctagctgagatctgggatagtttctgaattcagaagtgttcaccagccacattgcatgtattagctggaaccatatatgaaactacgatactcagctgtttctaacctacaaacacagtgattacatatggctcaactaaatgtatatgaagcctagaatgtcagaactgatagagccttagagactttcaagtctatttcattatgttgaagaggaaaacggatgagggagagaagtgccagcctaaatcatacatcaccttaaggggagaatcagggctgcttctcttcctactggaccatgtacctgtctctcatactctgcttcttttaatataataataaattaggtgcgatatcagccttttttggttttcggttttggcttttttttgagacagagccttgctttgtcacccagggctggagtgcaaggggc

SEQ ID NO: 492 - DNA, 616 bp, Homo sapiens
  Genbank Accession No. AI151271
  unsure (1)..(616): n = a or c or g or t
ttttttttttttatttaagaaaatttatttctacttctacagcagaaatacggaaatggtacaggtttgggcaaatcatactttatgaaatggatcctcataccacatcctttttaatacaggcacgttataacataattcctggattttcaaaatccagccaacacggatacctctgctactctgttttggccttcatagctgcttcctctttcagacgagctttcttttctaagttcaagcttgttaaagtctcgtgtctttgggcagccttcttgccctcaataaccatgaagatgcatcctaccaccgtcagggcaatcattagatagctgatcttcactcgcatcttgttctttgcagcatcaagcatctccaacgagacagtctctgggatttcatcttcctttttgaagcgacctgaccatatgaggatcttnttctgccaatccgtaggtttgtgtaaaggcactctgttgtaagtgcgggatggagctccgggactntcctgtggttttgtgcaaaatccatttattctcttcaaatcagagcttctggtaagccttagagatgaggaaacatctctttcacataacctaaaacagcttcctgctgc

SEQ ID NO: 493 - DNA, 579 bp, Homo sapiens
  Genbank Accession No. AI160540
ttttttttagcagcacttttacttccacatccaaactccctgggtcctcacaacagccctgtgaggtaggtagggtaggaaggtttcagagatccccatttatagatgaggatgctgaggcacagagaggtgaagtgacttgtccaaggtcatacaaccagcagtgtagagggctcaaagccagcattcctccacttgaactcctgcgctccggccctctggcagttcccacatcctctctattctctctgtgtcccccaccctctcaactctcctgggtctacagggaccctaaaggcagcctggcagctgagatttttcaggaatggcaactggggtaggcctggtcaactccagataggaactgaccctgaagagcatgaggccagctttgcttctccccatttcccagttggatggaaggcctagtaggtcccagggcaaggatggagctaggcatgattcatgaacgaatggtgataaaggtaggtgtaagcatatgtgtgtcctgcactaaagacaaaggctcccctaacccaaggccccaaggcagtgtttcaagtgctcacccccatgcct

SEQ ID NO: 494 - DNA, 436 bp, Homo sapiens
  Genbank Accession No. AI161427
  unsure (1)..(436): n = a or c or g or t
gcccggccagaagttttatttccaaaccccaggaaggcattacaaataagagatagaaacccaaattaagctctgaaacaactggagacaggcctgcctaggtgatcaggagcatccaggcagcagggatgggaagcagaagagatgcattctggatagggacctcaccccagagcctcagtctgtacatacgtgtgactattcagggaccgggagttgagaaccagaaacccaccaatcctagtgttgccctgggtgggaggcagagaaggcagcagcacgtgaggtcaaggacattaccaagtctgaccttggcatttgttgcctgctctcatccccaacagtccataaataagttatccagcacatctncagggtggaggcgggggagcaagccaactagccatagcctctggaagaaggggcaggccagcct

SEQ ID NO: 495 - DNA, 448 bp, Homo sapiens
  Genbank Accession No. AI168188
cagtgtagaataaagatcccttcagatggcttatcctttttttagcataaacctcagcaccaaggatgtatcaacaaagaccccatcaaagtaaaaatctgtgcattttgatgcagggagtgactggtattgaaagcatgcttcctccttggatcaagaagaaataaacattcttttcacctttgaagcatttacaaaatatgaaaaaggtttgggaatttacacaataaatctaggtattatagttgaggaaggaaatcgtctcttctcttgtgagacactgatttatcatcattggtaatctacagcctctacacagctagatgtatggctagatgtactatagaatacaagggtaaggtgttttgggcctttatgtgtaagtttgtagcagtagggaaaaaactaccagcaaaccctacactctgccgagacagagacacacagc

SEQ ID NO: 496 - DNA, 483 bp, Homo sapiens
  Genbank Accession No. AI187329
aagaattagttttaacctacttcctaggacttgctgtgttccattatttattttttatttttttagacaggatctcgctatgtcacctggctggagtgcagtggtgtgatcatggctcactgcagccccaacctccctgggctcaagtgatcctcccacctcagcctcccggaatgctgggactacaggtgtatgccaccatgaccggctgattttttctctctgtattttgtagagacagggcttctccatgttgcccaggctagtctcgaacttctgggctcaagtgatccttcctcctcagcctcccaaagtgctaggattacaggtgtgagccactgtgcccagacattatttactttttacatggcttacacttactatcatgtacaatcagagccatagagacctcaaagggaaagaattaggatcagtgagcttttcatggaatttgtacttaagcatgactttacaaagtaccat

SEQ ID NO: 497 - DNA, 807 bp, Homo sapiens
  Genbank Accession No. AI189381
  unsure (1)..(807): n = a or c or g or t
tccataatccaataatatatttaatagggaagatctcattcatcaatatacaaaaaaaaaaaaacaaaccagaaaacaaaaaactaactttgattaagacatgtgcccttagtaagggcacttacaattagaaaggtttatcggtagcactttgaggtagcatattttgtaaagtcacagggctgctctgcagtttctcctggatacaaaggtagaggccatcagcctttgcccctggaagaggaaagtgaaattatctgtactcattgccagtgtcagcctgaacacactttctaccacccacccttggccatccctcctctacactttatgcgtcgggggtttagaacaacgtaaaggcattttgctgcttctttcctcttggtacggcagcatcccaggctgtggagccagttgcctcttgccgcatgtgattcaccagcaggagacgcatgcaccctgtggaaagggaagctgggcatcacagcatgctctttaattggctntaacatttcattaagtaagagtgactcattcctgcaaggctttaaagaggttcatttctgagtattctctccacgattctgaccctagaaagcgctccctttctttcctccctgggtgtaatcatcttggggtatcatttaagctttctgcgattttcctggcaggagggtgaacaggaaagcctttaaaaattcacacaaaaccataccaaaaaaccccagtgcaagagccatacccaagacagaccttcctttgggcaacgtaaaatgataccaagttaacggttcaggaaaacaacta

SEQ ID NO: 498 - DNA, 451 bp, Homo sapiens
  Genbank Accession No. AI190864
ttttttttccttttttattgttataggcatgggggtttcagtatgttgcccaggttggtcttgaacccctggcctcaagtgatcttcccacctccgtctcccaaagttctgagattacaggtgtgggccaccacacctggcccaggactcctttagatggagtggccaggaagggctctctgaggacagacattggaaagatgacagagaggcagctgtgagagggtgtggggcaaggacgctccaggcaaaggcaacagcagagacaaagatttccacgcaagacaagctcagtgtgggctggagacagtgttaggagacacggtgcatccacagaggtctcctgcaggtgcactggagagacgtggcccagaagcagggcaaggtgtgctggtgggtcttcacctggtgggtctgcagctgaaccctggagtgcaaatgaaaacccact

SEQ ID NO: 499 - DNA, 444 bp, Homo sapiens
  Genbank Accession No. AI192838
tcccaaatgtactcatacatttatttgctgctggtccacataaattgcttataattagttacatttctcccaaaacaattgaaaacaattcagtaagctttacttaaatgatttggggcttttcatgggcttttgctttgcaaatagcatacttcatttttacaaatgaagaaatagccttaatatataaaactcctcaaacttaggaggggagataaattgggataaaaagcaaggaaagacacaatattttagtttgtaaaattggtttatttacaaattggtattttaaaattgtatttgaaatttttatttttatatatttccctggcaggcattctatattttcttaaatatggaggcaaaggataggaaacctgagtaaatttaagagatttacctgctgctacagtcagtaaaatttaacttttaatccctgagtat

SEQ ID NO: 500 - DNA, 786 bp, Homo sapiens
  Genbank Accession No. AI198880
tttttttttttttttggggcagctaaaatttttattctgttgtcaaggggcaagatgccagcttggaagtgccaaggagctaaagggcccagcactgccggccccagaactgtctgttcaggctgtgcagtaagcaccagagcctcgcctgtccacgaagggtgtaagcctgtgctccacaatgtgctcagctccagagaggcccaacaacctcaggagggcttggctgtgggtctgaatttctttcctttgtgcttgaagctgcgcagtgggttctgggactttgctctcttggccttcctacaagaggaagacagcttcttccgcttcttgtgagggcgtaccaggccacggagagcaggaggaaccaggtagtcaggaacatggcccaggtggggcttcaccactgcggggtgcaaaggtaggtcatgccgcagcagctggaaggtcctaagggttggcttaaaggtatgtcttaagctcctcagaatgcagaagctcttccttgatctccttcaatcttgcctcccgaatggcctgcttagtcactgagcgcatggcatcctgggggtggacacctgcagcgatagcggaagccctcgatctcctccatcccgaacttgtaggggagcaaaatggggccccctgttctctccactgagaagcttctcaatcttgcctaagttgaactggttccgtggaagcacaaaagttaagactatgccctgggttgtaagcgcgtgctgttctggcagcttcgttgatgtagggctttaagggtttggg

SEQ ID NO: 501 - DNA, 563 bp, Homo sapiens
  Genbank Accession No. AI199897
ctttctttgatatagttttatagagactgtgatacatgaagttacagatttgtgtgaggtcataggtttgtctgagtcactgtataaagcacagaaaaaaaaattctatctttggcccagtttcacagagactgtaggacatgaggtctagagaaggacactataccaggaaaatttattttcttctcatagctttaatttagtttaattttttgagacagagcctcactctgtcgcccaggctctgttgcccgggctggagtgcaatggcacaatctcggctcactgttgatggcctctacataagtcactgccagagttcccagacgattcccagtgactgtgattccctccctgagggtcttgattcttgcatgagtgaagatgtaagaacagaaaatgtttgttgttcctggaatttgcgaccagttgcttttctgacaccttctcaatattggctagaaggtctttgtcatttgttggcccgtcaaagacgaaacactttcgttttggaaagaacgcttgatgcactccctgggaaaaaatgatgtttgaactctgga

SEQ ID NO: 502 - DNA, 449 bp, Homo sapiens
  Genbank Accession No. AI200630
  unsure (1)..(449): n = a or c or g or t
aacatttcaataaatttattttgaactcaggatttcatgtcaatttttacacacttgattttccaaatcacatccaactccccagccccaaaccacatagcagtccagagtcaactcactgttagccctagagagtctactgtccatgtttcctgagaattcactgtgtatacagaggggcaatagctcctcacctgtccactacacacgaccttttgttttctcttcacaatcattgggcataatataatagataaggcagaaatttttatgctcacagagtatggataagaacatgaaagtctatggtgacacaaactaacaacacagctataacaacaatccaaaacttctgactcctagtccatgctctnttcaccaagactaagactgcagggtggctaaaaaaccatctttaaccatatgaagataaatttaggatatgactg

SEQ ID NO: 503 - DNA, 464 bp, Homo sapiens
  Genbank Accession No. AI201812
tcttttccctggttcaggctttatttaaactctttgttcaaaaaaaatgaacagagtgatagtcggattctaatttacagatataccttagacgtctaatattaaattagaaggtcacactagaaaatcatttacacataaaggttaaaaccatatttaaaattttaaaaactttatattacataaagccaaaatgaaactaaatacatgttagccaacttcattcacaaacattagtcaaaatatatacatttaaaaagaaacaaagctaataattgaaggttccttttttctaaaatgtgttttattgcaatttgcaaatgaattgcaggtgatctaaaaaataagccaattgaggagggaaatccaaaacacattaaaccagctcaacttgggagagaaatgctagctgaaaatgagagacatctgttgaaacaattctgtgctttttttcttcagttttg

SEQ ID NO: 504 - DNA, 358 bp, Homo sapiens
  Genbank Accession No. AI201843
ggtttgaaataatctttattttgtaaacatctgtgtttaaaatagatgaaccctgctcacaattcatatatggacccgagacacagtacacgaagttcacccgtcacagggagatagtggaggctcaggaggagtaaggaaggaggaaaggtttgatggttctttccccacttctttttggaggagtaaggaagtgaggttcttatccttcacatatgagtgccctggattttggttcttagttgatgaatactcaacacccagttctttgttttggctgcagccacgcagtgcagctaatgtgtggcttaagaatgaccctcttcctaggcctcgcccaccttgggacggtgggcag

SEQ ID NO: 505 - DNA, 771 bp, Homo sapiens
  Genbank Accession No. AI207842
actgacttgcttccggaggtgattgtgcaggatgaagcccgagtgggcagggttgctttggcggggagccggggcaggggctcggggaaggaacagagcagagacatccagagcgtgggggtcacctggctggccggcatcccagcttcagccctggggagtcctattgttccgtcatgcacttatcggtttggggcaggaagacaatggtatcctctgtgaagccctgggccttgcagaaggcggtgaatttctcctttaactcagccctgggggtctgggttcggctgtagagggtggccatgcggaagtcctcgccagggcccttgctgccctggctgtacagcagcgcgtactggtcgtagtcggtctccaccactgacacggagtaggtgctggcccagtggggactccggtagctgtaggagccgagggaccccgcgggctgcagcagcatggttcgggtctcacactggtttttcctgaggaaggtggaggtcacgttgaggccaccatccgtggcaggggccaccacagacttgcacatggacaacgtccgcttcttctcccggagccagctcgagttggaggcgaggcccgccgctgaccagcgccccatgaacttgtcctgctggtagttggtctgcactgagaccttggccttcggtgctgcctgcagtcgtccagcacccccagcaggccagtccattcacagtgtgggatgagtagccaatctcctgcagcagaacgggtggtccggggctgttgcca

SEQ ID NO: 506 - DNA, 388 bp, Homo sapiens
  Genbank Accession No. AI208356
  unsure (1)..(388): n = a or c or g or t
tgtgcgcctcaggtacgtgttgggcggcagtgggcgcggactcggtgcggtctctcgcgggctgcggtcgggcccgggatcctgctcctggccgagtcgcggtgcgcgggctgctggggtccggcagggctggaggcggaccgcgaggaagcggcgcggccgggaagatggggcagggtcgcctcggccccggggcctcggtttcctccgatcacagcgcctcagggggcgcgcacgggcgctgcggagacctgtgtcctgccggggcgcggcgctaggggcccctgctcgggtttttattcccagacctaagcttacaggtgcgtggtcccagaaagtgagtaggaaagcgcccaccacgcgccaggcgcttaagctntctgtgctc

SEQ ID NO: 507 - DNA, 537 bp, Homo sapiens
  Genbank Accession No. AI208485
  unsure (1)..(537): n = a or c or g or t
ttttttttttttttccgtcctcatccatttattggagtcagggcaggaactgtgggagggtgaagggcaggggaggggccgcagcctgtcctgggggtcccggaggcggcgctcagcggtacttctcggtcaggacagaggatacgaccgataggaacttgtcccaggcggcgtgggcctcggccgtgaagtcggcggggaagcgcgcggccagggtgaccagcaggcagtgggacaggagcttgaagttgaccgggtccacgcgcaggatgtaggcgtgcagctcgctcagcttggacagggcgccgccgattgtcgtcgatgctcttcacccgcgtcgcccacggcggcaccaccttggagccgtgcgcgcgcaactgcccgacccgggtgcagtgtnaaatgcgggagtaaggtcttggtcttcgggtggctgaagaagaaccttcccaacgtctcggtgcgnaaggtgtcgcctggtggggaaattcttggcacatgacacaatgatggcccctaantctttggcaaaacatg

SEQ ID NO: 508 - DNA, 418 bp, Homo sapiens
  Genbank Accession No. AI208954
ttttgaggtccctttagcttttatttaagtagctcctgtttcccaaaataagagggctggagcacagaggccagacgggccaacttagggtacagcacaggtcgggggcagtcgccctatctggagcgagaggtatccgcattctgcaggtgcagggactgtgatccagcaccctgccgcctcctcgctccggctcccaagagggcgggaaccgcggtgttgcagggtgcgaggcttggcttcggaaacgcagatcaagtgtatttcaggcggcagacatcaatccagttgggtgctcacacctggcccgggggaggggaaacagcatccataggaaccacggggcggagaggaacccctcgtttgggacgctagagggctgctccggcttgactaggtccgactgcttttctgtgat

SEQ ID NO: 509 - DNA, 483 bp, Homo sapiens
  Genbank Accession No. AI215886
gaattaacatcaggagccccccagcttcagactgtggtttgcatagtccttagcaggcagggtggggttggctgagcatgtcagcaacccaggatggtcaacaggggagtaaaaccagcagccaccttccttttgagccgagttctaggactgcggggagttgggtcatgagaccagctgtacaccagcaactcaggcaattctgaagtgggcttaaggtttgtatggaaataatctgataatttattttgtgaatctgtggttgtatttatgatagtgattggcaggatggacttggggtcatcttcagtcaacctgaccatttttgtagtacctttgccaagttggagaaaaatgtctttgctcacatttctcttggcatccaacatggagaaaaccgttaatcaatatacttaaaaaaagaaatccttaacacaaggagttctttttctcctttgagctggactaaagctcatactgtga

SEQ ID NO: 510 - DNA, 390 bp, Homo sapiens
  Genbank Accession No. AI217310
ttttgaataactgagcctagtttttatttatggagggactgcccgagggccttcagtccataccattctatttgtccttgccaccagccaggtggtattcatctactctatagaatgactagcaaaatttacaggagcaggagtgggaaagatacccagaggtgctgacagatgttttgcatgagagatgcaggagctgggccattttctgctcttttcagtagttttcttattaaggtgaaggagtatggcaatcaactgcagtcagagctgtctggcaggatgtggcagacgcagtagtccgtcatattcgaagtgtttgctagttcaggagagcctcaccagattattttccttcatgagtaaagatccagtgatggctctacactg

SEQ ID NO: 511 - DNA, 411 bp, Homo sapiens
  Genbank Accession No. AI218358
ttttttttgaggcaataggaaacattttttaatgaacaaacaactttcacacaaactgtctgtatcacattgttattacaacacagatgagctgaaacgtttttgtacagatttggaggatgggaatcctaaaaagaaatcaagcatatagaggtagttgaatagcaatatggggggaaaaaaagcattatcttatatttcccttcagttcattacagtgcaagagtaaaatggctgcttaccaaacaaatggaaaacacacacacatttgccactgtttacgtggcttgcttgatattttaatcctggcattacttacaactgcataagatgatggaactaatttacctaaaataagcctatggtgccacattggcctatttgctttccttttattccattattagtgtt

SEQ ID NO: 512 - DNA, 555 bp, Homo sapiens
  Genbank Accession No. AI219073
  unsure (1)..(555): n = a or c or g or t
tgctaagcacggaggctgtttataggctgggccgcatattacaatgctcagggctccactgcaccctctcgggggtctgctagcgctttccgtagactgtctccacgccctccccactcccagccagtccacatcctctccggagggactgcagcaaggatcgttaagtctgtccaccgggatgggggaagaccagggccggagcagattggccatccttcagaagatcgacttccgctattggggagagtctgaggagtccgttctcccacggggcctcgtcactctttgcgaagggcgcctggcaggtcaaatgacctccatttccacctcgccttccaccttcttcttttgcttctccatcactgcctccagctctgacactttctctttgtcctccagcagcgagcgctgcacggtgacctggctgtacacacgtgcccnctnctcggggctcaccgcccgcagcttctccctctgcagcgagaaaagctgcgcnccggtcagcacacccagcgcgtccacggtcccggagctaaagcccttggcctgcag

SEQ ID NO: 513 - DNA, 443 bp, Homo sapiens
  Genbank Accession No. AI219734
  unsure (1)..(443): n = a or c or g or t
tttttttgtgaaaatcacgttctttttatttagttctaattggtcaaacaacaacaacaaaaaaaactgtcagaaactgtagactaagattcctaagatttgcttatttcagcaagatcaaaaataagtataacaggtcatccaaacaaacagaattctgttttcgttttttttttttttttttttttttgagacagagtcttgctctgtcacccatgctagagtgcagggggngancnnnnnnnnntgnnncntnnntntnntgggtncgggngatncttctgcctagncttncccggnggtgggcttgccctgccgccctgcccggcctgggccacgtgggcggaccccgctttctggnaaatcangacttcctgggcgtgggggcggtgccccgnnccccggtncncnggggcgggggccgggcnnnccnnnggcccggg

SEQ ID NO: 514 - DNA, 410 bp, Homo sapiens
  Genbank Accession No. AI221304
tttattaacccatagacacgtttattttatctgtatcttcatgcattctccacgccccactcttcatacataaaggatcattttgaatcaaatcccacatctcacatcatttcacttgtaaatatttcagtaggtagctcttctgagggcaggtccaaatccataatgtctgcaattccaagtttctgaaagcttgggccactgaggtgtcaaatttgatgtcaaagtcgaagactgcagtcctggttcagtttcaaataagggactgtgatgccacgaagcagaacgaagactgagcctggatcacaatgcaatggcctggcatgaggttggggaaaggatgtgcaaagacacagaggagtgagaaggccacaggtgttcagagggcgatgagcaaatccgtgaggctc

SEQ ID NO: 515 - DNA, 281 bp, Homo sapiens
  Genbank Accession No. AI223016
agaacaaggaatcaggaaagctctgttaggaggaattttaaataatttagtatgaggtgacaaatacctggggtggcagagggaacagaaaaagaaacagggagatgcatttcagagaaaaatggacagaaaatggtgattgattgcctgtgaaagatgaaggaatggataataaaaaattacttcaaagttccctggctgggtggcatggctcaaggccaaggtaagaggattgcttaaggccaggagtttgaaaccagcctgggcaacatttcaagacc

SEQ ID NO: 516 - DNA, 497 bp, Homo sapiens
  Genbank Accession No. AI223034
tttcacggggatgagtccggtgcttattattagaattcctgttgttcgttaagctcttaccatgtgctttgcacacatgggtgtatttaatccttaccttctgaggagctggtgctatgaggggaggaaagtgaggctcgaagtcatacatctggaaggtggcaaagttaggggctggcctcaggtttgtctggctccaaaacccatgtccttcaacactgtgctgtcctgcttccctcgggggtgagttcttcatcaagcagataaaaaattcagtgaagaagctgagatgaaccagtcattctgctagtgttcagttaccactggcgtgtgaactgagcaggatggggtctggggcgacctcctgcgctttgacgtgtcctgttagcgacagagtgattgagggttcatctgccaggagacgcttctcagaggtaagggactgtattccagcttcagcatgacagagctgtctgagttctgcttgccctcgtgcc

SEQ ID NO: 517 - DNA, 387 bp, Homo sapiens
  Genbank Accession No. AI223376
ttggaatgattgggttttaatgggtcaggtctgggacctggcttttctcctggagcagagggaatacttgtcatggtaatggggtagcccagagggtgtggacacggctgggaaaagtgaggcttcagtttgggggtcaggtaggtgagtgcctgtcactgaggtcaaaggagctgtgggctgggcctggcggtggaggcgggtgcctgtagtttcagcaagtcaggaggcggaagtgggaggatcacctgagcccaggaattcgaggttaacgtgcgctgtcatcacaccgaagcattccagcctggacagcggagcaagaccctgtctctgtctgcttcccccacacacccatggctatgctgggctggctcacaggcagcagtg

SEQ ID NO: 518 - DNA, 620 bp, Homo sapiens
  Genbank Accession No. AI223817
  unsure (1)..(620): n = a or c or g or t
tttttttttttttttttcaaatttaaaaaacatttattttaataagactattgcaaacacattaaaaaaactaaatagtaatattacaaaatctatatacttgcacatttagtatttgtcaatgggccagaggttttcttcatgaaatttgacttttttgaagggaaggcttttttttatcatcttttatagctctgactgaataagtcttaatgctttcttcatgttttctatcaataggggtaaatcccgaggctcatatgtgtacaatctgttagagtatcttccagctatgtcagctctaactgttaaagaagggtctacaaacatgattctaggcacatattgcccatcaggtgataaattcttatcaggggtttcatgcataaggtttagcatgatgaacttattctgagccatttcttgtatttcttcattttgggcaaatacttntctttagtgcttgagagtattgacaatcctccaggggatgaataaccattaatggcttcttacttttttgagcataaaagagaaccttcttcataagtttgtaccccagtgatgtcatctccccaatcctcttgagaggggctgaggaggcccctttcncttnttat

SEQ ID NO: 519 - DNA, 448 bp, Homo sapiens
  Genbank Accession No. AI224653
  unsure (1)..(448): n = a or c or g or t
atacggctgcgagaagacgacagaagggtaaacaagaaattaatagaaatggctacctacagaatggagatagtgtgcaagggagtaggagtaagaatgagatttctcaggccaggcgcgatagctcatgcctgtaaccccagcactttgggaagccaaggcagatggatcactttaagtcaggagttcaggaccagcctggccaacatggtaaaacctagtctctacaaaaaatacaaaaattaacttggcatggtggtacatgtctgtaatcccagctactcaggaggctgaggcaggagaactgcttgaactcaggaggcagaggttgcagtgagccaagattgtggccactgcactccagcctgggaaaaagagcaagactttgtctcaaaaaaaaaaaaanaaaaaaaaagtcgtatcgatgtcnagcgatcatgantgatat

SEQ ID NO: 520 - DNA, 263 bp, Homo sapiens
  Genbank Accession No. AI242381
tgtttttatttttgcatggagggtgagctatttgagcaaggtaaggctggagagtgctaacgcaggagtgggcagtgaggtgtggctacagtcctggagtacatgacctggatctgctgcgggcagccggggtttggacacactgtttaggagcaccagggagtgggccccaagtgcctgccagcgcacttcttctctatggggtcggtttcttggggttgaccgtgttggtcttactcttattagagcaagctctggtggac

SEQ ID NO: 521 - DNA, 388 bp, Homo sapiens
  Genbank Accession No. AI243125
taaacttgttccattctattctaagcaaaaattaaaaggacacagttcagaagagctctttcagcaaataaataattgtttcacaaaagcactgctgtaaacaagatcactttgatggccagagacacttatgttttcaaccaatggcaaccttaaacacttccaagtatagatacacatggtatatatgggcaaaaggcaatacatcattaatcaatcaactaataaaaattaattataagcttgttgcttggtcaaatatgcttttgttctctatgtttttttaattggtcagaaaacttaaactgtaatgatctaaaaccctgtatctactctgaaagtaactacaacctagaatgtttgacactgtagttttgacattagttaa

SEQ ID NO: 522 - DNA, 699 bp, Homo sapiens
  Genbank Accession No. AI247543
  unsure (1)..(699): n = a or c or g or t
tgactaaaatgaatatattattctaggttaatttttttccattcaaatgtttatactccatctacccagaacaattacagcagaaaaaataggcacctccaaagtcttcccaagaatgatgactttctgaaatgacacactgtacaaactggacaaatgagacgactgactgtgacaggggccggggagctcttcaaggggccgttttcttcaagtctcggatctgtttaatcaagtagttcttctcgtcagcgaactgctcatcattcgtcctttctttttggaagctgctcagaaactcaatgagtttgggctgattttttaacaggatctccacaataggctgtgttttgtgaggactggccacaaacaccttaaaaacatgaaaggcttcaaactggatgttgggacttttatcccgaggaggttcatcatgagtntcaggttctccggcttgctgatatactttgtcatgatggcanagntgtgacggtccaggatcagctcccctagcagctntaaagactgtctcttagntacataattctcagactgaangcatntctcatagtcttcaaaatagtgtcgtatttttgttctagaagtctgctaccacacttttgtctggttagtaaatctttgaagtagcaaaggcatctgaaagcatatcaatggtgacacttccacgtacttaaagaa

SEQ ID NO: 523 - DNA, 432 bp, Homo sapiens
  Genbank Accession No. AI248671
  unsure (1)..(432): n = a or c or g or t
caagtgacctactattaatatatcctattttttctctgtatttaagaaggccaaatagaaaataatgctgatatgggagtaactgttcacattgagaaatgagaacagaatcccaatctcatttattgtctatacttggacctgtttactattcttaattggaacaagacattatcatttttagtgtaaaacacctaaattctatacactatgttttaattcctgcagctatccgagaagcgaagaaatcttgccaagtgaccaagtcacttacgtgagctatccccatgtaccgagggtaggtatcgcagtttccagcagaaaacccctatctgtcctggctgatcagtatctntaatcctactttctctggctttgacagcacttggtccaaacctaaagggcagagagagcttcagagttccaatgaca

SEQ ID NO: 524 - DNA, 289 bp, Homo sapiens
  Genbank Accession No. AI251913
ttttaattttttacatttttaattttttttttttttaatagagaaagaaaagtgggcccagggaaccggcgttcagcatatggaggacccacgccggcaccggtctctgagttccctcagtatttattcattagtatctctaccatatcggagagggggacaacagggagacaatggagagtggcaggacaacagggtaatagtggggagagggtcagcaggaaaacgtgaacaaacatctctacatcataaacaaggtaaagaaaaaggtgctgtgcttttaatgtgc

SEQ ID NO: 525 - DNA, 523 bp, Homo sapiens
  Genbank Accession No. AI262104
atgctttttttttttttttttttttttttttttttttttttttttttttacattcctttttttttttttaataaaaacaagttctcgctgtgttgcccaggctggtctcgaactcctaggttcaagtgatcctcctgccttgtcctgccaaagtgctgggattacaggcatgagccgccacccccagctgaaattacattactttgagtgtttaatttcactatgacaggaagtagcctaatacatacttttttgtgttaattttctggattcatcctgatttttagtcttcgtacctgagtacaacaataaaggaaatcactttttagatacattaaaattacttttaaacttgccccccacacatgaactgttttcagtttgctatttttaatggcccatgcttatttatatagacatagcataacactgctaacactttatggcctactgtcctctttcttagtattatattataaaatatttttctatatttccacatagttattgactcattttaatg

SEQ ID NO: 526 - DNA, 396 bp, Homo sapiens
  Genbank Accession No. AI264299
ttttttttttttttttttttttttttttttttttttttttttttttttttgctgcaaaaaggcttttactgggcaaacggggggagtttcaacccaggggaccagtgaggggggagggcccctcctccaaaggagcagggggggcatccctgcccaggggccttaacctgaatgcactaagggctggccccttaaacaggctcaggggaggtccccccacaagggttttgggcccctcccttataaaaaccccccccctgccatgggggccggggcccttgctatcacatttgccttggttgatctcagggagggtgatctctttcagggaaaactggggggggggagatttacccttgggagggcccttcaaaaaataggagtggggggtgggga

SEQ ID NO: 527 - DNA, 490 bp, Homo sapiens
  Genbank Accession No. AI265958
ttttttttttttttgaattttatttttattttattttatcattttattttagagacagggtcttgctctgctgcccaggctggagtgcagtaacaccatcacagctcactgcaacctcaaactcctgggctcaagtgatgctcccacctcaacctcctgagtagctgggaccacaggtacatgacaccgttacagcctgaagcttgaatctttgtccccatggctgccagcaagaggttgcagatgctctaccacacacctccatggcaggaagctcacgggtcttcaagcacctcttccagcgtcccatctctggaatggcactaacttctcggagccatgggataagggagcgtttcataacagagctgggctttccagattcctaactcagtgcctccttcctaatcatcccatctcctttcaacccagacatctcagacttgaaacatggcattcaccccttgtcaccgtacttcctttcactctg

SEQ ID NO: 528 - DNA, 609 bp, Homo sapiens
  Genbank Accession No. AI268312
tagtggagacggggttttaccgtgttggccatgatggtctcgatctcctgacctcgtgatccgcccgcctcggcctcccaaggtgccgggattacaggcgtgagccaccgcgcccagccctgaataattcattcttgctaagcttcatgttgactctatatatcatctaagaaagtattgttttgtggtccaaacctgttgccgtggttagtaaggctttcttaggtgtgaaatatttagatgaaattttctcttttaaagttctgtatagggttagggtgttggaaaatgctatattaataaatctgtagtgttttgtgtttataggttcagaaccagagtaactggattgaaagatggactgatagattagatatatcagtctaatttatcatgactgatagatctggttaagttgtgtactaaaggattaggagagcccttcctgtcacaaaagtgccactaaaacagcctaaggagaaaaatggcttgcttttctaaacttcagatgtatctgggctctaatcatatagacaggcttctgatagattgcaactgtaagtagaaacctacatatagttaaaatcctggtctttcttggtaaacaga

SEQ ID NO: 529 - DNA, 398 bp, Homo sapiens
  Genbank Accession No. AI269474
tttacagccttggccatccatatatatttctcttaattttccacaatatgtcctcagcaagtgtaaagttgtagaaaggtgaacaccatggtgtcctgtagaagaaataaataggaggtcattttccaagatgcatggtgactctagacatcatcaggcctcactgtaaaaccttgcttttccggatggtgaatggatgtgaaaagttttactaacacttcttttccaaatgttgaagaattttaatttttttcttgttgtaaaatgttgatgctccagccattgaaaatagtgcaatatgaaaacttgctgatctgctttttgtcttaaaggcaacagaggatgacttggattcttgtgatgctagatctctacgtgacatgaaatgttgatatcta

SEQ ID NO: 530 - DNA, 551 bp, Homo sapiens
  Genbank Accession No. AI271425
ctgatcatggagacttttattattgagacctccctatactttggacacttcaaacttaagaccctcagtacttttggctaacctgggttgcaggcaccctcatccaaggtgtaaaggtcctaaggggcctgcagaggtttcaggaacatctcagctgctatccaaggagccagtgcttagaataggggctcggctgaagcagttggctgagaggcttctgtcttctcccttcctgtcactatttgccacactcttcccccatgcagcttctgcaggctcaggtgagcaggtccagcgcagaaacaggccttgccacagccgcaggctctggggctccacagatggccaagggattgaggaggtagagtgggttctggagtctttgttgctcttttggctggttgagcccagaccacagggagtgcatctgagtcctcccttcacacggcattttcctggatccacttccactccaccagttcctggaatccagccatggtcttgctcaaggggtccaggatgagttgggccagtgaagtcacaagcagggt

SEQ ID NO: 531 - DNA, 559 bp, Homo sapiens
  Genbank Accession No. AI271460
aatttttaaaatttcacatttaatgtcatgttaaaaacttttctaaatcagtcttccagtatcggattcttaagtgagaaaaaagaagacaaaagaggaaaattccgtatcaattatttagcctcctcccttccctagaaaccaacatttccttttaaatgcaaggcacactccttttcttagaacagagatcaggaaactttttgtgtaattttgtgtaaagggcaggttaataaacattttgggctttgcgattctcatttggcttctattgcagctgtttaccttaggctggagtagtgggaaagcagccatagacaatctgcatttataaaaagaagtccaaatttggcctttgggctatagttggccaaccgctgcctcagaagaacagatctacatacataaaagaatcattcgaaagaaactggtctctagtcagatgtgatgtatgattcagaatctagtagctaatcactctagaacattttggatgtcaagcactttgaatttagccaacttaagattcttctattgaaacacatgtcatgcttttcat

SEQ ID NO: 532 - DNA, 414 bp, Homo sapiens
  Genbank Accession No. AI273624
ttttaactttgaaaatcttagtgttaaataacctataacatccacatagatgtgatgagcccactaactaaaacactgacaacaaataaagtacattaaacaggctgcacctcagcatttcccatatacctgaacctgctgcggctgctgaacctggatctgctgttcttgctgggtttgtggctgaacactggtggtgactggacaggcaagttcaagcaaagacccagccacttcagtgctgtctgtgtatatgcagttcccaccctgttggtacaccatggtagtggtggctgtctgctggaactcctgaagggcttctggccccttagaggccagtgagtccagaaattccttcatcctgtgttgcgggacagaccgtgcctttactcggatgtactcttcaaaggagat

SEQ ID NO: 533 - DNA, 444 bp, Homo sapiens
  Genbank Accession No. AI275140
  unsure (1)..(444): n = a or c or g or t
tatgttttcaaagaacatttaatcacagaaactttcaaaatattttgtacattgaatagatccgatcaccaagcagtgcatagagtaggatcctaactttgtaaaatatccatatgtcatatataaagaaagacaaatgtatatgtgccaagtaagaagactggaaggaattatgaacagtggttatctctgtgattgattatgggtgtttgtattctggtttttgttattttcaaaattttccccagcacacagataacattttcttacgtgagaaaaaattttttttaaaaagcagggggtggagagcggcaactgtttgctcaagacttttcagtaaggaaaggaacctggggtagaaagctcccccttcagctgcccatgagggcacaggtggnccccacactcactacggggccagggcagggccacacacctgccact

SEQ ID NO: 534 - DNA, 472 bp, Homo sapiens
  Genbank Accession No. AI275499
agtatgagacagtgcttttctaaataactgcagggtggaatcccttcccagttcctggtaaaatttacagggagccacaattctgtatgccattttaagattatgacataggttatatttaactgtataatatttcgatgagacaagcatgtagcataccaacgactggaagagactataaaaggattattaattactaattattattaatactataaaagattgattctgctgtatgttaggaacaccttgcccaaacagaagtatataggggtgcgtagtacaaatcaggacggtatcagtaacattattgtgcaagcagagggtatagttgtcactgctattagtgtaatcatcatgtgaaagaattcgttcgaaaaaaggaagtcctagtctccaaattcaggtatgagcagggcttaaagcttgttcccttttttaattgtaacattggtcctgaaagctcatattc

SEQ ID NO: 535 - DNA, 465 bp, Homo sapiens
  Genbank Accession No. AI276085
cttactgcagcttgctgttgtttcaatttgtctctatacgcctctaattcttgcaaattgagaacaggtggaagcttctacagaaaaaaattcatgaaagaagaggaaaaaataaattgtttaatttggtttcatttacctggacccttctgactagtgaactacaaactgtgcatacaaaacagtgtcacatcccactgccctccatgccacctgtcctcccaacctccctcctaggttccaaccacaaaagcctatacatctttagtacacagccctctggttccacccctcattcagccttgttacccccactgctgctgctctgccttctgagaaaccccactaccactggggactctggaccctaggccgacagacactgctgccacggcctgtgacaggagaatgtgagacagtaactaacctaaccccaactctaccatccacagatatatctctatt

SEQ ID NO: 536 - DNA, 473 bp, Homo sapiens
  Genbank Accession No. AI276246
ttttgaagcttaaaacaaaccattttatttggctcatgattttatggggcagaaattgggaagggtaccactgggcaatttatctgatttacgtaacaactagggcagctggggctggaggatccattttcaaaatggcttcttcacttagtgttctttggcctcttccttggtgctcttttgcctctacacttgatgtcgcatcctccagggcttcttcacttgcctttgggtttctcacgacatagtgatttcagggtgattacatttctaacatagtggtcagcttccaaaaggcaggaaaccaaacttgtcaggtgaaataagagcaatacctggaactggaacttcgcttctaccacatagtcttggtcaaaacagtcgaaggatccactcagattcaaggaagtgaaaagactccaccttctgatgacagagtgacattgtcacaatagagaagaatatgtaaaacc

SEQ ID NO: 537 - DNA, 505 bp, Homo sapiens
  Genbank Accession No. AI276259
accatgctatacacaattacgagatacagaactaggcttaatcacactataataagaaaactcacttttgaattgtgatgtttctgttaacggaaggacaatacgttactataatacttttagtgtaataacttttgtttgaattatgaaaaaatttgaatcatttccctctagaccatttcatttcaaacttatactttgtttagtctagccagttgaccaaaaagaaagaaaataaaaggaaaaagatactcggccagatgagatagagagagaatgctaacacaaggttcaatgtatgcagttctcggttgctctgttccatatgcccacacagtgtcatgacgtattggtgtacccctaaacagaacgccagatcagtccattcttactaggctgaagaaaattctctatcagagcatcaatgagtttcttcagttcttcctccagtaaagcagtgtcactctggtcaggtgacgcacacatctctgcataatactttatc

SEQ ID NO: 538 - DNA, 334 bp, Homo sapiens
  Genbank Accession No. AI277946
tttttgagcccatcattaaagtttaattctctagaaagtttagtatgaagtatttgacatacaaaaagccataaagaatgtcacgcacagcttgccaggagcaaaaaaaaaaaaaaaaaaaaagacgaaagaaaaagcacgttacagtgaacgtccatgtacccattgcccaattggagaaagaaaacatgcccagtgtattaaagcccctggtgtgtcctccctgcctgcctcctctgagtgaagcataatcctaaatgtggtttcttgtgttattctagtctttttttttaaagaaaaatctttctgccaatggggataatggctccatgtg

SEQ ID NO: 539 - DNA, 581 bp, Homo sapiens
  Genbank Accession No. AI278995
  unsure (1)..(581): n = a or c or g or t
ttttttttcctctcttttaaagtctggttcagccccaatcacttggctgatgggggggaacacgggggcacgttggctggtggacatgggcatgcttcagagaaaagtgtctgaaacgaagacaggaatctgagaggcggctgcccaggcagatgacttctgagaacagagggtgtgtgtagcaatcctgctggctggagtggcatccggtggtgtgaagaatcagggggtctcttctggagagttgtgagagggacagagtctgtgctcttctctggcctttttgtttgttgtgtttttgctcaggaaaaagccaaggcaacaggaagagctgaagtctctttgtgcccatagcacagggattggggactccagccctgggctctccctggggacgaaccctcctcctctctgggctgctcagaaaccaaagcaaacttggcaagaaaagagaggggagggaaggagagagaaggtcaggaaggcacggngccagcagagccttccttttcaggacctgctgcaaattcaagaaccaggagaacatgtgacaactctaactcacagagcccttcaaacct

SEQ ID NO: 540 - DNA, 565 bp, Homo sapiens
  Genbank Accession No. AI279514
tttcacgtccacagcctttaatcgcaggagaaggcagctatccaccaggtacccagaggcaagggggggccaggagatgatagaccccctctcaccccaccagcccatccctcctgcactgttcccaagaagctgcggccagcgcagttcactggacgttagtgggggctcaggtcctgggtgctggcgctgagggtccgaggggccttgtccaggtgccagctgggaaactgagtcccaggagcccttggagcatccacgttcagtgtgttgagtgacatggctctcttcattccggctgctcctgccgccgcctcgcctcggagccgggagaccagcttctcacttcctcgcctgatagactcacggatcttggagagtgagctgctgcggcgaagggcctgttctgcgtcaccagctgtgcctgtgttgggggcaccgagaggggcgggtaggtcctccttgtggaggatttctttgtacagctcttccgcttgttgatacttgttctgtttcaggtaggctgaggccaggttgttcttggtcttggccacgttggggtcat

SEQ ID NO: 541 - DNA, 601 bp, Homo sapiens
  Genbank Accession No. AI279709
  unsure (1)..(601): n = a or c or g or t
tttttttaggtttatttattttattgtttgtttcactgtttgaatgtttatcttgcgagagtctacagaattgagagaaaatatctgcaggctaattttacataacatgaggcaaagattaagcactaaatataaaaaataaaacttttagcttgcttattaaactaggaagaattttcctgaaacacagcagttaaattggtctgcaatgcattaataaatggagaacacggatctcgcctatgaaatattttaaacattgtggacgctaccaaaaagctcattggtatataaaaattttcaagtcacagtcctctaagcagactaaatacaagttagtttttaacctgaattcagaagtgcaaaatctgtaaaaataaaaatatttccattgttctcagcaatctatggattaaccttacaaatccttaaagtcttttcagtaacatgaaccatgatctcttgacaagttccttgcttaagtggcaagtaacttttgaagctggacttctcaatctgtagagagaagcaagctgcatccacagcattgctcccttttgaaaatatctttctgagagaagaagtcncagcaagatctcag

SEQ ID NO: 542 - DNA, 412 bp, Homo sapiens
  Genbank Accession No. AI282714
tacaggctgtaatgtaatattgtattatctatttctctatgtacataaagtttcaactattgctcacagatgacagagttgatctggcagaagcaggatgcttatgtgcggaacagagctgggaagaaaatacatgcatcaagcaaacagtttattgagatcagtcaaatctagctgttttgcaagtcttctccaattctgtatctctaaaaatggcctccacacccaaaaaacaaaaaaaaatgttatctgttccatgaggcttttctctcttagataccagtttttgaagtaatccagtcccgcaaggccgtaactctagtataaacaccaggcttgttgggttctcacattcatctccccagctcactattccagcaaggtaccagatatctctagcatctggaactaa

SEQ ID NO: 543 - DNA, 447 bp, Homo sapiens
  Genbank Accession No. AI283643
ttttcagagttaaaaacattgtactatatttaaatgtttgcatataatatattaatgtttttcacactaaaaatatacaatggctatgtataaaacctgattttggaaataatatcaaaaattacacgtgtggtcctttggggatacaaggtccagccaagtggccatcctcccttcccacccatgagtaggcctgccacatatcacaaccctgggaaactctccaggatcacccaggctgggatagatggcctctcatatgctccccataacaccctgttctctgtcactagattactaccttgtgctggcactggctgtaaacattctgccccagcctctgcctgcaccctaactcagtagtgagaggctagagagcctggcgcagagtaggtaggcactcagtaaataattttgatcaatcactgaatgactgactgaggcata

SEQ ID NO: 544 - DNA, 598 bp, Homo sapiens
  Genbank Accession No. AI285531
  unsure (1)..(598): n = a or c or g or t
gattttttttcacgtttaatgtaaaaatgatctcgtgacatttacatactaagtattaggcattacataatattaattttgatggctatgttacatcatctaaaaataatatgacaattggtggcatagtatgtgtttttcaaaactgctgtaaaacagaaatagtgtgaactcaaatacatattgctgaagggatgaggatcgctcttaaatgcctggatggcatgaactttacatattagcatggtaagaaattactaaatcttttcttttcctgtattaaaataatgaggatctaagacacattaaatcaaaatatttacaaaaatttaataatgttttagaccaaagaaaaaaaggacaaattaaagaaatcattcttattctaaatttaanttttttaatgttagntctcagttttcttagcttttttttctgttggttctttgaaacaagcattgtaaagactttntaataatacaatagcttttaaactcttagtgaaaatggaaagggtgctttttatagtagcctctggcactcttcattaggctgggtacaaagcaacaagtattctagtatctgaaaaatctcctgt

SEQ ID NO: 545 - DNA, 417 bp, Homo sapiens
  Genbank Accession No. AI286188
ggagcagatggcggtgggcgccctggggagctgcctgtggccagcccagccttcacaggatgcgtctcaccacagcctctccagtcctgtgaggtagagaagaagctcctggacatcctggagtcactgcccagggaggctctgggtcacgggggtggggacaggcctgggcgtcctgcctcccgcccacagcagccgactgcctgtcctttcatgtttctgccacacttggtctgggctttgcgttcaagaagcccattccaagtgcagtgcctggctcagaggacagaccaggtcatccctcccagccccgcatggcttcaggcccactgcacttccctgctctgccgcctgaggcaagggccagcttctctgcagcacaagggcctgcagcaccccacgtgctcagcacacagt

SEQ ID NO: 546 - DNA, 491 bp, Homo sapiens
  Genbank Accession No. AI290476
  unsure (1)..(491): n = a or c or g or t
tttctttctttattctttttggtctttaaagtgacaaaaaagaggaaaaggaacacgctcttacaaaacagagcaagtttcttttccttgtactgttgaagcccggtttcccaggggccgcccttggcctcctccacacagcactggtcactcgtagcagcatctgcaggccaggtgccaggtgcccagcgggccccacgctctgggatgaacttggagtgggagacggtgggtgggtcccccagctctcaagtgcacagagaccccgcacccaagggctggggaagaatcccacacgtgcaattgggtttttctgaagcctgcgggagaccaagctgagtctgcgagacagctgcctccaggacactgcgaggcagggaacagctgcccacaccagccgctgggcgaggccggggcgccaggcctggttcctccatgggaccccagcatgcggngcagcaggtgagggcccggggcggcaggccccagtt

SEQ ID NO: 547 - DNA, 327 bp, Homo sapiens
  Genbank Accession No. AI300447
tttttttttttcaacagctttattgaggtacaatttacatattataaaattcacccactcgaaatatacaactctaaatctacagagttctgcaaccatgaccagaaccaagtgttagaacatttccaccaccccaaaaagctaccttgttccccgtgcatgttttaaactgagtctcaattttctcaactgtaaaatgggaataacagtgcctgcctcatacggttgttatgagcattaaatcaacatgtaaatggcataaggtaatggtcaacaaatgttatctattattattacagtctcttagagtcacttaaatacagactt

SEQ ID NO: 548 - DNA, 618 bp, Homo sapiens
  Genbank Accession No. AI301060
ttttcacaatctgaaattcaaagttccctgggtatcctgtattttcatttgcacactttggcgccctagtcccagagtcctggagtggcatactgggggtggctgtgcagtcccagcatccccaacccagcatgtatagagagcatccatccttacatccagctgacccatgcccatgctcctccctgtggctggaggttcaacaataacataagtctcttctttgccctccagatatttctccctcgagtggctgggaaacttggcaagagaccagaggacccaaatgcagacccttcaagtgaggccaaggcaatggctgtgccctatcttctgagaagaaagttcagtaattccctgaaaagtcaaggtaaagatgatgattcttttgatcggaaatcagtgtaccgaggctcgctgacacagagaaaccccaacgcgaggaaaggaatggccagccacaccttcgcgaaacctgtggtggcccaccagtcctaacgggacaggacagagagacagagcagccctgcactgttttccctccaccacagccatcctgtccctcattggctctgtgctttccactgtacacagtcaccgtcccaatgagagacaaga

SEQ ID NO: 549 - DNA, 427 bp, Homo sapiens
  Genbank Accession No. AI301513
ttttttttttttttttttttttagcaaggaaaattgaggttattttaattgacttgacttacttaaaaggatagggatttatccctgagctagatagattagatagataggatattctttcctagaagtgggcaggtgaacaaaattattgttctaaaagccaggaaaaaggggattatttggtaggaaaccaatagtgtttgctacattacccatcaactaagctgacggttgctatgggcaatgtaagtctgttgttgacaaagcatcggattactttttgattacatctgacaaagctgggaatctattgtttatgcaagatctctcaatttttaaatattagcaatacattcaaaacatgtaaaagtactatgtgtccaatatcaatatcattcagaccaaatatatttgcagtgcaaacatg

SEQ ID NO: 550 - DNA, 464 bp, Homo sapiens
  Genbank Accession No. AI302188
ttttctacaaaaaaaatttttttaattagctgggtgtggtggcacatgcctgtagtcccagccactcgggaggctaaagcaggagatcacttgaacccaggagttcaaggctgcagtgagccatgatcatacaccaccacactccagactgcatgacagagtgaggccctgtctcaaaaaaaaaaaatagaggctgggggtggatcttgggtacctacagtatcacttcttgggataaagcaggaggccctgttctgaaggaacttaccgtttggcctgatggtaagaaccaaatagtcagttatctgtggactatgagaataaagagatagatgtatgtgaaagagctttgtaagctaagatgcttcacccatgttagtccggttaggtgggtttaggctcaaagggacctgtagctgtccttatcttacgtaacaggggccagatctgaggcacaggaagtg

SEQ ID NO: 551 - DNA, 396 bp, Homo sapiens
  Genbank Accession No. AI302387
  unsure (1)..(396): n = a or c or g or t
tttttttgtttgtttgttttttaattaaaaagaaaataagaaaacaaacaacacttcccaggtactcacaaaaacaaggagaaatcccaagagatcacacagagaccccctgtgagggtgggcccaaggcccctcccttgaggccattgttttctcagacaaacatccacctctcctgggctaaaaaaaaggaagcgcttatccaaccttgtttctcttggaagattcagccatctccagctcactggtccatgacatgcacacaggaaactgggctttacaagattttacagatgggcagtgctggggtgggaggatttangggtacacaccactcctctcactgatccctggatctgctcaagggttctggagggctggggagcaatgctgtct

SEQ ID NO: 552 - DNA, 397 bp, Homo sapiens
  Genbank Accession No. AI306471
ttttttttttttttttttttccttaggcacgatatttattgaacaccggctgcctagcacaagctgtacctgtgaatacaaagaaagccgaatgatacagcccttacctttgaggaacatgcatttgcaatccctggggcacagaggccaagagcaggccgtccctaacaatgttcttgcctcaagcccagtagagatggaagcctcaggacagctccttctttaacgcaaaggggttggtaactctagttccaggctcccaatactgcagtgaaaaggaattttgtcctatctgaatagatatatgttttttagacaaacaggtatcatattctaagggccagaaatatcagctttgtgaaaatacagtccaaacaagtcattttcccatggaaat

SEQ ID NO: 553 - DNA, 622 bp, Homo sapiens
  Genbank Accession No. AI307808
  unsure (1)..(622): n = a or c or g or t
ttttttcacttgcgaaagattatttattgcacaatttatcagtgggtactaagaataacacagatcctattattctcaacctctaaattcagtacatagtaaaattcattttctcaaactaaggttctatacataatcggagtaaaccctctgttactgagttaggatagggaaaacaaattccttagagttcatgaaaccacttcacaaatcctagaaggcacacattatatttcctatcatagtaagtacatttaagtacttcatatttaaaaaagacaaagctgtacagaatacaaaaagngtaatttgagtccattaagcaaatttacaacttttacgattagttattacagtagaactgacctaacattcacatctaaataattatcacccagttcaatagagcgaacaaagagctgtgctcatttatttatttgataaggctaataacattttatattcacagtagatcagtaagtgtcttggagctcatattgtaaaataaaaaggtttgggccctattgagtcactgggctcattgttaaataactccttgaaaggtgaaggattctgggggataaaatcattggctatccctggaaagatccaaaactctgta

SEQ ID NO: 554 - DNA, 205 bp, Homo sapiens
  Genbank Accession No. AI308063
tttacaataaactctatattgtgcacatggagacctggagatgtgccgacttcctgttcccaaagccaatcttccccgccaaggagactgaggatttcagggctcagagttaccgcaggaatcgagttgacaccagggagagaggggggaggaggggaatcggaggggatgggtttaaaaggcagaggggagggagatggaaggg

SEQ ID NO: 555 - DNA, 462 bp, Homo sapiens
  Genbank Accession No. AI308197
ttttttttttttttttgtctttattcatttatttatttattcattcattttgtgcccttctgggaatgaaccaggactatttgaatggaaagagaaaaaaaaaagctgtcatagtttaaaaattggcatatgttctcttccagattaaattcccttggaccttttaatttatgctagaacaagcacttatcttttcttttttttattactaagcccaacacagtgcgtggcatgcagtaactgttcaaataatgtttgtttaattgacgggttttaagctcgataacttagctaagccctttgcacagtctaagcctaatttggaatgctttcagtcttacccaggccaataaaattttcttgcctcatctgaatttcctgcaaatgtgattaattaataagaatcatcaagattaattaataagaaattgatagcaggatgagtaacaggcccagacagtc

SEQ ID NO: 556 - DNA, 424 bp, Homo sapiens
  Genbank Accession No. AI309007
ttttgccataaacaaataggagtttatttttttctcacactctgagtctggaagcaggtgctgctgctgtgggtccaggggctggcatctccgtggttctcttgactgtcattcccactggtgcttcacggctgcaaggtggctgccacagctctgggcattgcctccacctgctcagatcccaccaagaaccggccacctcactccagataaactccagactcttcactgagcccaaaggcaacgagcagaagtgtccagaaatcacacagagctcagcaggtggtgaggcacctggacccgagtcacccagcagctgaacaggccatccctgaggccatgcacgccccggccctgcaggtgtgacggccgaggcttccacgacggggggtgagtgggagctaatatggctggtgaaagcact

SEQ ID NO: 557 - DNA, 450 bp, Homo sapiens
  Genbank Accession No. AI309115
ttttttatacttcaaaagcaattttcctttattaaaagaatgcttataaaaagttcatttcacttctgcgtcatttcttctggtcactcccagctcacttgcagcacttggccttccctctgtaacaggtgccttgaattttggtaaagatcgggcaggcagaatagagacattgccctccactgctgacgcaattgtaatgatcagatctgtggccaaggcctgtgagaaagttaccacctgaggagtgccagcacagggcacgggactggcaggcagctcacctgcggcccccatgtgggacccacttgctgaagccagctgggctcctgagtctggtggggactttgagaacctttatgtctagctaagggattgtaaatacacaaattgtcactctgtatctagctcaaggtttgtaaacacaccaatcagcaccctgtgtctagc

SEQ ID NO: 558 - DNA, 331 bp, Homo sapiens
  Genbank Accession No. AI309223
tttttttttactctgtgggtctttactgaaaactttgccgacccttggtctaaacagatagtcatatgagctaacagttggctaaaggtcctcaactcacaatgccaaaaaaaggactgagttggctttagttgttgtcatgcactgggtaatttaaaaaatcttacaggccagtacaactaaaactcctatttaccttactttggagcaacaatatggaaagtaaaactaggtctgaatatattttatatgttacctggacttctaaaacattggtgattgcttaaatgcgcataagtcaatgtcatttctcaaaacgtttaataaatgc

SEQ ID NO: 559 - DNA, 146 bp, Homo sapiens
  Genbank Accession No. AI312358
gcggccgcctactactatacggctgcgagaagacgacagaaggggaattggaaaagcgcagaagaacccttttggagcaactggatgatgatcaataaattataccaaaaaaaaaaaaaaaaaaaaaaaaaaagtcgtatcgatgt

SEQ ID NO: 560 - DNA, 493 bp, Homo sapiens
  Genbank Accession No. AI312905
gtaggataacagtgtttttaatatttaagtaacaaaacattcaggttaatactcaatgcatatacaataagatagagcaacaacaacaaaattacaaagcacaatctaactatatggaggctttcaaacaattaaatgttggatagagaatgcgctaattaaaaacccagctgagccacaccgcactacctgagacctgaccagggactttctggtggtagaagggagagctcattgtgccctgtggccttcaactcaaatggatgctcttcaactcaaatccagagagcacttaacaaactccatgctctagattgctcaaccctcctccttgcttttcttttttctttagttgacttgtctgctcatcctttacccaaactgaggcagtgagttccacaaatacttcctctggtttggtttaaatgttgctgtctcagtgagaagggcctctgagctcactgctctgactcttgaacacaacttcttattt

SEQ ID NO: 561 - DNA, 504 bp, Homo sapiens
  Genbank Accession No. AI333224
tggtattaaaatgtctgtgattacttatttctcagcattcatctggtaacttaagcagcatgaagcaagagttgcactttaaaaaatgacaagaaaatagctattcatttagtcgacagagtaaggcccatctcatttccaggatcactagtttctgcttatgacggggtgagcatccgccagcgcggtgattgggaggcgcccctgtgtctttaggctgaggcagtgcccatagctgcagtgcctcgagtttccggagcaaccgcggggctctttcttgaggagtcttgggaggggcggtggcctgcctccccatcctagatcagcgaggtcccaagagtgcgtattgctgcggggtagctgtggagtgtagacacgttccggaggtggcttgacatcctgaggctggggtggtgtgaagggaaagaaagaggggcaggtcccgggctttgctggctctgcttctcagggtcaggccaatgggtctgcagagcagtgcagcgg

SEQ ID NO: 562 - DNA, 439 bp, Homo sapiens
  Genbank Accession No. AI334409
ctttgatttaggttttatttgtattttgtatacaaaagattctccaaacaaactaaaattgtttatttcaccacaaactatcaatccagaaaggttgtgggacttttgcacaaccagataagaccgcagccctctaaggatgaacctgcatgaggggaacacaggtccctgccaagcagagtggctccgaaatggcatctctggcaggttttctctccctttctgtcgaaacctgggccttggccaggtgtggtagctaatgcctgtaatctcagctactcaggaggctgaggccagagaatcacttaaacccaggaggtggaggttgtagcgagctgagatgacgccactgcactccagcctgatcgacagagcacgacattgtctcaaaaaaaagacaaaacaattacttgcgcttctcatcatacaaccttatgag

SEQ ID NO: 563 - DNA, 388 bp, Homo sapiens
  Genbank Accession No. AI335277
  unsure (1)..(388): n = a or c or g or t
tttttttagtttggtaaagaaagctgaaatttatttaaaatgactcaggtatctttagaattctcaaaagctgcaggaaataagagtctggtaccctgagaagcatggggcagtagaaagagcatgtgggctttagagttcaaaccaagtcaggctcaaacatagttctgtgataagccctgagcaagttacccgggtcttccatttcccccttctggagaagtcctttggaggatgagtccttctggaggatgagtccttctggaggatgaagtccttctggaggatgagttcgttgtaagaataaaatgagaatgtaagacacctagaggatgcccgagntaaaaatgacagttgctagtagtagtaatttgtagggctcattatc

SEQ ID NO: 564 - DNA, 679 bp, Homo sapiens
  Genbank Accession No. AI337014
  unsure (1)..(679): n = a or c or g or t
tactatagcctggactattttagagtttatgacactcagctgtccagttacacggtctgtattccacagggatatggacaacatgccctcacatacacacacgcgcacccactcccaccctctggcacccatcctcccctgcgctgtgcacgagggagcagcccaagaggcgctgtcctctccgtggtgctgtggacggagctgcggctctctcccggctctctccaatgctgggttccattccagctgcactcccagagctgggtcctggtgagcagcagaattcttcgggctccttaggcagctcccaggagcaggctcaggattcccgccacatgtatgcccctcgccaggggccatgaggccaagccccaggcacagagccgcaggagggtgtnccacagaatgcctgtcaacatgcttgagaagagcatggctgggaagtagtggtggaagtagaggacccggcccatcaggaaaaacgggaagtaatggagtgtccagccgagcaggacctggccgcctcctcgaagcaggacctgggacaaccctgcaacctccgctggcagccgtgcccctctctgcatggctacagcaatgatgctcncctgagagagtagagggcgatgctcaacagattcagccaccanacccaccggttgccaagcagatagactcg

SEQ ID NO: 565 - DNA, 925 bp, Homo sapiens
  Genbank Accession No. AI337192
  unsure (1)..(925): n = a or c or g or t
ctattaatctttatttatatgatggttctctggaaagcacttcattttaaaacctgtttctgagataagtagcataaggcgcatttgaagaaatactattgttgtatcacagagaacttccatgccttgaaatcatttttttcagagtattattaataagatggtctagctatgcagagcaaaaaagaaaaaaaatcttcaaaagccaagactgtcaggcacatgaaggtatgcataaacggtcttcacatttaattttgtatgattcgggagatacctccatgtacatctaaccaggtcaggcagcataagtcctcagtaaccctgggtgtgccggcttcaagccaaagtattctgttgagtttggtttgtggagagacatttgaaatgttgcttcatagcttccattttctggagaagtggaagaaatgaagcatgaaaaggcctaggaatcttcgtcttctccaggctcttctccttctgcagtttcttcctcctcctcggcttccacttccgcaccctccatggctatttcttccgtctcttctgtggctgtctctccttcttcttcattcttctcctgggcttcanggaagttgcccacatcttcactgccctctttttgtgcctcagtttctccaccttcttcagccttctctgatccctttgagtctggaagaggagcccaaccaagggaaggaataaataatattctcttcttttgcagagaagaaagagtcaaaatccccacagtactggctcctcattgaagaatctgggagggcaaaggaatcccatttttgaggtttttctcttcaggaaacattctcttctatccacacttctgctttatctccaagcaatccaattcccttaaagccaattaattcgcttccaaaaaaccaaatactttctgctggttctt

SEQ ID NO: 566 - DNA, 484 bp, Homo sapiens
  Genbank Accession No. AI337231
aacaaaaccaaaaaagccattttattgaaaattaaattcaaacttcaaattaatattacaatcatgagaaaaatgccaaataattcaatttacagttgcaacatacaatacaaatagtccctttgaagttaagagtaaactcatccacaatcatgacctgtggcacaaagcggaatttttacaatatgtgcatggaaagcaattcttgggcaatagcaattggaaaaaataaaaatgaaagcttgtatttacacaaaatgctacaaatatttttgttccacagaaacctaagaatggtaaagcatatccaaaagaaatggaattttattcagaatacctaagaaattattgtaagttatggttttggctgatatatttcaaagtactgcattaaaaagcaaacagttatttgtaaacatgaagtaaacacacatctaaaaaattctcacatagaaaatatttttaaatgcattcgttttctaaa

SEQ ID NO: 567 - DNA, 476 bp, Homo sapiens
  Genbank Accession No. AI339743
acataaaacatcataaatctggaacagatttactatatctgaattctaaaaagttcctatagaatggtgctgggattctgttctctgcttgcttttaggcagtgctgttgcttaaaagttgacaccaggcacaatattttaaaacaaaatcaacgagcaaggagcagtaggtggatctgagcctttcccagatgtcaggcctgaggatgctgcaatattccccatcaaaatgtgtaaagctatgaggtggatactgatgcctgagagagtgggtgacttgacatgcacttgtatgactgtaataatggcaaacagtacagttttctcttcctcaaacaatactgttttagtaaattttaagaacattccggttcttagacaaatatcgaaataatatttaacagttttaaaaaaacatgtatcacattctaaaaatgcccagattttcttttatcttctgattaaaatatgcagca

SEQ ID NO: 568 - DNA, 257 bp, Homo sapiens
  Genbank Accession No. AI341166
acaaattgcagtttattaaggctccagagtgattaatggcacttggttctgggcaggggcaggggcaggggtgtcagtggaacccaaaggagctgggtccaaacatgttggagggacctcctccatccccctacccccaataaataaagtctcagctccatctcagggtgcctcgctgctttcctggaaagctcgattgttctgcggaaggagagctgtgagttggcgccgggttaacatctacacacagatgcgca

SEQ ID NO: 569 - DNA, 461 bp, Homo sapiens
  Genbank Accession No. AI341602
caggcgtgccactgggcatttattcacacggagcagcgtggtcctcagtgccccgctggccagcaggcacacagggcacggcgctctgcctgcagcagtagggtctccgtccgcgcgtccaggctgcaggctgtcttccgcaggtcctgcagggcgcgctgcatgaactcgaaggcgtggcagtccacgcatgggcggctctgcgcggggacggcactcccggcgggctcggcgcgggcccgggcgcccagcagcgccagactcagcagcagcagcagcagcagcggcggcggcggtgacatcggggaccggcacgcgggcgggggggccatggccagcagagggagcggggccgccctccggttccccgactccagtccgccggtctccgggcccagcgagcctctagtccgcgccccgtatctagaaaacgcccattcggacgcccgcaccaccgccct

SEQ ID NO: 570 - DNA, 471 bp, Homo sapiens
  Genbank Accession No. AI342616
agagatggaggccatcctggccaacatggtgaaaccccatctctactaaaaatacaaaaatgagctgggcatggtggcgtgtgcctgtagtcccagctactcaggaggctgaagcaggaaaatcgcttgaacccgtgaggcagaggttgcagtgagccaagatcgcgccagcctggcgacagagtgagactccgtctcaaaaaaaaaaaaaaaaaaagtaaagaaaagaaacaatctctctcagggtccagaagcttcagggcgtgtcccagctcaggctctgcagcctgggccagggaggaggtggagggacacgtgggcccctctggaacccctcaggaagccccctcggcaggagtgctgaacgcgaggtgcgtggtgtatcttctcacactccctgcctcctctgggcctgatagggaagtgctcctgcagctgttgaagcaggtgtatatgagcacagccaggagg

SEQ ID NO: 571 - DNA, 449 bp, Homo sapiens
  Genbank Accession No. AI344053
acttttttgcccttattgttcttgctttgtcccaagtagatgcaaatgttgtgcaaaccaacttgatcttaagatgttgttgagaacactggagtcacgtgtccatgggtccttcaggctggcttttgatgggagctgggatgcagatgatttacggagggttataatctgtgatgctggtctgaagtctgaatattccaagttgctgactgcaggcagagcctcatgtcctcctggcgctcctgttgccgctgcttgcgctggccctcgggtcgaccctggcccgaagcagcccgcaggcggcgctccctgcaccggagccggccttcctgccttggggcccgatcgcttttcttctgagaattggagtagaacatgatgaaaagcataatcatttggataaagggcagcagggggcagaagaagatgccaatcctgtgagggagaga

SEQ ID NO: 572 - DNA, 578 bp, Homo sapiens
  Genbank Accession No. AI344312
  unsure (1)..(578): n = a or c or g or t
aggagacagcattctttaatcatgctggacggcagggcgtggcggggtcaggcaggggcaggatcaggcagggtggtttatagcacaggtcttcctggcacttggtcagaccctgtttccgtcatctggccatggagccacggctccctcggctgtgagcaccagagatcaccccccggggcacctcagccccagagtctgcatgagcaccaatgggcggaggccgcctccctctggggagaagggcaggccacctgggtttggaaggctaggggaacaccaggccaccccaccctggaagaagaaacggaaggcctgaggtccctcctttgctctagctccccagacctgctgagggctctaaagcctgnggcttccgtggcccttctcctgcaggtgtttgtaaaggcagcaccaggccggaggagggctctgagacgaggagctgcccacccgggccttagcaccttgataaagcctggagagtcggngcactgggccggtgagaggggcatgaggggcagagagcacctgnggacagacatcagtgtctgagggcagctggaggccctgnggaa

SEQ ID NO: 573 - DNA, 501 bp, Homo sapiens
  Genbank Accession No. AI344345
tgaagtttaagacatttttattaataaaaaagtacaataattaaactgaacaagattgcttagtccccaagcacacaccctgcatggatgccatagtggagggtctctgaagtagaacagagtaatctctaagtggccatgctaacagaggcaaatcttgagtatctccaggtgcataacagacttgtttatgagagattgctcatgattctagcctcaaagccatgcctctggagcaagaactagtataaaatagaggaaaaacaaggtgttgctctaaagcactaaaataatggggcacaaacataagagttacagagactaaagcttaatatactggcttattatttattttaaccaacctaccattgacaaaaaatccaactgatcctttcactgcaggctcctttccccaacacaaaaaagagaaccagtttctggcactgctcacctgtgtgactgcctgtcaaaaacagggatggacaccactaggaactctct

SEQ ID NO: 574 - DNA, 796 bp, Homo sapiens
  Genbank Accession No. AI345945
aaaaaaaccatgaatcatttattctttggttgtctacacagacacttaagtactgtatcgctgttatgcagcggcctgtggaggcccctgggggtggctgggcctgtgtcctgagccctcagccagatccagggggtgcggtgtctggtcatgtccactccaagagcagtagcaccatgtagaaggctgtgagcagggtcccctcggctgagtggcagatgtaggctcactgctctgcagccccgaggggctggccagctcagagtgcagaagagttcctctccatgggtctagtcacccatccgtctgacctggacgctgtcatagctcatccttgggcttcgattcactgcctgagagagacttttgggcaaggttcgggggggccctgctgggcatccaggggctgctcctgggagaggtccatctcttctgggctgaagagcatcttcaccaggtcatctgcctgcaccctgtcccgctcgagctgctctcacccgctcgctgtgtcgagggtccagggtgaaccacagggcgatggcacagcgctgccccctggtgacagccttcactccatgtggttttcagtgcctgaagagaatcccacggctcttccacactgaggctgcacctctgccgtcacggtcttggcatcccattcagtgaaaataaagtttccgccatcgaagtcctcatttaggtaaaggatggcgctgtattcggcggagggtgtagctgggggctctttgacacacaccaaggtctcggcattcagggatgcagtgttcacgtggac

SEQ ID NO: 575 - DNA, 458 bp, Homo sapiens
  Genbank Accession No. AI346114
tttttttttttatagcattctgtctttagtagtggtatttccatttacaaaacatagtaattctcgatcgctgaaaatgtcaaatcctggaaaatgtagtattcctacacgtgatgttaacatcgttctcaacagttagccgaagattcattcgatgagtccgatttttctgaaagagatgattctgatgattcagatgattctgatgttagttctgtttagaaataactccaagaatagtttttatattttattttcacattgaaaatcagtaagatttgcttcagcctccaagagtgtgtttacgtaaaattaaatgagcgctggcagtgagctgcactttttttttctaaatgggaaaagggttaaactctgcttcttacaataaagctttgtaattttctccaaaaaggtcttgcatatttttattagatttatttctagaaactttatatttt

SEQ ID NO: 576 - DNA, 549 bp, Homo sapiens
  Genbank Accession No. AI346341
tttttttttttttgggtctggaacactttaaaatagttcttaaacaatccatagcctttctatggctccatggtataacataaaagctttaaaaatcttttttgtaccaaatggctgattctcaagaacctttgccatactgagctcctgcctggctcacagcttgaatttcatctctctttcagggtcatgatttctgctattagctggcctctttgtaaatcaacacctttgggaaagatcggaatctaagtaatgacagaaactgtcatttagccgcgaacaagaaaatgggaattcagaaaatgttcggacctccccacattgggggccagctgcccttacattcaaatggagttaggaggaaaacttgagaactgggcgcatgtttctgcttttgagaaactgcccctctttaaggcatgggtatgaagtagccaagtgaaatgctgcaatccataggattctgtgaaaggtcttcatcaagcaataacgtatttagtggctaatgtaaaggatgcagtataaaatattcattatggatatcct

SEQ ID NO: 577 - DNA, 470 bp, Homo sapiens
  Genbank Accession No. AI346446
ttttttttttttttaaatccaaatacaaaagtgtttagaagtttattaaacattttattacacacctgtattgcctaaagtttctataacaaacatcttacattggaacgattttcttgtttttattttctacaaaaaaaaaagcggggggacgttaaaattaagcatagaaatggtggaactttgggatttcctgtccagtcacctgcgagtcaggttttattccaattgattcaacgtggcagattaaatgtgaaaagtaaaatggtgggctcctttaggcagcaagtcttgcttctctcctggttacctctgcctacatagatatttggttaagcaagatgtttatacccccacacatattctagatagttctggtcatgaagtaagtcacaattttccatatctgcacaatttttaaaaaaatggaactacccatctgcacaaaatctttgggagtgcagggtagg

SEQ ID NO: 578 - DNA, 585 bp, Homo sapiens
  Genbank Accession No. AI346656
tttttttttttgagaccctgtctcaaaaaaaaaaaaaaaagtcctgtacttttattttcaggatgacttccgttccttctcatcctccttcccttctcctttctctacacacagtgaagaggtaaaaaatttgaatagtacaacacaaaactaattgaaaattctctccacctttcccaaatcaaccactgatatgagagtgttatgcatttacaacgtgctttctacgtgaagggttgattttttaaatcatctcaaagatgactttgaaaacaagtgtacttctcaaattaattcaaactactgatacttacattttattcccattaaactacacaatttgacttcttcgcttagagactccacacagaccgcccagggaacccgatgactatctgactgagcccaaacaggacctccagaattccaacaagcaatagacctaaaaatactgagaagtggataagcctatgtttgttttcttcagaatcgaagtggaaactagatgctctccagccactcgcatggtgtcgttactggtgggtttattgaaaccagtaggaggtgcacaagagtcattgaaaa

SEQ ID NO: 579 - DNA, 725 bp, Homo sapiens
  Genbank Accession No. AI346914
  unsure (1)..(725): n = a or c or g or t
tttttatgtacacaatggtttattaaaggaatgtatggcccacatcaacctagcaaggattctactggtaaaccttcccatggcaaaggaaaaacaagcaggagttgagtggctggggtggggtgcaggcaatggagagagggcagaagggtgtagaagctgaagggggctagaagcttactcctgagtttcttccttctgtcttcaaatctttacttcttatggccaaagacccagctgtttcataggctggagatgcactcttctagactgctcgagacagccagagacaggggaggagggaagaaggatactgtggaaagggatggcggggcaaacatttanagctagaagccactactgggcccaatgctaaagtttctgtctctaagcctaaaaaagccagtgtagtagggcccttatcactcttagtttgctaggtttcccctctgaaataatgagcagatttagccaggctagcagaaaggaagaggacggngctgtgcaggagttagcagaatcttgattcttgctctatggtcggtacttgcacaggaagtgttggcgcttgttgcattcgttgctgctccaagttaaaaagtgttattggagctcatctcagcacaagtcttgttcccacccatggacttgccagaaccagatctgtacagatacatggccccatcaatccactgccactgctgcctcttcttggggtcgtgcag

SEQ ID NO: 580 - DNA, 535 bp, Homo sapiens
  Genbank Accession No. AI347165
  unsure (1)..(535): n = a or c or g or t
ggagaaagctgctttctggagcagtttcagttttatttttgtatttaaggctgaaggacagtttcaataaacatgcttcttcccagagggatttcaaagaaagatcgtttttgcatgtcatatagggggagaatgaggacatgagacaccaagaagatgaagttttcaggagcagaggagaaactttacaccaacatgtctgaacttcattgactcactacctggagccattttttagctgttgagttaagaaacagaaaaaggagcctggggcttctgactctttcaccaggcttaggggagtgagaggagggtttagacacgggtagggcctcttggccccttggntgcagccccgctgagccatctcctcctttggctgggtgactcctttctgctgccttgacaactcctggaggagaaacagatggggcctctgggctcctcccagccctgtagggtggggctcctgccctccttcttgaagtttacctgttgctgccacaagttctgctcccttcgtctttcctttgaa

SEQ ID NO: 581 - DNA, 420 bp, Homo sapiens
  Genbank Accession No. AI348900
gagaagacgacagaagggcaggacctgaacgctgtctgcttccctggaatccaagatgctgagtggaagtggaccctgggtgggcccggccctgtctttttcaggaaaattacatcctcccatggaggatgagagactgaggctcagggagggcaaggaataggcccaagatcacttggcaagctgggcacccaggacccccaggtgcttgacagagtcaccccatggtggtatggctgaacaaggagcggcagacaactcagggagaaactcaggagtgcagtaccagggacacctcaggacagattctctggccaggcccttccctgacccaataaatcctgaagaggcaaaaaaaaaaaaaaaaaaaaaaaaaaaaaaagtcgtatcgatgtcgagcgatcatgatgatgatgatgt

SEQ ID NO: 582 - DNA, 114 bp, Homo sapiens
  Genbank Accession No. AI349119
gcggccgcctacttactactatacggctgcgagaagacgacagaaggggacgtgcacctgagctcaattgctaaaaaaaaaaaaaaaaaaaaaaaaaaaaaaaagtcgtatcga

SEQ ID NO: 583 - DNA, 460 bp, Homo sapiens
  Genbank Accession No. AI355709
tttttcccatagaaaaaccctttgttacatttattgcttttcatggaaacaattacgtgatacacacttgaagtagaggtttataagttctagttctccaatgactgctttccaattaacatcatgtggatatctgtcctttgtgagtgccctggtgcttaataaagcttgtgtgccacttgaaagattttccacatatgacacattggtagggttggcttccagtgtgaatgacctgatgtcgaaaaagattcctcttaaaactaaacgttttcccacattctccacattgaaagaattcctcctttgtatggattctttgatgctgaatgagatccacattcctaccaaaggactgtccacattcactgcatttatgggtgttcggtttactgtgaatctgttgatgacatagaagggttgaatgccggccaaaggcttttccacactcaaggcattt

SEQ ID NO: 584 - DNA, 753 bp, Homo sapiens
  Genbank Accession No. AI356291
tttttttttttttttttttttttcaccgctaagggctttatttcacagatcatgggggggagtttggatttccagccctcaccacggttaagtcacacatttcccgacacctgctcatttttccagatctgaaacatctcacccaacacatcctatttgttgtaaaccccaaatgaactttccagaagcaaaaacaataacagattcagagaaccctggtcacacctgctgagcaggtcccctctactctggttgcatataaaatgcttgtttgctcaaaagagaggcgctctcaacatcaaggcacaaagaaagacgtctccaggggcaaaatgatgacaaagtgaccagcggcctttgcgaggcccgaggcaaagtcacgggggaggcgagttcaccctgacgggcattgggaggaagagccaaggacaggtctcccgctggggctcaggcgtcctcacgcgtacttctccaggaagttgatgtggaagtctttcaccttctgcagcaccgttttcagcttctccactggagggaggatagtcatcctgaagtggtaagtgccttccctctgccaaaagccactgccgggcacgacacagatgccagtctcctccaggagcttcatgcataaaacatgtctggagccatttgagggccctgacagccttcacagctttggcaggatgaagatcccgaggaagcgtacatggcccactgccaggggttgcagggaattcctggggactggtt

SEQ ID NO: 585 - DNA, 405 bp, Homo sapiens
  Genbank Accession No. AI357616
tttttttttttttttttttttttttttttttttttttttgggggggagctagctgaggttttattttggaccaaaaaaaaaccacaattggtttctagctggaagcatgggcaaggggggtccccagacagtaaactcccccacgggtgggttgagcctcaggtggggggtctcctgttgtctgggcttccccacacagcagcctccctcctggagtctggggcagccacgggaggggcagactaggaggagctgccacagttgttcacttgggcaggaagtcagaggactcagacaccagcttcccatcgcgggtctcgatcttcttcacaaccacggccctggtggagctggtgcacctgaaggagctgaagcctgtgccagagccaaagctggagcccaggc

SEQ ID NO: 586 - DNA, 485 bp, Homo sapiens
  Genbank Accession No. AI360231
  unsure (1)..(485): n = a or c or g or t
ggccgggccaccagggtgcggctttccgctctggagagtttatggcccctgtcgtgggacggctgcgcagccgccagggagggactgcagggaccgcggctgggacaggctgctgcgccaggcggccctggaccgccgcttctgcccctaagccgccctcgcagcccaggtgaccggtttgtcctacccggggagcatcgccctcctccgccgggcccgagcccggcgtgggggttgtaggccggcaccacagcgtgaggacaccgcgacctctgcccccgggagcgcgctgaatgccaggtggggctgctgtcgcaggccttggagccgcagccccgctgaatggcagggtcaggctgggcgtcggggtcctggcagagaccgcggcgagggccggagcaggtgcactggccgctgcacacgcgccgctaggctcccggacaccgctggcgcgccccctggtggcagccggctcangagccgcg

SEQ ID NO: 587 - DNA, 541 bp, Homo sapiens
  Genbank Accession No. AI361798
gcggccgcgtggccgcaactcgctccagtactcaggactccctcgtggagcccttggtgtgtcgcctgcaggttctttttttgaagaaagcagggagtgaacggccttgtgagacgactccaggagcaaagggcgactctcacaagacccaagtcctcctagagcacaggaaagtgtcgcttcaggtcgaagaagggagagaaagcagctttccgcatctgcatggttgtctagtggctaggattcggtgctgaaagcgccacggcccgggttcgattcccggtcagggaattgttttgcactggccgccctcccgcagaaatcttcctttaccacgctgtcagccggcctgctccaagggccagatgtagaacagcctccgcagcgaggggcaaacccgggcaaaggagggcaagtcggggtgggccaactctcaccgttatctccgtgtctgtcatccgcagaagcggctttagagagcgactgagcgtctcgctcaggtgtacacagccgtgcagaggccagtccccgtggagctgca

SEQ ID NO: 588 - DNA, 388 bp, Homo sapiens
  Genbank Accession No. AI362920
  unsure (1)..(388): n = a or c or g or t
acctgaggaagatctctttattccttccccttcccactccccatcaaccagggtggcgaagaggggagaaagagaagagatggaacatgcaaaggccaggagcgaagcgggagaccacccaggagacagaaggagggcagaggctgggagaagaacaggaacagacaggatggggtcctgattgttggaaaagacagggaggccaatcccagccttgcaaatagcagcagctagaggttatttccagaaaaatctgcaaagtaaatacactgatcacccaactcccatatctctttgctgctctctgtggaagactcagacaaaccccaagaatgaatggccacagggccagngcaatggtggaaagggaggggcctcacctggcctt

SEQ ID NO: 589 - DNA, 291 bp, Homo sapiens
  Genbank Accession No. AI365208
  unsure (1)..(291): n = a or c or g or t
ggcttagataaaacacaaatttattcttacagttctgtagtttagaagtctgacacaagtttcgctgggctaaaaatcaaggtatcggcaggcctgttttcttctctggagtttctaaaagaaaatccgcttccttgcctcttcgctgctagaagccacctagactcgtcagtctgtgatctctccctccatcttcaatgccagcaatgttgcatctgcctgaaattctcctactcctatctctaacacacttctctctcactcttccattnttaatggcaccctcggccc

SEQ ID NO: 590 - DNA, 759 bp, Homo sapiens
  Genbank Accession No. AI368415
  unsure (1)..(759): n = a or c or g or t
agcatttttaaattttattatgacttcatttgtttaaatatatatatatatatatatatatatatatatttatttatttatagctctatgtgcccaccgcccccggccccctccccggcccctagtttttccccctggctttctgtctagtggctgtgtagggcagaaccgtctgcgtgctcttgtctgacactgtctgggtgctgctgttcctcgtgacccttcgagtctgttcaggggccaaggtagagcctgagtggcggctggtcagtggagagcgccgtgacttgtagggggctggnggagggctttgggggggcctgcatgggcctctgtatgggcaggctcagggggcaagcccacttcttcctcctccacctnctgctccaccgtccccctcctncatcgtcacagcacagagcatggggtagagcaccctttggtcacttgaaccgcacccctctccccgtgtccccttgggggttccggctgggggcccagctgggctcttcaaccccgtgggggcccagcaaccaaagggcttccctggngaggggagtttttgggggggtctcccacctcgtggccatggggngatagggggggccgtgccaccaattctgaaggggccggaaantcaaggggccagncccctgggncccgattcgactcgggaaccatccccggagtcaaggggntggggaagaaaccctcccgggaaggcaccctcgggcccgaaattctttggcctttcgaggc

SEQ ID NO: 591 - DNA, 215 bp, Homo sapiens
  Genbank Accession No. AI369347
ttttttttttccgaagatttttctttaatgaaaaggattcgtttttccaaattctatttccaaagccgaggagattgccgggctggagcgcatcgttggtgacgcttgcccgtcggaccctggcagcggctggaggaggctcagcccatcggtccgtccggaggggcttgcgggaggggttggtttgtttgggatttaggggttggttgaggatt

SEQ ID NO: 592 - DNA, 484 bp, Homo sapiens
  Genbank Accession No. AI371042
atttatttatttagtgtgtggagacagagtttcgctcttgttgccccaggctggagtgcaatggcgcaatctcggctcactgcaacctccacatccacctcccaggttcaagcgattctcctgcctcagcctcctgagtagctgaactacaggcatgcgccaccacgcccggctgattttgtatttctagtagagacggggtttctccatgttggtcgggctgctcttgaactcctgacctcaggtgatccgctcgcctcggcctcccagagtgctgggattacaggcatgagctactgcgcccgacctagcatttatctttttaaacagttctagacacctctttcctggccagcccccatggagtatttcagagtcaaaagaacaggggtctggcttgtatgttttccacctcacagaggtggctgcaaattcctctaggtgttcagcaaggtgtttgactttctaggctgctcgcttacca

SEQ ID NO: 593 - DNA, 474 bp, Homo sapiens
  Genbank Accession No. AI375018
ttttcatgaataacataaccctttctggtacatttggtatacagaattacatgttaaatagaaacctgaaactttagtgaaaccctaaaaaacaaaaaatcctgaactaatggatatggacaattccgcaactttagaagagacttcggatagaatggaagaaggcaggctcaccctaagtagctcccagcttgaattaacactgacatttaaaaatatttagcaaagacaaacataaaattcagacaaaatgatgctgataattatgaaggcatttatatttttattccaccaataattttaaagctagcttgtttagtaaagttatactttaagtcacatgaacttgaaaattgcttagacttacttatgagtgctcttttacttataagccaatttggtagacataacatataacagtaagtgtacatgcaaataaagacatctagacatgtatacacacacataaatgaa

SEQ ID NO: 594 - DNA, 458 bp, Homo sapiens
  Genbank Accession No. AI375142
ttttttgacgtaatacatagatagatttttattactaaataccacgtgagtatacaaaatgcatcactgaataacagctaaaaaaagtccaagaaatgtgaaatacacattttttgaaatgataaaaacatatccatgaaaaatataaaatgttgcatatatatacagtatatttatatatatatataacaaatgaaaatcgtaaataagaaatgtatacaacagtgagtggcaaggcagtagttttacacagcggtcactttgttccagtcgatcgttagtgctatttacatcctgcgctgaggaagtctgagaaagagactccaatatagtgtcttttaaaagtcatttgcactgaaaatcaagagttttcaagttaactgaccaaaggttgagaaatcctttgtctgaagttgaaggaagacagagagtgggggccgcaccagcttgcgtggtgc

SEQ ID NO: 595 - DNA, 435 bp, Homo sapiens
  Genbank Accession No. AI375662
ttttttagatataagattgacttgggactgacttatagcatcataaggtccaggctgtataaaactgctcccttacagacacattggaaaggagacaacagaacagagattctggccctctgggagtttaatttcatggtaccccagtgcatctggactgttttccagcaaaaacaatatagacatcctgtgtgtgcattgtgtgtgtttatgtctgtgtgtttaaatatctgatcatttgtttaaggagcagggaggtgaaatgaacatatgacaactttctctcttctttcccattttggtgttttgttttgtttttgctttactatggcacagaacaccagcttggccaaccaaactcttgctccatggaatgtgaattctgaacctatgactcaaaggtggaaatgggctggagtaggtccatttcacaat

SEQ ID NO: 596 - DNA, 407 bp, Homo sapiens
  Genbank Accession No. AI375700
ttttttatggctataacatttatttaatccagtattactgaatataacatcttgcacaatgtttggtttattctaagaaactcttagcattacaatttctgggttaaaaattatgtatatttttaaaaatcaggaaaaagataattacccattggtattttgacatttcttccagcatgggatgattgcgtctccactgatttaagttttataacatttttcatgtgtaggccttcagttcatttgaggggatttaatatcattttagtcaacaattctttctttcaactactttacaaaaaaaacttttcttgtggggatttcaagacttaggcaaaatggaacagtacagaaacccccctacctgtggttttgctttccttgtttcagttactcttgatcaactg

SEQ ID NO: 597 - DNA, 474 bp, Homo sapiens
  Genbank Accession No. AI377305
gtactttaattttttttattttttcaataaagggacaaaatgggtgtatgaacaggttaatgcagacaactgccaaaaaaacacagacagtggtttttccaatagaacttaacaaagaccagaaacaaatacaataaaaagccaggttgtaatgacctttggtcatctaaataaaaaaaaaaataaaaacaaagaaaaataaaagatcaaattaagtgcctctgttttgaacagggcacataagcaataataaatagtgactcccatagtaaaagataaaatttcaagttacgacaaacagctttcattacaggaatagaaaaggccaataacaaaatattctgcattgccatttacaaaaaagtattgactaaagcgggctttctctttaatatgctttgcatatgaaattctttccaatctaaatataaagcaccatttagtttttggcaatgaaaaaaactgcaaaacatt

SEQ ID NO: 598 - DNA, 429 bp, Homo sapiens
  Genbank Accession No. AI377752
tttttactatgcttaacgtttatttctgtgtctttggttttaagagtaaattctagttaacatgaccttcagaaactcctggaaacatctgaggcgcagtggggtggaacaaggaaaaaggtccttagacttcagcgtcagtttgtggaggtctcagtcctgttggccttgacagacttggtgactcaggaccacgctgactagggctccttcaaggccctgagctgatgtcctgtgtccttggaggctgagaagggctggtgggctctgaaagcacaggaaaggggcaatccggggtggcgtcatggaatgggtgtggtctaagccaggtctccagataagggcattctgcctcttccttctcttgtcgcctctcacatttcttgcagtttatcttgtcagagtgagctgtgccttgctccagccttg

SEQ ID NO: 599 - DNA, 481 bp, Homo sapiens
  Genbank Accession No. AI378647
ttttttgcatttaaaattgttttttattgttttgttgggcagtatgaaatatacagtcaaggcagattcgtacagacttgtaaagtcatctcaggaatcttttatgcttaaagtttcctcagccccatttatattcactactatcattcactctttaccactaatatcttccctgctgtctaatcactaatatcttccctcctgtctaatcactaatgtcttccttcctgtctaatcactgagttaagggaaaaatagtcatttacttacaggaatataatgggtattaataacaaaattccatttccccattaaaagctatgtctaagaaaaaaaatagtggaggcattatttaaaacttctaaatggcctggtgagtatagtcttagtttagcttccttacttttttgtatgcccaacctgaaatgatgtcatcccgtatcatcacagtatgttgctttttcagtacgaagttaatggg

SEQ ID NO: 600 - DNA, 527 bp, Homo sapiens
  Genbank Accession No. AI378979
  unsure (1)..(527): n = a or c or g or t
tttttttttttcaaagaaacactagcaatttattgattttctctatttccaaaaaaagcaaatacattagtgtatcacacaaggaaactgggcctggccggcacaaggttcctctacaaacatgaagcaaggggaaggtgggctacagggaagctccaagatccctcacagaagcccccggtttcccttccctgcccaccccagccgcagttttggtcctcccagccagttcagccagattccaaggtggacacgcagacagcaacactgcctcttgcccatgaggttcaggtaggtgcggatggcatctgaatggtacaaccagccgctgcccttggggttggtcttttcctcaggcagggggcagtcatagttgttgttcatcatcttgtcgctcttgttgctgaagcagccagtggaggacttctcggtgtaggcgttgcgggcgttatactccanctggcgtagcgggtgggacatcggcgtccaggcggaggagagtttggcaaaacacacatgcagttttc

SEQ ID NO: 601 - DNA, 473 bp, Homo sapiens
  Genbank Accession No. AI379186
gaacggtagtttctgttattattgtcactgaacacgttgattgactgtgacacaaattccacctctttacccagaatctcccacctgtgagcttagtgaggcccagtctcagcatccagtgtgattctcccagcaccagggccggtggacttcaccttctccagtcacagatggggctaccaagtcacataggggtctgctggggcttccataagaaaataccactgcctcagaggcttcaacagcagaaacttatttttccacagttcaggaggctggaagttcaaaatcaaggtgttggcagatttgtttgttcttgaggcctttctccttggcttggggatggccgccttctcgctgggtcctcacgtggtctttcctgtgtgtgcacagcccgggtgcttcctgtacatgctcgtctctcagagtcctccaatccttgcatctattgctggctccctgatggctggctg

SEQ ID NO: 602 - DNA, 472 bp, Homo sapiens
  Genbank Accession No. AI379425
ttttaataagacaaggtatttttatattgtccaggcaggtcttgaactcctaggctcaagccatcttcgcacctcagcctcctgagtagctggaacaatgggaacatgccaccacacccaggttgcttagtaatttttatggtgtattagacattttggatgataagctgtagagagtttggatttgttctcctcctcttaagagtatgtagttttttaataaaaggtaaataaattattggtggttcaccttgttcacacaaaggcttatcccactcaatgtccaggtcctccggcagcctcaaactcactctcaggccaataagactgtgatttcctgctagagttctatctgtcctgctccctgcagaccagggaatgtcttgagggaaaagccattttaattgtgagtttatcctatgcggtgcccttcatccaaggatgaaaacctttccagtttctagctactttt

SEQ ID NO: 603 - DNA, 443 bp, Homo sapiens
  Genbank Accession No. AI380073
gcgttctcatttttaatgtaataaagttacatacaattagatacataagtagtttcaatgagtccataaacatgggttcatataaacatgtacatttactagacatataggttgagaggtcctagaagtacttataacaccttaacaacacacatatccagtatcacaatttttaattttaacactattctttaacatcggaaataatcaatctttaggaaaaacggctaatcctatgtatgagaaagataatgtagaaaatgaacttagaattaattgtaatatcaggaaacagggaagtgttcaaaaacaaaaggatgaggtgtgctgtaaggatgcaggatccaaactaaatgagctcctagcacctaataaagcggtggtgacatgaacaataaaatgaatgatgtagcaaggatcatcttcagagcatgaaatagaca

SEQ ID NO: 604 - DNA, 544 bp, Homo sapiens
  Genbank Accession No. AI381790
  unsure (1)..(544): n = a or c or g or t
gtgggaacgtgaattttaatgagggggcagaccgaggaggtggtggctgcccggagatcagggccaggctgtgctagatggcgcctggaaggggggtcacccaagtctccctgctgtcatttcaggaggccgacccaagtctccctgctgtcatttcaggaggccgaattttttcccaatcccaagaaggtgtcagaggcctggttagcagtcttgtcgatggtttcctggggtggtcttggccagctggtccatggctttctgccccgccctctgtggccctggtccaccacttgctgagctgccgctccggccgctgacacgcttcggggggcggtccctcaacctgttgcttttcaggtcctgcaagcccttgcttgcatgcttnnnnnggtaattgnnngggaaagtcgtcagagcactgagnncacgnntnttggatcttggccncaagngggggcgatgccaagcgccagctcccccctcggggcccgaattcttggccctcgaggccaatccccattaaanngaggaggcgtattta

SEQ ID NO: 605 - DNA, 244 bp, Homo sapiens
  Genbank Accession No. AI383679
  unsure (1)..(244): n = a or c or g or t
attaagtaaaccatttattaagaaccatttattaagtaaaaataatgctagctactataacaaataaaatccaaatctcagggacctattgtagcataacaaagatctatttcttacagaggcaaaatttgatgcagttgtatttgtttgggcaattctcctccatagcttccttcaggtgnngaagtcagtgaggatggccccttcatcatgtggtcttgtatctctctcttctgcatccagc

SEQ ID NO: 606 - DNA, 543 bp, Homo sapiens
  Genbank Accession No. AI392817
ttttaagaggcggacacggtacctttaatgattaaggacagccagtaccccgcttcccgggaaagaatcagacttcagtagaaattccccacaccctaaccagccttttctggtttctcctggaccagagttgggggaaagggtgggcttcagagaaaaccaaggagtattctcacctccatcccctacccaacccatgccagagagaatggtgacgacatggccaacacggggctgcagcagccatcatggcacatggtggttatcacagtaccccgtggatcaacaccatgcccactgagacagcagtcatcacagtaagtaatagacccacccagatgttaaccaatgggacaagtgaagtgtcaccagaaggatcaggccccaagagcttcgtggtgtgagctccagccatacccaccaccatgttcccaacccctgctaggatgcattaagcaaagagcgggaatagaggccctggtagtagactccaggctccccaccttcagccctgtagcccccataccccacgtccagttttgg

SEQ ID NO: 607 - DNA, 542 bp, Homo sapiens
  Genbank Accession No. AI392846
tttttttttttacaaaaaaaaattttttattaagtgtgaaagcaaaacaggtacatctatttaaatattttttacatatttatagatacaacaaagacaaataacttagcaaaaattacaagtttaaagaatagtactattttgaaacagccaatatagtatctgaaaatattccattttatccataatcagtgagtattatttccaaaaaaagtaacttgcattttcttgtgaaaaatatggtttttttttagatgtctgccaagatttatcagaaaagtccatctttctaaacctaaaaaattgtaatgcctttattgagaactttttttacctaatggctttaaaaaccacgtgttttcctttggacttaggtgaattctaaatctttacttcactttcaaactacagggcatcgacataaacaaaaacaaatcagattgagagttttgggttgcttttcttcatactgagcgaagaaccttctccctggctgggtgaaagaccatggtgtactgtgatgtccaatctaccacacaggg

SEQ ID NO: 608 - DNA, 614 bp, Homo sapiens
  Genbank Accession No. AI393205
  unsure (1)..(614): n = a or c or g or t
tttctctggacatcttccattttatagaaagggaaattgaggccaggggttggggaggcctggcaaggaacatggtgcatggtaggtggcagaagggacctctgtgctcagagctgtgcctcaggacccatcgttcagatgggaagactgaggttggggaggtgtgtcttgggttaggaagctgggctcggggcaggggtcagcgcgggcatggcaggcacggtgaatgtgaacttctcagtctggacaaaggcaacgcccttctcatagtaggcagcctcgttaatgaacacggggtacaccgtggactctccctcatagagcaggtcctccccactgaacatctggaagatgggagcaccaggctgcagtggctggaagtctcggtcctgcagctgaggatgcacagtgcctgccaggtgcccggcctcggtgcgggggaagtccacgtagcggcggcagccggatgtggctgccgggttggccagcacaggcacagcggagaagctggctctctgcagctctgcggnggcatgcagccagtgccgggccaggtagacgcccgacatctcggtgccatgcgtgcccccagtcaccggcacgcgacgcaaggg

SEQ ID NO: 609 - DNA, 251 bp, Homo sapiens
  Genbank Accession No. AI394117
ctggaaagctcatttatctctttttctttttagaaaaaattcaactgtgttcaaatactccccacttcccttcaccatatcacttctccccccatggatccagaaggctttaaaaactctggcttggatgttacacagaccaacaaccccataacagcccaaccctggatccattcttaggcccaattcagcctcatggggaagagtcttcctccttccttgctccctgagtttcttttcaaagcaacttt

SEQ ID NO: 610 - DNA, 512 bp, Homo sapiens
  Genbank Accession No. AI417537
tttccccaggagctggtttattgaaagctgcttcacgttccaggatcagtcctccatctctcgctgggccacctgatgtctccatcccaggtgtggtgacatgagggtgtgcaggggcagagcttatgttccaaggcctgggtgggcccttgtcccctgcaacacaggccagcgccaacccccacctggtctgggcctgatcaagtggggagaggagcctttgcaggctgaattttcgcagcatggacccctccccccggctggcctgaccttcagggacacacactggcccttatctgaacacagggtgggcggagtccctgccctctccaaggaactgactcactgctgtatctctgtttgctttcatgcctgctgtgctcagctggccctcggaggggaagtgtggccggcgtcagcccgtggccagtacggtgcccgtctgccgcagggtgaatggggtcctgctcacagactttcctgctgggctggcctcctccaggagctgtcct

SEQ ID NO: 611 - DNA, 391 bp, Homo sapiens
  Genbank Accession No. AI417669
  unsure (1)..(391): n = a or c or g or t
atagtaaaataaattatttttatttgatacttcaaaataatatacatctatgaaaaatcaaaattcanaaccaaaaattatccttgcaattggaaagatgagaaacagagtcgctgagcctttcttgaaataacttctgaagaaaatgagttttcccagtttgtttagacagggcatgagcctatccctttcttcttctgggaaacaccctcctaggctgcagtggactntgagtcatgagaggaggacttggtatatgtgccgatggttccgcgatgggtcccattgctgggaatgggtagccgggttccttggtccacctggctagtttttgggaggagtcatgccttctcaggtgtcaatgagcaggctcaccactgagcggattttg

SEQ ID NO: 612 - DNA, 382 bp, Homo sapiens
  Genbank Accession No. AI417773
agtggcactgggtacatttttattctgcttttccttattttcaaaatactttaacaagtgtgctattttcacaattacacaaatttaaataaaaccttcttgaagaaaagaatgaaccagtgaatgacaataacaacaaaaagcataaattgctcatttacagctaccaaaaccaagaaacaagcctgattctgggctttaaagactatggtttagttaaaagaagtttgctatcaatttttactttcatttccttgtgggcacagaacaaggcttgaggctggtgctctcatcaaagctgggaatgaagcctggatcgcctgtgcatcagggaatcagcatgttgtacaggtccagtgattctggagtgatgccagcacag

SEQ ID NO: 613 - DNA, 472 bp, Homo sapiens
  Genbank Accession No. AI418405
tttggggtgagaacatttgaaatttattggcttagcaatttggaaatagacaatacttcattggtaactacagtcaccatgctgtgctgtagatctcaacaaaatatattcttcctgtctcaactaaaacgttgtactctttgacaacatttccccattcctctcaccccctccaaaaacacccattctttatgttgaagagaatggctaaaaagtcccagcaggtttcaactgacggcttcagtggttgtcccatcacacttcaatgttattaataaaaaggggaggggcaatacataattcggacaggctgaaagtaccattgtaaccactttcttgacttcacagaaaaagtcctcttgttttcatctgtaaaatgggaactgcgtgaataccattcttcttttcttcagccggaaagagtgctgttttggaggaggctggggcaagtgtggatggctcgagtgggtcc

SEQ ID NO: 614 - DNA, 473 bp, Homo sapiens
  Genbank Accession No. AI419030
  unsure (1)..(473): n = a or c or g or t
ataccattttgagagtaattttaaagtttaatgcgagagntcgggagcacattgtatatttgaaataagtgtagtgtgtgcaaagaccattttctacctgtggataaaaatcaattcccccaaaggcctaaaagcatgaacaatgtttattttgagtaaataattaaactacatatttaacatggaaaaaattaaatgaatgtcaaaaccaaaattaagaactataagcaaagcatgcagtctctgttaacaaaacttagttgtgaaactacatttttcattttgtaaatgccattatttcatttcataaaatgtaaaaatcctcagtatcattctttacacttgatgcggcaaacacttctttcctattttcctcgtatttcctgcanaataaatctacatctcaagttccttatagttcatactttcttctcaacatatttgagaccttcaggtccaggcctattttctct

SEQ ID NO: 615 - DNA, 429 bp, Homo sapiens
  Genbank Accession No. AI420118
tttttttttgcaatcctcaaaccgtttattgacagcacaaggctcaacagcaggtgagccacgtgagggtggcgagcgcttgcgaggcagtgtgggcaccaggcaggggatcccggagggaagccctctgccagggacatggtgagggcgtggccatcacccacgaagggagcataaataacactggcaggtgggtgttcactcccttgggtccgaagaggattccatagcagggcttgtggcagtagggctggccgtcgtgctccgcgtgcccgccgggggtcagtgtcttcccgcagcgctcgcagcgcaggcagggccggtgccaatccttgcccagagacgtcaccttctcagcgaagtacaccttcttgctgcagcgcgggcacgtgttgggctccccggtgaaagtggtgacactggaggctc

SEQ ID NO: 616 - DNA, 501 bp, Homo sapiens
  Genbank Accession No. AI420234
ttagagaaagagagcactaagttttatttctttgtttttcacagagcaggttaggaaatgctgtacaggttaggaagacctgtattaaagcaatcatttatatcccatagttaactggaaaataattttatacttactttttaaaaagtacttctttttatttattctacatcacttgttaaaaactacaaattgcattttcaaaaactccttcctgatcctatcataatcttttaatatttttaaggtgtcaattaaagattggacatcatcttacataaaatcagggcctaattttcatttcggaaccactacagcctgactttaaagaaaatggctactaaactgaacttttggttctatgcaaaattaaatctaagtaagactcaagttgctaagagcaactttactataacttttactatggctctggctctactgccctctgctggatgatccaccgaactacatcacacaaatcattcttgagagatcttactg

SEQ ID NO: 617 - DNA, 383 bp, Homo sapiens
  Genbank Accession No. AI420969
aagatttgcacatgttcccatttaatgtatattacatatatattatagatcatataatatacattacatattaaatagcagtaaaaagagtaataacagttacaaaggcaaaagagacacagtgcttatctggacatcctggcccatgcaatccttttgaaacaattacctgtgtaaagaaatgtgttggagtgtcctcccaccacgacgtccacacccctcactttctgagcgatgagtttatccatttcaaaacccgaatgtcccagtgcaataattttgttcacatttagagtttttaacttatctacttcaggttgtaatgcagtgatttcatcttcaaacactaaatttgtccctggatttgagagaaaaggggtttc

SEQ ID NO: 618 - DNA, 422 bp, Homo sapiens
  Genbank Accession No. AI421200
ccagacagggtcttgctcagttgcctaggctgcagtgtaatgctttgatctgcaccctcaggctctggggctcaagcagttctcccacctcagcccctcaagtagttgggactacaagcatgcaccaccccatcacacctggctaattttaaaatttttttcataagagatgaggtctcactatataacccagactggtctcaaactcctgggctcaagtgagcctcctgcctcagcctcccagagtgctgggattacaggcatgagccaccacgctcaccctggccaaattataatcttttaacatcaaattgaaaagatataaattattatatgactagtaactaagggtgaagagagaaggttgtaaaatacacacaaaaattttgggacctcttgaagtatgaagtcatatccactgt

SEQ ID NO: 619 - DNA, 465 bp, Homo sapiens
  Genbank Accession No. AI421933
  unsure (1)..(465): n = a or c or g or t
ggctagcttctttcattatgacttaacatatagtcataggtttttacattttttaaatggcttgaaaaacagtatttcatgacacatgaaaatcctatgaaattcacatttcagggtctataaataaagttttattggaacacatccctgttcgtttattgatatactgtctacagctgcttttgtgccatcaaggtagagttgagtcgttgctacagagattatctggctggcaaatcctaaattatttaccatctggtcctttacagtaagcgtttgccagcccccattagcactcttttctttcatcctcatcttttgccatacgtgttactagagatgcggcggggctggcagtttctcaccttaccctcctgttctgtaaaactgtttctctccattgaaacttggaccccctgtgtgtgaaaaactgtatgtggctgccagaaaagccagngcactctt

SEQ ID NO: 620 - DNA, 593 bp, Homo sapiens
  Genbank Accession No. AI422243
  unsure (1)..(593): n = a or c or g or t
agaaatatatattccactttattagttagaaaaaatcatttaagccacatggtggccacaatgtccataacttgagcaggctttggcatcccaccacccccttcagaccaatacacactatgttggaggaacgactttaaaatgtaaaatgagaaatgggcactgaacactccatcctcactcccaacagcccacccacacacctcttcaactgctatccaaacatggaggagctcttgtggaagagaggctcaacaccaaataattgagctaagacattcaagactaaaggaaccccagacagatgtttaggaagtagggttgaaaatatcaccatctcccaacagctgaagttgggacatctaagagatgtcagagccatactgctgaggaaagcatagcatacaccagaccccggggtaagggcgagatcaacctatctcatagccataagcaatccactcacacctgtgcattaaacaggctntttcttttctttttttttgagatgagtcttgcactgggccangctggtacagagtgcatctcgctcactgcacctcgtccccggttcagcaatctcccgctcagct

SEQ ID NO: 621 - DNA, 540 bp, Homo sapiens
  Genbank Accession No. AI422335
  unsure (1)..(540): n = a or c or g or t
agaatactggtgcattttttattaaagaagagaataaagcatttgtaaatatatttctctcacgtatacttcaaaggtgacgctggtctgccactacagagctggggagcagacaggctggagctcttcccccaacccttccacactcctctcccccagataacagacacacacggagggcagggagctgcctagcctcaaaggacaaaagtttcccagttgcacgtacagaaggactcagtcgccaccagctcccatcacagtgccgcccggaaagcaggtggtgtctccaggaggtcagggatgcttggtaagaaaacccctttacccattagaaataaataaggcantgaggttcccaactggatcccggtgcagaggccagggcccccccgccttccactgactgtatggtcttttggttctaaggctaggaagggcgcagaaggaccagagccctganggctgctagggcagctgggaccctggtgctctagctgactgacttctgcatttgagcaaactctgaccagctggtct

SEQ ID NO: 622 - DNA, 509 bp, Homo sapiens
  Genbank Accession No. AI425019
tttttttttcctatttataagtatttattaaaatgttttaatgctttaaggaatatcaaaatttgtgaacagccaaccagtctaaaacgaaaagggctgctaacagtgttatgaatggtgaacaactaaaactctcatacattgctggtaggagtgtaaactggcagaatttactaaagctaaacagaaatataccccgtgactcagcaattccattcctgtatatatacccaacagaaaagataagaatgttcttagcagcattatgcttaacagccccaaactggaaataattcaaatgtccattaacattagaatggatgaataaattctagtatattcatacaaatgcaagagcaatgaaaatgaactcctgctatacataggaacaaagatactacattataaaattaaaaaataatctgcgacgatggggtgaaaacagtggggacctctggaggtggtgagggtcatgggtatcaactgggaacagacacctataggaagcc

SEQ ID NO: 623 - DNA, 517 bp, Homo sapiens
  Genbank Accession No. AI431800
ctttaataatgaaataatttattatttgttaacagttgaacaatacagtttacatatacacagcaaagattctctaaaacatgtagtagtttctaaaaatgcatgtgctaactgtagtaaaaagcaccattctctatgatcttgacacaggatttacattggcgtcatatttacataaagaaacatctggaaacagaatagcataccctttcatctgctgctcccctgtcaggctgtgtgtagcattaggaagatggccccccaaaaatgatggtaacagcaatattccaagagcaccaattctagggatggggtaaaggcaagtttggttgtcaggtaaaagctaaaatgaagaatgctccctcaacttgccaccccacagagagaagaaatcaaaatgtaaaaatctggataaatcttaacattgggtgccttatgaattctcactttatgattttgagagaaggtcaaatactcaatctcttcagccattcaatagctgaatctacagtgcctg

SEQ ID NO: 624 - DNA, 470 bp, Homo sapiens
  Genbank Accession No. AI432375
cagatcttttaaaattttattttataggtagcttcgataaaagcttcagatagacccacatactatacagagtttgtgaaatctacactttcaaatcataatattctctattttaggctattatatttagaagcatgacatctcaaatccttttattacaagtagttcttgcacataaatgttatatcacaatagcaaaaaaatgtaaacttcttttgcaaactacataaatactataatatctaccttgaagttattctcattttaaatcagaatacactctaaatgttttacatagaaaactctcgttggtagcctgtgtgtatgaaacatcattttttctttcttaactacttgtctttcatgttgcctacttaggtctctgaaggagaaaaattcaaaatagaacccagatcaaaaatcagttcacatgtaaggcaggtaccagaaggatgccattaaccttggga

SEQ ID NO: 625 - DNA, 421 bp, Homo sapiens
  Genbank Accession No. AI434477
  unsure (1)..(421): n = a or c or g or t
ttttttttttgagacagtctcactctgtcgcccaggctggagtacggtggcacgacctcggctcactgcaacctctgcctcctgggttcaagtgattctcctgcctcagcctcccaggtagctgggattataggcgtgcgtcaccacacccaactaattttttttctatttttagtagagacagggtttcaccatgttggccaggctggtctcgaactcctgacctcagggatccgcccgcctcggcctcccaagtgctaggattaccagcgtgagccaccatacttggcccataattagctcctaataaccaaggcctggcttacgtctgccttgctcatgctctccccttcagcgagtgcggcttactanatgagtgaatctgattcctgccccacaacccaccaggagcagacacaga

SEQ ID NO: 626 - DNA, 340 bp, Homo sapiens
  Genbank Accession No. AI434675
  unsure (1)..(340): n = a or c or g or t
ttttgcatgtgaatgcacatagtagctttattcatctaggcaagatattgaaagagattgctcaacaggaaagtgtccactcaacaagaaaatgggtaaacaaaccgtggcacatttctacaataaaaccttactcaaaagtgataaaaggaacaaaataccactgcacacaacaaaatggatgcctctcaaaaatattatgttgaatgaaaggtttatacaaagagttcatactgtaaaattctatttattaaaagttctagaactttgggagaccaaggcgggtggattgcctcangtcagtgttcgacaccagcctgaccaatatgatgaaaccctg

SEQ ID NO: 627 - DNA, 933 bp, Homo sapiens
  Genbank Accession No. AI434780
  unsure (1)..(933): n = a or c or g or t
ttttttttttttttttttttttttttttttttttttttttttttttttggagaaaaaaactcaggtttatttgcaagtaaaaaccatggtctgaaaaaaacccattggcaaatgtacagtttgggtccatttggggttcccgccagctgggggggcccccaaatccctgacccaaatgcatggggctcccacatgttcacagttaatttcaggcccctgcagtttaaccccctgcaggggacaccccgtttcctggtgaaaaccattggactcccaggctgcacccagcccttcaaccctcttggcttagtggggtgcaaaaaccaaaccaaacacaatttttaaaacaaagaaacacaaaacaaaaaaattcacaaaaaccagggttttaaattattttttctcaggggccttcgggaacatgaggacttatttggcaacaaactaaaatatacatcattttcttgctttataaaatctcttattattcacagatatataacgggagatttggatgaaataattacaaacttttttccccttaaaaaacaaacaagccaaacaaaacacaaacaaaacaaagaccccaaaaccaaaacacaagacctttctgacgacagtaaacacaggggctggtggcttcctccccgccatcctncgcgcctgctgggccgaagtcggaaagggcttggtgtacccngaacgggaggccccagggtgttttttcaaaggtgactctangttnccctgcccctgcctcactccctcatttnccaggcnttttntcagggcccttttcccccctgcggtcccatnccatgactctnccgnctttttctacacccagaggatacagccaaagggccaggcncacctaaaggaagcctagtcccacgcccccaaganggaccaatttcccaacccanctggcgg

SEQ ID NO: 628 - DNA, 391 bp, Homo sapiens
  Genbank Accession No. AI434862
  unsure (1)..(391): n = a or c or g or t
aattgaactttccacgaattttcctatttaatctttgttacagccttctgaggaaatgcaggcacagaggaagacattcattctttcaaaatcatttgttcaaccaatgcagcggcctactacgagtgtgacatagttctaggtgctggagttcagcgggagccaggtaatttgcctaatagcagtggatttgaagactgttcaagcctggtagcaccagcagaccaggtcggcgcaggcctcagccccgtggcactcacaatcgcctggtgcccgctgggttagactgtggttacaaggtgctggtctggtaggacggctgcggctgggctgttctgtgggctagcctggagctccatctntgcntgcgtgcaggctagcccgctttctg

SEQ ID NO: 629 - DNA, 525 bp, Homo sapiens
  Genbank Accession No. AI436136
tttgtgtatgaaattaaagcctttattaaccttctttgatttgactgttatttctgaaaaggacacattcttgctgatacttgtaacaacctgttcaaagttgtggaaatcaccttctgttggctttctgacatggacttccttgcagcactgttacttcttaaaaggaacagaatggcaaaccagtgtctggccgtagtccccattgattcctgttattttcatctgaggagcctgtgaagctttgcagaggcttctgggtaagtttgtaaacctagcattggccttcactaggctcttgctttgcctcattattaagggttgggagagggagtgaagtagcatatgcatttcatacttgcctttaggtctcaagcctagccccagtggaagtgctgctctcactggtactgtttggaatttgtgaaacctcttaagagggtagtcttgtggaccattcaactctccttcagccctttaacttacccactgagtaaggcagtaaggaaagtatatgtgaaaagg

SEQ ID NO: 630 - DNA, 497 bp, Homo sapiens
  Genbank Accession No. AI436290
  unsure (1)..(497): n = a or c or g or t
aattttaatagtatattttatttaatgcaaaatatccaaaacattatttcaatgtggagtcaatatgaaatattactgagatgttttacatcttcatactgttttctaataatatatgaattattgaatgaagtacgtattttacacttacactgtatcagaatttggactagccacatttcaagtgctcttggacagcacaggtctattattctccaggcctcagtcattttctgaaccaactggaggcaagaaaacgagtgtgtcattgaaatagtgtccaaatgccctgagccggtacaggccatacatcattacttccatcttttggggggtcagtccattgaaagtaatagccatatctgaacagcagccttctactacttgctgagggttattagacaatgcctcttcaataagctgtgcgattggttntgtattaaatacatctcttccttcataatcctctgcattntctgcatgaactcctgcatatt

SEQ ID NO: 631 - DNA, 508 bp, Homo sapiens
  Genbank Accession No. AI436813
ctaattgcaatgggaagccactcaaagggctttaagcagggaagtgacattatctgattttcgttttataaagatccctgcggctgccgtcagtgattgtaggagggcaggagtggatgcaaggacagcagacattagtgcaggagttcaggtgaaagatgataatagcttggacagagtggtagcagtggacatggagggaggtagacagatttaagatgtctcggagacagctgatggaatttgctgataactggaatgggagtgacaatgacaaataaaggaacctagaataagccccagaattttgcttaagcaactgagagttcagccatggcagatctgttaagcacaaaagttaaaacaaatacaaattcatactgcattggactcttttaagcagtgtcttatagaaaaaacattttatctagggaaaaatgcaacaacaaaaaccactgaaaacaaaagcctatgaataaaagcagacccgttttagactggatgcaca

SEQ ID NO: 632 - DNA, 461 bp, Homo sapiens
  Genbank Accession No. AI440266
ttttttttttttttttttggggtaatggaaatgacaaaaatgggctgtctttatttttggaaaaaaaaagaaaaagaaaaaaccaaaactcaaccaaataggtgatagcaacattattttcaaacacattgattgaaaattctagtccagataacagaataggagtggtacttgtggtctccagatatattccactgtcagacaaaaatacttttcttcattgaagtacgcattatgtaacactgtgtatcagatgaccttagccatagagttggtctttagagcttcttcttttggtcaacaaagccatccattgcatgaaggatgcccaaatagtcagctataagcagtcctgtcttgaggggcaaaaagcttttaagaaacatcatgaagtataacaacttttgcatatacaagtacattttttcttgtagaatagcttctactattttttcaactgg

SEQ ID NO: 633 - DNA, 545 bp, Homo sapiens
  Genbank Accession No. AI445492
tttttttttttttaaaggccagaaacaaactttaattcccaagccggacccttaagtcacaaggaacgtcagatccggctcactccctgacagggtgaattggaaactggcccctacttggtctctaaccccttccactgggtctagtggggactctgacgccgaacaggggctgtagatcagtgagtgtgtatgtgtgtgtggaggggcagcaggggccgctttccacgtggttacataagcacgtgttggggttgggcagtgttcctccggtctgagggtcctcgtatgtccaaagtctctgtgcataatcgcagacccagatgtgtttgcatttggtagaatcagggtgcttaaaaaagggtgactgaggggctgagtttgcaaggtggctggggactgtgcctctgtggggggcgggtgtctcagtggaagatacttctgggagccaaggacgatgcctaccgtggtagctgtgtggaccaatgttttttggggttggccttcgggtccaggcttggagaaggtgtaccaaaaaaaggcct

SEQ ID NO: 634 - DNA, 486 bp, Homo sapiens
  Genbank Accession No. AI445628
tttttttatcatgaaatagtattgcatttattttaaactgatggtccccaacttacttaaaaatcgtagaggcttaacggtttttcagctttacaacagtgcacaagtgatatgcattcagtagaaattatactttgagtacccatacaatcattgtttttcactttcacaacagtattcagtaaataacatgagctattcaacacttcattataaaataggctttgtgttaaatggttttgcccaactgcaggctaaatgttctgagaacatttaaggtaggcttggctaagttatgatttcaggtaagagatattaaatgcattttcaatgtgatattttcaaattataatgggtttactgggacctacccacatcataagttgaggagcgtctgtatttaatatgagaaattatttttatttttctgaacaactgaaaaggtccaattcaatcgaccctacagagaaaacgaactgaaacatg

SEQ ID NO: 635 - DNA, 435 bp, Homo sapiens
  Genbank Accession No. AI446168
tttttttttgagacggagtcttgctctgtcatccaggctggagtgcagtggcgctatcttggctctgtaacctctgccttcagggttcaagcaatcctcctgcctcagcctcttgagtagctggaattacaagtgtacgccaccatgcctggctaatttttgtatttttagtggagacggggtttcaccatgttggccaggctgttctcgaactcctgacctcgtgatccacccacattgtcctcccaagtgctgggaatacaggcgtgagccactgtgccatgaggattagtaaagtgcactcatgttaagtaaaaaatttgttttatgtttatgctgattatatgaaggtcatcatagcttagacacaatcaaaacccatggggaacatctttagaattcatttttctcttttcttacaaaaaaagtaaatag

SEQ ID NO: 636 - DNA, 350 bp, Homo sapiens
  Genbank Accession No. AI446224
ctcgttttgtctgagttagttaattcagtggcactgggttaatcttgcaaaactccactttcacatgctactctttgctcaaaatttgaatttgtcagtctggcatcctcttcttcccatctatccttctaatcaagcttctcagaaggaggggaagttcggctccagccacataggtgtgtgtcctccttatcctctgaccaaagcttgtccttcctacatatgctcctttgctagcactcccacctgaatgcatccctatgatccttccaccttccctctttcactaagagaaacctcagccatctaccactcctccaggttcacctcaagctccactcacccctgct

SEQ ID NO: 637 - DNA, 398 bp, Homo sapiens
  Genbank Accession No. AI452552
tttttcgtgaaaactgtgttttatttatatgtttaataaatatctgatctgtgcactctgggctcccgttaaattaggttacatacaagtacttgaaatcaaaacctcagaagttacccttctgagttttgagaacagcatgtctgtgaccatcaagaactcagttcaagttcaggatatcaatcacatagcatggtgaccatagttaataacaatgtattgtatactttgcaaattgctgacagtaggtttttactgttctcatcataaaaaaagggtatgtgagggatacatatgttaattagcttgatttagccattccacatatttcaaaacatgttgtacactacaaatacatgcaatttttatttgtctttttttttttttttttaatttta

SEQ ID NO: 638 - DNA, 555 bp, Homo sapiens
  Genbank Accession No. AI453095
  unsure (1)..(555): n = a or c or g or t
ttttttctaaacaatacagctatttaatatatcttgataactggtatttgaaaataagtctatttttctgggtagtcttttggagaaagtgcactgaatatagtttccagtcatatgctactttcttaacttgtacttatctaaacatcttctcatcaggagagagttcaatagtactcgaaccaaaagtctagtgagtctgacttctccaatccccaattttggtttgcatgtccacttacaaccatcatttctctgcaaattttccacttagtctatcaaaaatcagtgctctgaaagttctctaaaagatgcagttttttggagtctctgaatgatgacagcattctgtaaatctgcttcttccagtgtgagtgtctcatctagcaacctgaggacaggaagagctgttgccagggaaaacggaggacttctttgagatccttggtatttttcaatgaagtctttgatatggcttactctatgagtaatgttaaatttctggacaatcctttttccattggccaaccagatctgtatattagntatggggtc

SEQ ID NO: 639 - DNA, 481 bp, Homo sapiens
  Genbank Accession No. AI453103
ggggggtgtttgcagcactttaattatcaagagaatataaaaatacattcaaataaatgaagaaaaatgggcaaacaaatggacacatatgaggatttctaaggttcaattaacatgtgagaacttctcaacctctcagtcatcagggaagccataagccattggatccacaaacattaaaaagtctcacaatcctaagtgtcagggagaatgctgactatcagaagtgctgagtaaagctctttacaaagctctcaagtagcatccactaatgccaaacatccccatgagcagcgactccaatcccagctgcgaaatgctcaggctcaactcaaatgagggcaggtgcattcatagcagagctagtcgtgatggccacacagtgaagacagcaaatgcccaccagcggcagggtggttaaatggtggtggtgcattcaccagcagtgtagaccaaccagccactccaggtccactggtat

SEQ ID NO: 640 - DNA, 636 bp, Homo sapiens
  Genbank Accession No. AI453545
ttttttttttttttttgcttaagatggtgtttaatacagcagggagccaagatacagtagtaggacacagtaaagaatgtggagtgtgtagatacaataaagaattcattttatgatctgccacctgttacttgaaagaggagtaagttagggaaataaatgactcagttcttcatacatgcaaaggtaagttagttattacaaaagtttttgctgttgtttgtgctgaaagaaaagcatatgcatttaaacattttttaaaaaataaatcactcaataggcttaagaaaaatactttagtttatagttcattgatctgacgttttgatttaagatcaggggatgaatccaggatgaaaaccaaagaaaaaaaaagaaaaagaaagaaaaatatagaagtgaatcatttaccatgaaaaaggcatttccagcctcagctaacctcaactagtttttattgcattatttttgaaatgccaagaaactggctttggccataatacttgctgtccaacaaaatcacagctgttaatatgcaattgcttgcaacaattagctaaacagcattatttgacaaattcccttgaaagagacatagatgctatttaagtgtctagcacactgaatcaaagtact

SEQ ID NO: 641 - DNA, 513 bp, Homo sapiens
  Genbank Accession No. AI457596
tgagacagagtcttgctctgttacccaggctggagtgcagtggcgtgatctcggctcactgcaacctccgcctcccgggttcacgccattctcctgcctctgcctcccgagcagctgggattacaggcgtgtgtcactacgcccggctaatttttgtatttttagtagagacagggtttcaccatgtgggccaggctggtctcgaactcctgatctcaggcgatccgcccacctctgcctcccaaagtgctgggattacagatgtgagccaccacacctggtctggagccctctgttcttaaatactcttcaaaatcaggctaaacctccagaaaccgaatttctaggctgcaatggcattcctcatcgcccatgctgcccttcaaggcgtttctgcagctccaacaacagctcaccctccgtctccccacaggctctggggtgaccctgaggtttcctctcccggccaccatggccctaccaatggtcactgctattcccacagcaatggtt

SEQ ID NO: 642 - DNA, 546 bp, Homo sapiens
  Genbank Accession No. AI457905
tctagtaatcctctatataactgaaacaataatctgagaacaacttctaaatgaaaataactactgcaactgaggtaaaccaaacagttgtttttgtttattggcacagtggcccacgataagacacataggtatagcacactaaagctcaagatcctgggaacaggagtataaatttattcaagggaggtgtttggttttcttttttttttttttaactgatgactctgctgtcttccctccaagggaaaggaaagagaacttactgaatagcaccgttcttctatatgtgattgtcaagtaggacttctgtaatcatactgaaggtaatacattgtaatcatgctgaaggtaatcatctttgccccagctttggatgggtttctcacccaggctccttcaccaggcgggttcatgcagacagccatgcagcataagccttttaaggtcaggccctttgtaaatgctcgctgaccagcctgcatgtgccagagctggttacagaaaccggaaaacccagagggccccgggtccaggacttcagga

SEQ ID NO: 643 - DNA, 557 bp, Homo sapiens
  Genbank Accession No. AI458439
ttttttttttttttttttttttatagcaaactttttatgtcagaagtttattttattggtaaaatattaaataatatacagaattaaaaactgcacttacacttctgagaagaaataaatcttggacaaattatatgcttgttcctgagattccctaaatttattccagtagctgggcactcagacagtacaaacctttataatataatccttttcacaaagtattacaaagtttctgcagcttctttagttgtacacacatacagacacacactcacacatgcatatacaacactcatacacatatacacagtaaccacatacatgcacagaacatgtatgtgtgtgcattaaaaacaaagaagatacaagtcccacattttagtctgcagtgataaaactatttagcggaggtctccaaatcagtatgtagtagagtgacttgtcacacagctgcaaagactgtttcagtatttccatagtaaacctcattttctgaggtatggtatttgagccttaaaaaaactacattacacttagcaaacctgacatacaag

SEQ ID NO: 644 - DNA, 489 bp, Homo sapiens
  Genbank Accession No. AI459244
ttttttttttttgccgcgggaatgtctttattggacgttacgaagggaattggggtttctctcctgggaagaaaaagcccgacctgtgccggcgagagcaggctgccttgggctgggggcacctccgagcgctgcggcgggacgtcggggtccggggcgaaaagagccagggcgcggaccgacgtctgctgcttttctgcggcattgctgcccgaacgaacgaacgaacgaacgaacgaagcggtttcgtttaggaaaaataccctcttgacgcgaagccacggctgaagtcccgggccacgcagaggggccagcaattccatgggtggtggggccctccatccctggacgcagcggggagcagcgggcggccctctctcctgcccacttctcctgggcagcgctgcgtctgcggctcgtgggctccgggctcgcccgccgcggactctggctcaggtttcggctccggctggggccccggatccagct

SEQ ID NO: 645 - DNA, 459 bp, Homo sapiens
  Genbank Accession No. AI469896
aatattattttgctttattgttgtaatgttatttttgtaataaataaattcagagagaacatcctactattagacataggaaaatgcctagaaatcttgagatatttttccttctttatgccagtattatatttggtttacacctcagaagtaatagtgaaattggtagagacaaaatattctagtaaccaatttgctattttctgttgaatttaaaaatttaattcaatttatatttgattcaatagttgcaatagtattaattgagattttaatgtccataaaatactatttttctccaattattatttagatcattatagatgcataattgttcgtgaaatggctttgctggagctggtttttagggtaactgacaggagagagaatttccagtaatttctcttctgtttagagagacatactatttcttctacaggaaaactaacctctgactct

SEQ ID NO: 646 - DNA, 549 bp, Homo sapiens
  Genbank Accession No. AI472136
tttttttttttttttttaaaacttcgaaatatttattattaagatataaatacatattttaaaaatgtacaagttaaaaataccttcaaagttaaatgtcagttctttcacaatcattgtgccggggtaatacgtacaatatcttggcttactagtaattttataccagtcacttgaaacaacatccttaaactttaataatatgttgtaataattccatttttcactttttagagtttgatagaagacagtcaatatcgtgaaggatttcagaggtttttttcaatgctattgatactctattttcattaacttctcctagcaaggtttctgaagatcctggtttataatgatcaaaagactgttgttcatttttcttgttagaaatctggtttaggataccactattttctagtagcaagttaaacttctgtatcttttcaagttcagaagcaacagaccaattttcttggagaacagaagatgacgaatgagtgggcatctctctgggactagtctgggtcagtctcctgcaccatgatgttactg

SEQ ID NO: 647 - DNA, 613 bp, Homo sapiens
  Genbank Accession No. AI472143
tttttttttttttttttttttttttttttttttcctttttaaaggcttttaatgctcttcaaatggtgagaggttgttgcaatggtcataggctgtgctgatggccgggaacaccccacaccccacacctgccccccataccccttcctccaggagatacttgagagggaccatgcccggctgaagccccgtctcgtgtggaaaaatgtcatctccagtgtctgctgcctcctccccgcaaagtctcccacaagcacaggacaaggggtgcttccaccatttcctaggagctgatgacatgtccagaccaggtctcatgcttggtgcctggtgccaggtgagtgatgacgacctccacggcctgcagcttctcattcttgggtgggatggagcacattttataggtgacctcgtcgccttccactgggacatactccccttccacatcagagatgtgcaggaagatgtcggggccgccatcagctggggtaatgaagccatggcccttggaccggcagaagcatttgcagactcctttgttgacggggccctgtgaagcccgcaccgtcgccgagaaggtcctcgtccggcgagtgggcaagtggcttgggac

SEQ ID NO: 648 - DNA, 402 bp, Homo sapiens
  Genbank Accession No. AI473909
  unsure (1)..(402): n = a or c or g or t
ggcccatctataatattatgtaaagtaaggttaaaaagagagaaaggcatagaggcgggagagagcaagattcccaatgaaattcatacactgtccatggaggaggctctctgttccctttctttccaagtggaacatgtgactcaaatcaggaaggaagtttggcaaatggaagatgagaatacttgagccttccattcttgaagaactcaggcatgtggtaataaaacccaagccagacatgcagattttcaagaagtcaaaggatgttctagccttttaaaaatgttagcagttttcaaaatcacctgaacatncaagtaggatccacccagggagagatcttttaatggagtgaccctcacactctataaaactgacaggggcaacgaattgaacctg

SEQ ID NO: 649 - DNA, 446 bp, Homo sapiens
  Genbank Accession No. AI476732
gttatatccaaatcagacttttaattttcacagatatgccaaattgtctgttccaaagatgggcatcacaatacatcccattccatgtgcttctcttgctatgtaacactgacactccttccaacaggtggtagaagtctgtcttctccccgtgctcctaggaagaccttcatgtcctccttgaccaacaggggatggtggaagtgactctgtgtgacttgtgagacaagattctaaaagtcatgcacttctgccttgttctcttgggataactgctcttggaacccagccattgcagtgaggaagtcaaatagctccatggacatgccatgtgtaggtgttctggcaaacagccccaggtgaggttccaactgacagccaacgtcaaccacctgacgagaatgagtcttccagccttgatctgctgagtcatcgccaactccagc

SEQ ID NO: 650 - DNA, 511 bp, Homo sapiens
  Genbank Accession No. AI478812
ttctactgtgaacattttattttcacaaaacaaactttacagattttacaatctcccaaatttcacttatttaaaaataggagagacaaggcaacctagactccaagattgcaggcgtgaaaaaactagtaccagatattcaagttatatatgcaaactgcattttatataccatgaaagtgaaatgtgacaaacactcactagtttcaagtgtaccttataagaaacacatggacatacttgggttttttaaccacatagtctcatatcaataaacatctaagtatctgacatgtatttttccattaaaggtaggcacaactctatgaatatcaaattatatcaatcatttgctttttataatcttgactggaaactgaaaaataagaggaatgtaaagttaagtagccgaaaatgctacttactgcacaaaagcacatcatgaaaaggaatgctagaagtagttctcctcaggaatgggtttttgaaaatttaaaatattattttatca

SEQ ID NO: 651 - DNA, 558 bp, Homo sapiens
  Genbank Accession No. AI480137
tttttttttttttaggattttggattcaaatttatcacagtaccaattttcctaaacatgttttgataaaggccattggaacacctgtcacactgttcaaatgcccaatggtaagacttctgatgagaccaaacaggtcacattaaatcaatagaatatcttagaaataaagccaatatgactaaatccaaaacatatcacatgaagtacctcatgtacaatacaaacctagtttaataaataaaagaaacataggtgactgcgctctgggagaacatccagttcctgatggcctcttcacagtcttctctgagactccactgccacttccactcgggcaagcctaatggtgcggccatgaagtttgtagccatcttgtcttactaatgccacggtgccaggctgcaccccaacaccagctggcacatgacagatgagttcatgctcatgggggtcatatttgtcaccaatgggtgtcagtttctccaggccatgcttggcaaacacacttttcagctttgcttctaaaagcaacaaccctcggaagaccttctccag

SEQ ID NO: 652 - DNA, 655 bp, Homo sapiens
  Genbank Accession No. AI491983
  unsure (1)..(655): n = a or c or g or t
aatcataataatggcactttataaaagtcagcatttttctctgattataaaatacatgttgtcaaaaagcttaaaaatgcaaaaagtacaaaacattaaagacaatctcatataacctcttctccctccccacatcccctctccttcaaaagaacttgtgaacattttggtgagaattttcacaagtgacgtacgtccatatcaccaacatggccccaacactccagatgcccctcggggttctctcccaggtaccacgctctgacttctgactgagatggttttgattgtgcctgtttaagtcctatgaatagaatcacagagtatatacccttgagtctggcttcttttgctcaatattatgtttgtgagattcatttatgccattgtcccagctttatttatttattttttctcaagacccagtctggctctgttgcccagggtagagtgcagtggtggatctcagctcactgcaacctccgnctccaggttcaagcaattcttctgcctcagcctnccaagtagctggatacaggcacctgcaccatgcctgcctaatgtntgtatnttagtagagnacnggtnttacatgtngccaggctgtctcgaactctgaanctnagtgatcacccgctcgncttccaagtgctgg

SEQ ID NO: 653 - DNA, 538 bp, Homo sapiens
  Genbank Accession No. AI492376
ttattatttattactattatttttattgttagttttttagttataccttctgggatgggagacagttttaaaagttaacaattgtcttggatgttgctgtttttaactcagtaagtacatctgttctgccagtgctgccctgagcactggaactgggagagcaggtagcaagctagcactggacacagcataaacagcgacatatttctcttccccttcaaactggctggccctgtaaccaataaaatgtggcccatgtgacactgggtgacttctgaggctagccctccagagatctagcttatgtggtcctttatttgggaatgctccttctcgtaatccatctgccatgctatgaggaagtccaagcagccatatggagagccgcaggtgcaggagaactaaggccccagctaggagcctgcaccgcattgctggctgagcaagtcaggccagtttggacttttcagccattccagggctccatccaataccatctaaagcagaactggctggtcaatccatagaaggaaggggg

SEQ ID NO: 654 - DNA, 535 bp, Homo sapiens
  Genbank Accession No. AI492574
tagattttgcagcacttttaatacacaaagcaaaaggtaataggctggatgggtgaccaaccttcattcacatacagagcccaagtatagatacagactaattgggaaataagttagagtttgcagggccttagggctgagagccagaaacactgtccttttggcagccatggaagcgaggatttccttttcttggcatggagggattctggagactccagcatgagcaacagctctgagttgtcaatctccagcagcatgcccgtgatcttgccagccagctgggtgtggacatcatggataagggggtagagacgctcccctcaaagtcacaggacagcagcagtggaagaaagctcaggaccatccagtctgaccagcgttttaagacaagataacaggtgccaatcatctgcttttgctcatgcaggggcgccgcagccagcatggacgcggtcaggggctcctgtccttggatgtgcacagccggctcctggacccgataggtgcttgtgctgctgaggacatttgcagg

SEQ ID NO: 655 - DNA, 450 bp, Homo sapiens
  Genbank Accession No. AI494498
ggaagacatgggaagtttatttttaaaagggggacaaatgatcagaatagcaaaaataaaagagtggggaaaatggattttcctgtgtctgtgccagtgccacaaccctacattcttcccccatgaccaaatatttgagcccacaatagcaacagaagactttcacttcaaggtcatggcctgtggggctggcctgcctcatcagccatgttaagaatatagttagccatatcatcttcagtgggtgcatctgataccacccaagattcatttgctccagtcatctgtaggcgacaaatagggcaattcctgtgtcgatcactccatttatcaatacacttctgacaaaagctgtgagcacaaggcaggatgaggtcagcccgcccatccatacagatacaacactcctcctcatcggtcagctgcttcacccttcccatccaaagacta

SEQ ID NO: 656 - DNA, 646 bp, Homo sapiens
  Genbank Accession No. AI494617
ccaggatcttctgcagggatagcaggatatgctgatagaggccacttacaaggtccccatgagtcctgtgggagcaccattcagttagggaggggaatgaggcatggtgccacccaacagggcacaagacaacacaaagagaatagcatctgtacagcacactcgggagtgctggggttaagtgaagaaggctgccaggggtgactggcctaggacctgagggctgaagaaccaataccttggcgtatttgtaatccattttcagaatcccagtgtgtcacagcacaccagctaggacgctcctagggaaaaggttccccatcttctcatagactctcaaagccagaggcttcgccccatttccttaccccaacccacttggctctgcagcaatcccacccgcaggtttaggcccagtggctaccaaaagaatgtggctgagcaggagggcagccccatcccgcagagtccagtggtcattcagggggttgatggaggcagccagtggctccaggacacagtagaggacactgcccaccagacagcggacatagggccccaagcacaggtgcggattacgaaataggctccgtgccacctgcagcagccggtgcagttgctccaggtcatggcttacagatttcac

SEQ ID NO: 657 - DNA, 639 bp, Homo sapiens
  Genbank Accession No. AI525044
  unsure (1)..(639): n = a or c or g or t
gatttcggcacganatttcatccagttataaactagggctcctgcaagcacccccattctaaggntganttattgaaatcagttgctatttgatgagtcacaactggcccagcaggcagggcatttnaggtcatggtcatcaaaaagaaatgattgtttttngaaaagctaaatgcttaaaatgcttctngagggaagtcgtggggcgtgtgctcattctctttaaaatcagggttgttgagtttntttttaaacattttnataagtncatgnggaaaantatataantnctnaggacccancactggatttcccagnaacatggccctcngctgggtcttngggccncannancattgggcccctgggggtcacaanggttgcctgtggccnctttgggtgntgccngggtttgtcnacnnanttattccgggggaaaaggccngnnntttgntnnnttccccngggngcccntcccnngggttggcccnggncccnaanngangnnntttaatntcncnnggncccnnnnnnntggnntttnctnnggggtnnncnntnacccnnntnggatntngnaanttggcnatntgcaggttccnttnggggantgantnnccnnttntnngggtntntntt

SEQ ID NO: 658 - DNA, 887 bp, Homo sapiens
  Genbank Accession No. AI525592
  unsure (1)..(878): n = a or c or g or t
aagttaaaattgttaatgaccaaacattctaaaagaaatgcaaaaaaaagtttattttcaagccttcgaactatttaaggaaagcaaaatcatttcctaaatgcatatcatttgtgagaatttctcattaatatcctgnaatcattcattttagctaaggcttcatgttgactcgatatgtcatctaggaaagtactatttcatggtccaaacctgttgccatagttggtaaggctttcctttaagtgtgaaatatttagatgaaattttctcttttaaagttctttatagggttagggtgtgggaaaatgctatattaataaatctgtagtgttttgtgtttatatgttcagaaccagagtagactggattgaaagatggactgggtctaatttatcatgactgatagatctggtnaagttgtgtagtaaagcattaggagggtcattcttgtcacaaaagtgccactaaaacagcctcaggaggataaatgncttgcttttctaaatccncagggtnaatctgggncccaancatatagacaggcttctggaaagtttgcaactggaagcaggaaacccaccntataggttaaaatcccnggccntncttgggaaaccaggtttaaaaaggccnggaanaaaaccatgccaccagggggaatccngggggtttgaggtnccctggaannncnnanaaatggngccnccngggaagggccataaagnnttttnancccantccggccttaccanaangnaaacccaatnccntttaaaaaancccgggtaaaanatnnngnaaagntggggggaaaacccaaantgggagggnnccannaaaannggtnccccaaaaacccagggggnccaaaaaaagnaanaaaa

SEQ ID NO: 659 - DNA, 590 bp, Homo sapiens
  Genbank Accession No. AI535653
  unsure (1)..(590): n = a or c or g or t
agtggatcccccgggctgcaggaattcggcacgagcccaccttggnctcccaaagtgctgggattacaggtgtaagccactgcgcccggnctttttaactttaaacatgttttagaattcacctaaagatcaaaatatcatggattgaacctcatcanttgatagcagtgagtgactgaagcttccaaatcaagaaaagccggnaccaagaacttccattctaatctagagctgaccagtttgagcttgattctctctttgaagagtccttcttgattgcagtgcagtactggcatttcttgaatggatgtaagtgggagtattttangtctaaaggcttttcaaatttacttggattttttttaaaaattggaggagntttatttcttttttaccccttccattnngggtttatcaaatttcccattggtcattaaaaaacttgtntcttggaaattnggggaaccngatttgctgtntttggganttnggagttcttggaaattaaatgtgaattnngggggtgatnatctngnttccnggnntgggganttanctggncacctnnnatnctngagnttggagnggna

SEQ ID NO: 660 - DNA, 455 bp, Homo sapiens
  Genbank Accession No. AI539439
tttattatcaacagacaaaaaaagtttattgaatacaaaactcaaaggcatcaacagtcctgggcccaagagatccatggcaggaagtcaagagttctgcttcagggtcggtctgggcagccctggaagaagtcattgcacatgacagtgatgagtgccaggaaaacagcatactcctggaagtccacctgctggtcactgttctcatccaggctgcccatcagcttcttcagcccctcctcatccactttctcccccacaaagctgggcagctccttgtgcagaagttccttcatttcccccttactcagcttgaacttgtcgccctcttggcaggagtacttgtggaaggtagtgaccagcacagccagcgcctgctccagagaactgcacatcatggatctgtggctgtgtacttgttttctctcagcctcacccccacatggtgagctcac

SEQ ID NO: 661 - DNA, 489 bp, Homo sapiens
  Genbank Accession No. AI540087
tttcaaagataatccaacgatggagacaggagacagggtgggagggaagcgggtcacgaatgcacaggaaacagcgggactgtgggaggacaccctgcagcctcgggccctccagctgggctgacaggcaggctctgggctttggaggcagtgagggtcaattcggggctccatggggcgtcctgtccctgtgtgccttctgcgtgtgcttgcagaacagaccatagagcacccgcagtgtgctcttggcatccttgttcacgatatcttcagggctgacagggcagctgagcaggccctcgtccttcagcagctccagcgccagggtgacgttgtgcagcatttctgcaggagagttgggagtgaggtagaattcctttaagtgcaggaagaagccttcaagttgtccaatcagcaagggtaagatgaccccatctgcaaactgggtgtccagattctgcacagacaggcccaggcggtccagcttct

SEQ ID NO: 662 - DNA, 862 bp, Homo sapiens
  Genbank Accession No. AI540870
  unsure (1)..(862): n = a or c or g or t
attcnggcacgagcatgagctccccttgctgcccagacaagcttgaaggaccacaggaactcaaatncacaggaaacagttgtttcatgtatnggggggntanccattgctctttccaatgtggtaatgcagctaaactaagagaaaagccatggagacttcagcatcctcctcccagcctcaggacaacagtcaagtccacagagaaacagaagatgtagactatggagagacagatttccacaagcaagatgggaaggctggactcttttcccaagaacantatgagagaaacaagtcttcttcctcctcctcctcttcctcctcatcctcctcatcttcttcatcctcctcctcctcaggtcctgggcattgggagcctgacgttttgaaggatgagcttcaactctatggagatgctcctnggagaggttggtaccctcttggggaatnaaggnctccgnagggaaggctnttgncccagcaaagtggagaagtngaggcctctcanttaaagaancctnnatataaagnaaggtnnttnagttttcccantncgncctccctgtgcttttccatcggggccttctttgtgtgttancccttttacngagncttggtncatgnntctttggggncggcctgnnacctttgnctnccttggaacccgttggaanttattnnggcctggtntcccnttnccaagggtcctccagggtttaaccccnnntcccaanagttttggcttcaaggntaagnaagctttcttnngcncttccngggtggannaaggnancccnttttccnccnttgggccctnagncccaaaggannggnattttnggncggcannggccaccan

SEQ ID NO: 663 - DNA, 791 bp, Homo sapiens
  Genbank Accession No. AI546910
  unsure (1)..(791): n = a or c or g or t
gaattnggnacgagggcgaacaatggcggantgggcgaacgantgaagcggagttgcagcgctggnggncgccgagcagcagaaggcgcagtttactncacaggtgcatcacttcatggagttatgttgggataaatgtgtggagaagccagggaatcgcctagactctcgcactgaaaattgtctctccagctgtgtagaccgcttcattgacaccactcttgccatcaccagtcggtttgcccagattgtacagaaaggngggcagtaggccatcccccaggagattgacagaagcaaagnacttgttactaagcagatttaagggtcagtgggggaaggctatcaacccattgttcagatcagcatcaggcttgttatcaagtctnnttnggtgctaaaaagtnaangatgnaattgttcaaanataattnantanaaaaaanctctntggggnnnnccctggncccnantttnggccntatttgttangntgtaattncaatttcanttggncgntncggttttncaaacgnntgtncctttnganaacccctnngntgtttcccctacttaatcnagcttcannncattcccnctntttgnnnntttncggtaatttcntgnttggcccnancctgttngccttnncnaanatgttccnncntttaatttnggntnnatntttnncgggtnatnattttnntaatncctgnnanaatttttnatatntnnntnttttntacccnanttgnnagnatntnaagnccttttnantanatnnttgnttg

SEQ ID NO: 664 - DNA, 706 bp, Homo sapiens
  Genbank Accession No. AI546943
  unsure (1)..(706): n = a or c or g or t
ttgcaggaattgggcacgacgggaaatactgtattctgaactctatctgcagaatgagtcactacaccaaaatagttctattatttagaatgtgttaattttaaagggacctgataggtatttatttacatatgcgatccacatttgtgtgaaagcatgtgatcatactaacccagcctcctggaatgtcgctgtacgatgattgatgtctttttctcagtccatagttacaattgtttagtatgctaatcagtccagttccctgaggtttaagatcaaatataaatnactctgcttttcgactcattcaggtagcattgtacctgaacctgattgctactttttcatcttaaatattatatttcctcatctaatctgccttcccctcatccacagncattttggngaagggaaatgggagggtggcttgtaatccctttctccttttgcttttgnccccngttggtaaggcttggnagcggcagtttnctcgggtgggnnttgggtnagnagccgtngggtnaggcagggtgnttgcngggggccaggggagaggcttaagagggnangtggtggatttacttncnttgcacttccacttgccctccttgggnattnntgggccaaggcctttgggccctttannctnacanccnnggngangggccccctaaatccncggnacctcatgncccttaaanggtgg

SEQ ID NO: 665 - DNA, 466 bp, Homo sapiens
  Genbank Accession No. AI554741
  unsure (1)..(466): n = a or c or g or t
tttgttcgagactgcgtctcgctctgtcgccaggatggggtgcagtggcgcgctcatagtggctcactgcagcctcgatgtccggggctctggtgaccctcccacctcagcctccagagtagctgggaccacagaagcgcgccaccactcttaattttttgtactttatttgcagagatggggtttcatattgcccagactggtttcgaattcctgggctcaaacgatccgcccgcctcagcctcccaaagtgatagaattgcaggggtgacatgccactgcgcccgaccaaggcgcttagctttctattaagttttcacaaccactttcctaccactatctactgttcctattttacaaatgacaaaactaaccgacaaaagagcactggaccgtgggaccagagcacgtnncctgtgggtaaccttgagctggtcgcttgcccagggcggcagcggatgtctga

SEQ ID NO: 666 - DNA, 1035 bp, Homo sapiens
  Genbank Accession No. AI554809
  unsure (1)..(1035): n = a or c or g or t
tttttttttttttttttttttcatatttcacagaaaactgggtccgttttttccccatataggacatacttcgaagtaacaaaataatttttttaatcgactgtagggtttcttcttcccgttagaagtagtttcttgttcccctcatggtacataaatatcagagaaaagtagtctttgaaatatttacgtccaggagttctttgtttctgattatttggggtgtgtttgggtttgggtccaaagtattggcagcttcagttttcattttctctccatcctcgggcattcttcccaaatttatataccagtcttcgtccatccacacgctccagtatttctcttttgtagtaatatctcatagctcggctgagcttttcataggtcatgctgctgttgttcttctttttaccccatagctgagccactgcctctgatttcaagaacctgaagacgccctcagatcggtcttcccattttattaatcctgggttcttgtctgggttcaagaggatgcgcggatgattcccataaggagtccctctcggtttgtctttttggtgtgcacttggcaagggtcttgctccttttcatataggtgacttgcaacaagagggactggggttgcatggaaactgacccggcaaaaagtttgctgcccaccaatcactggctacatagtggggcatataaatagtcccgctttccaggttatatggaggctagtttgccatcctgcatgaccttggtgggccggacaggactaatgactgcccttccctcaaagttgagtgctgaaaggactgccccgcccttcccccgtaaacctgaacttacgaaaggtgccgcggttttcactttgaaggtcactggtccattgttggcaaaggtctgcccccccccctactgccaattagaaaatttgcccgcccaaaccccacaatccctgagtgtttcggggnggggagggggngnnnnnntanaccccctccannttttatattttanaaatnnntgggggagtcccatcattcg

SEQ ID NO: 667 - DNA, 867 bp, Homo sapiens
  Genbank Accession No. AI557210
  unsure (1)..(867): n = a or c or g or t
gaattcggcacgaggcaacatctatgccaaatactgtgcattctacaatggtgctaatctcagacctaaatgatactccatttaatttaaaaaagagttttaaataattatctatgtgcctgtatttcccttttgagtgctgcacaacatgttaacatattagtgtaaaagcagatgaaacaaccacgtgttctaaagtctagggattgtgctataatccctatttagttcaaaattaaccagaattcttccatgtgaaatggaccaaactcatattattgttatgtaaatacagagttttaatgcagtatgacatcccacaggggaaaagaatgtctgtagtgggtgactgttatcaaatattttatagnatacaatgaacggtgaacagactggtaacttgtttgagttccccatgacagntttggagaccttgtcaatagcaaatccatttttggtatttaaaattttttggacctggatttggaaaaaccnccnttaaaantatcttttaaaaaggtaaaanactaanannaaaaaaaaaaaccccgnagggggggggcccngggtanccccaanttccgccctnaanaggtggaggcccggtntttacnaattccactgggccggcccggttttaacaaaccggccggnnccctggggnanaccccngggnggtaccccaacttnnacccgccttnnnnggaaatnccccctttncgccaagctgggggaaananngganaggcccgccccgntcngccntcccaaaagttnncgcccctnanngggnatggnnaattntaccgngtaaattttggaaaaatcccgggaaattttggaaaccagnccnntttnanccaaggg

SEQ ID NO: 668 - DNA, 635 bp, Homo sapiens
  Genbank Accession No. AI561042
gacagagtctcgctctgtcacccaggctggagcacagtggtgtgatcttggctcaccacaacctccctctcctggattcaagtgattctcctacttcagcctcccaagtagctaggactacaggcatgcaccacctcacctggctaatttttgtatttttagtagagatggggtttcagccatgttagccagactggtctcgaactcctgacctcaggtgatctgcccgcctcggcctcccaaactgctgggattacgggtgtgagccactgtgcctggactcagttctcaatacattcttgttgaaagattcagcacttacccggtgtagcatcttgtgtgactttaagagagtacagagtggcagccaaaccagaaccataagaaaacactccaattctcttccctgctaattgctgaggtgagtactgtgctagaacagatgcaagggaaccatatactgaagatgtgtacatatttccattttgatttgatacaagtaaagatgcctttgttttctgactgaagagtcagagctagccttcataaatgccttctccacatctctatcaaagtaggtgtctctaatttacatccccaaagctttcagcactatagatactattttactctat

SEQ ID NO: 669 - DNA, 420 bp, Homo sapiens
  Genbank Accession No. AI566143
ttttcccaatccacgttttgttttattttgtctttttgcctctcaaatgcatggaaattggctgctagtagctttgctacaggagaaaatcgctaatctgtagtgcaaaatcggcgcacaggggttttctctgagattgtctagacgccgcgcgggcgggtcggaggcgccagacacattgtatccggagcgcggagctcgggagcaacagtcgccgcctctactctgtatctgcgccgccccaggcgcccagtgtccgcgctgggcctgggactgccctcgggggatggggcccacgcgggctttgatggggggccgggggccactttgtccacccaggcgaggcttgggtccagcgccggccacatcaactcccgggggatctagcagcgcggaggccaagcaggaggcccaggagcc

SEQ ID NO: 670 - DNA, 393 bp, Homo sapiens
  Genbank Accession No. AI566193
ttttttttcaccatcactcggttttattggttttgttatattagcctctgaagcaggcaattattggtgtgaacatacatcttaaaaagcatcatattatggagtcaagagtgtgcaagagtcaactcagtgcaagtgctgttggtgagcattacgtgctgaggatgaaatcggaggcccgacaggcccaggaggcctcacgcccaggggacagcagaccacgcttcagaacggaaccgccttctccatgtaaacttttgacgtaaactttatgcttcagggtatctggcctcttctgctccgagagcctctccttccgcgtcccaaatttgggaatggcccggtcaggctcaggcccaggcggtggaggccccggcgtggcagcgccgggct

SEQ ID NO: 671 - DNA, 551 bp, Homo sapiens
  Genbank Accession No. AI566481
  unsure (1)..(551): n = a or c or g or t
agaaaaaaataacttttttatttacaaaaaaatccaaatattggatgctgtaaacaaaattcacaatctgttccctctagcactgattcaaacatgtcagttttttagtccattttccatcaactccttttctgcctgtgacgcagcctatagtcaaaatattccaaaagagtgacccaaggtgcagcttgctgcaacagaacacctcaaagcaggcatgattgtagagagggtggagggagagacagccagcaggcagagcctcctccgttctgcaaggctttgcagcaagtctcgttaacttgacatcttccaacttgtactttaccatttgctttgttagaaagccattattttaacaaaatataacatagagattctttcttagcactgaaaatgctatgctaaaagaaattttaaagaaagattatattcaaatagatgctatatatgaaattactttntttggcttttggtttcacctaacacacttcatcttcaacaacaacaaaaaagcttatttntgaactgacagctttcaacataataca

SEQ ID NO: 672 - DNA, 461 bp, Homo sapiens
  Genbank Accession No. AI566771
cagcttttatttcagatttggggatacagaaggatgcaaaatgaggcaacctagccacccaactggcccagtggtcaaggggggaaatgaggtggccgctagtcagcgctggagccatttctcgacggtgctttctgtttgtttgtttgtttttgttttgagatggagtctctctctgtcgcccaggctggagtgcagtggcgtgatctcggctcactgcaacctcaacggtgcttttttctgatcatagctgagctcaaatgctgaccccagtgacctgtctccaagcactgtggctccaggaaggaaaggcctggagagacctagaccaaggcctcagtagggagggagagaatttactctttgcaaaacgtatggagtccttgttatttaccaaatatcatgttacagaccagggataaaaacaacaataatgaattcagtgaatctaaaacacaatc

SEQ ID NO: 673 - DNA, 481 bp, Homo sapiens
  Genbank Accession No. AI568633
tttacttttttttttttagtaattaaaagtaaggatggcaaagtgaagctgaaaaaatgacaatttcacatccttccctcctttccagctagttaggaaggagacagaatttcccaagttgattccaagatcacacagtgagtcaacaacataggctgaagaaattgtaggagcaatggacagagacaggacccagcaggaggtaaagaggagacatattttccaagcactgggacaaatggaaataattacttggccacttgctgccccatcattgtatcaccttccttcaatcttttggctgccactctcatgtagggatccacggtgaggaacaaagcttcaagcaggacctctccattttttaagggtgggagctcagatgtcttcaactcaaagtcactattagtaggatagccaacaaagtgcttcttcagggtccatgtcttagtacgaaccatcctgaagctcaggagcccga

SEQ ID NO: 674 - DNA, 495 bp, Homo sapiens
  Genbank Accession No. AI569980
tattggaatattttatttacattttatatttaaagagaatcaatacaaattgggacatatttacagcatttcaaatcagtgtacaagaatgcaatggtttcatccattcagcaaacaaaaatacatgtctgttttatttttgcctaaattctgctataatttgaacaaaattctaaaacaaaagccacacagagtacaaataaagtgcatttttaaatagctctatttaactttggtggatgaagcttcaaactttatattaaggcacctggaattctcccccccttctttttcaaacaccaggaaaatgcattcacaaaatttatagttacacggacagaattttagtttatctaatgtaattttagcccatttaggtcaaacataaactcaattttcaaagtaacattgtttggaaaacattttcaacagactaattttacagaacattttttttctgtagactaattcatgaacgagatcaatgaccaatat

SEQ ID NO: 675 - DNA, 744 bp, Homo sapiens
  Genbank Accession No. AI569988
  unsure (1)..(744): n = a or c or g or t
tttttttttttttttttttttttttttttttttcccgcagggctgaaagggactttaattggcttttgtctctaaaattacccacccgttcctgcgctttacggttttccatgccccctccagtttgggggtctaaaccgaacaggaaaggtgcaggggaccaggaggtgtcctggcacaaaggttcgggggtctccctggcaaggggtcccagggcctggagcccgaggcccagccaaaagcacacagcatcaaaacatgtttttagggggaagctccaggccctgcccctccccgggggccttgaggtcggggagcaggtgggcgtttgtctgcctccaggtcatggcagtgcaggcggtgagctgggggccggcagggccccggacagtgcggcgtggtcaaacagagggttgcccacctccatttccccggtcggggccaggcccgggcactcgtacaccgtgaagtctccgtcctcattctcctcatccgagggaggcgggtccagctccttgggtgctctttatgccgctccagcacagcatctggtgccgtggggcttgtagtggacatctccccgctctgtgccanccgctgttccccaagcgagatccggggagctcagtgagccaaggcccctcgaaggggcgagccggccttctagtgaagcgatcttacctgcacctgcaccacaaagggaggttccgaaaggcggtggcggncccaccaacccccagatca

SEQ ID NO: 676 - DNA, 401 bp, Homo sapiens
  Genbank Accession No. AI570023
  unsure (1)..(401): n = a or c or g or t
ttttttgtggtcagcagtattgtattcagagtagcactgagctgaagacccaggcaggaggtcgaaggcagggacaggaaggtcagggtttaaggtctgtgcagctatggcagagaagcgactttggcaaagcgcagagtgaggccccaggaagggaggaggtgggacactcggtctcggcatctggctccactggaagagaggtatacccagttcccagggtcaaagtgtttgttacacacacatgcatccatgcctgtgtgtgagtataggggttggtgtgtnccgaggcacccataggtgcgcttgtgtgggatccaggagtcccatgcctatgagcgattcaagagttcacccatgtatggacattgtatggactcccaggcacacacagataatgg

SEQ ID NO: 677 - DNA, 503 bp, Homo sapiens
  Genbank Accession No. AI573275
caatagtgtctgacatttattgaaaatatggaaaatacttttctccaggtagtataaaggagttaagcagaagatacaagttattttgttgatcaaaaagcacctgagaaaatgctgcaaattcagaagagaaatggattctgggcaaaactaactggtccacaagagaaaatgagagactcgatttggctgccaggcacaactgagccctggcagccatgtggcaggagcacaaaaagtctctgggattggggaggaaatgggtctcgctgaaggtaacaggtcccttgaggggcagccagctgtctggatcattgtccaggggctgtgtccagcccagatacctccgaggtgagtacagatcactagaagcagcagtctgtcggtggaatgcgatggatggcgatggcagtggcagcgcaggtctgtgggcagcatgatgtagtcgtctggaagtctggtgaggaggaggggggttggcagcggcggctgtcagtggtctg

SEQ ID NO: 678 - DNA, 513 bp, Homo sapiens
  Genbank Accession No. AI580176
ttttctgaacagtgactcattgtgttatatcaatagcttcagtgatgtatccagcggccccccctccacacacacaccaaacacacacacacacaccctcttgtggagatcaccttcagaatgatccacatgggaactcaatggcacaacactgaatataaatgtatgcttggactcaaatctctccctcccattcatcttgagccctgagttgcgtggtggcaaaggctcccaagtggagcatgtgtctcttcttgttcagccaggacagggtctgtactggtcgcagagtctactccttcaacagtcccagcttcttcagggcctcccttctgtgttcattggggacaccctttggggagatcttgacactgacacagggggggcgaggaagcttgtcacggctctgtccttggtaggacaggcgcttggagctctgctcctgctccaggtcagccagcttgcctacctggatacctgcaaaatctttccccgtgcccagggaggccgggc

SEQ ID NO: 679 - DNA, 392 bp, Homo sapiens
  Genbank Accession No. AI581415
ggcagagcgacgggaagagtttatttctctggaaagggaggggtagggggcggggccaggggtcagggcagggcaatgtcctccagcttcttgtccagtgccttcaggtcatccaggaagcgggtcggggtgaggatgtgtgaggagcctgtgcaggggcagaggtttggggacgatgttggggggcgctgccttcgtctttgacaggctcccggtcccggctggtgtggggctgtccctgtccctcagcaaaccaggtccctgactccaaggactctggagtctagacacctagaaggtacaagcccaggccccgggaacccaagccccagagcccagggtcccagtcctgggacttaccaatgagcacctcccactgccctcggtggcct

SEQ ID NO: 680 - DNA, 461 bp, Homo sapiens
  Genbank Accession No. AI582193
gcagggccgcgcagatccacggctgcgcctccgcgttgccgcagacgcagcccgacgggtccgcgcagtcctcggggcccacgctcagcgcgcccggcccgtggaagcgtaggcggcccgcgcgggacgccaggaaaacagccaggtcctcgtcgcgcgtgaacgtctgcgggcagccgggtccccaccggagccagcccgaggaagagacttcacctgagtgctcagacccaacgtgtgcagaccaggaggggcggggtcgggccgaggtggggagaggggacccgagcctccctcccctcagtgctcacccggcccagagccgagatgctgcggacacgcacggggctagcgccagggccgagccccacgcggaaggaggcactaggcggaaagaagacgtcgtcgtggcggcagggcacgcgctcggcgtccacgaagaagaggccaggtgcctcgtc

SEQ ID NO: 681 - DNA, 416 bp, Homo sapiens
  Genbank Accession No. AI582751
aaaatattgcaagagatttattctcagccagatatgagtgcccagtggcttgtgacacagccccgagttcctgtgaacatgtgccgaagtggttgggctccagcttctttttatactttatatttattgagatgttttaactctgcaggccagagagagagacctatctgaaaccagcttgggcagctggagaagaatgagggtgagcagacatctgggcaagccggagtttgggaaaactgccatcttcgacctttctggagcagcaagatactggtgtgagtctgtcaggagcttcagcctagctgatgaatagacaggagagagcgatgggctctacagacccgctcagcagttctttccaacttggagtgctctggtcatttgcatctgaatcctgctgtgtcttctctcca

SEQ ID NO: 682 - DNA, 356 bp, Homo sapiens
  Genbank Accession No. AI583312
tttttttttttttttttttactggaaaacagtatgtcatgttatacccacagtatcctcatatatttcatgtttaccgcatctcttgtttgcacattattttctctcgcatttgatttaatcttgggttgtttttttcatcatagctcctaagggtacaaaatccatggctaatgttgccagtaagaggccacatcaagtgattgacctggctctcatagcgggaggggatccggcttgaagggggccatcacaggacatgccccaggtactgggctttgctttttatttaggtttggtcaacttcacatttagcttgccccagggggggctttaaccactggccttatccaactt

SEQ ID NO: 683 - DNA, 1056 bp, Homo sapiens
  Genbank Accession No. AI583960
  unsure (1)..(1056): n = a or c or g or t
tttatgaggagcctcaaaaaatagaagtggccttggtagggaaggaatgtcgtgattctgagtacagtatggcaaattcttttgcctcagtttccctaactccatccagtgcatatgaaaatgtctatgtgcgtacaaggtaggtctggactaagctctggccctccggttgttttcccattgcgggagcctaagccagggtgcccaggactcctgtgtggctggtgggcctgatgcccacagctgatgattcaggaaggaggggcctggagtctgctgcagactctcccgccccctacagcccaaaccgggcactgcagcaatgaggtggtcagtccagggagaggtccgacaagttctcggcacaatgctgcangaagtcaaagtcaggcacggagaagggcacgcgggaccactttttggcctggatcncgccctgaggggtctccagcagcatgctgcggactttgagcactggcagcttcactgacttgtagatcatctgcagaccccaaacctcccacaggtcctgcagctgatgacacccccaggcttccagtccctgaagacttgttgatgaccacagatccctggagacatatattagtccggaagtgggggtcacatggaactgtggtgccttctctcttccaggtgcttcatgtgccccaccacctgcagttgatcaaaatattgcatgctctatgtgatgttgcctggtttttccctgtgttcttgggcccccccttgtgaagggatcctggaaaaacccgattgtgcgggcatcgcgggggatattttgcaaaaaacctatgcttatatatgtttcgtctgtgtatacatctcttatactcggttctatagttacaaacgtaatccttgttggcgtcgctcgtgctgcatgtatatatggtaaaactctatactcctatgtgtggttgcacctccttcaccttgtcaaatagggtttaattgaattaattttttgtcttnnaagggnnntnntnnnnccananncgacgcactagtacctggggctatatcatccggtgccgg

SEQ ID NO: 684 - DNA, 493 bp, Homo sapiens
  Genbank Accession No. AI589514
attaatgacaactttaatatgaacatgtgcttaaccctcaagaaattgtcacaactgaaagacgggagcaagctgacactgcaaggaacacatgatgctttggaatgggtggcctgcgtattcaaacacatcaaagcagcagttacttgaacaatcggaacttcttcaaatactggcccacttcttccttggggtagggccggagagcaatacaagtggcgatattctctggttgctcaagccacagcatgtggtcaatgttcttctgttgcagggtctcggccagctcctttagggtggtctcatctggggcctcgaggaccactttgcgcatgcgccccagctcttggaggtaagcggctgtgtgcgggtggtcgcggtgagtgtgcaaggccgcggtggccgcgtgacaagcctgcgctaccagtgcgcccgccggccaggagaacggagcttgtgatagatcctttcgtaacaccaagtattgtaccag

SEQ ID NO: 685 - DNA, 760 bp, Homo sapiens
  Genbank Accession No. AI589776
  unsure (1)..(760): n = a or c or g or t
attttgtccatattcatatatttatagagctagtatgtcaaaaactttacacagtgacaccattagcccctggcccacccctctccttcccacttctgtgttcgaccctacttagaccctcgcacacaaaggttgatcaaaggcagtggccacctcagactagtgcaatgccagtcctgcaggggagaggcctggcaaggtgagggtgagtctcccacagtccaagacaggtcccagaccttggcccacccagcgaggacaaaggggcctcaggtctccaaacttagctcatgtaagagcaactgcccaccattgtccctgccatgccaacttatataggcatgaccctggcccagcagtgaggcaggctgagggcatggcgggctcaggcccgagagctgagggtggcaggtgcggagtagcgctggcgggcatgcttctcacagtacagctcgtcacccacccagaagtgcccgcgcatcttcaggttcagcccacagtcggcacaggtgtagcagcctgtgtggcggtaccggccctcctggatgcgcacagcctggttcgcgatgctagtactgcacttctcacaagtgtggagctagggaggggtggncatggcccntgangcntgcagggaggactgggtgctcagtgagctgagcaagaatgcatgcgtgccacctctctcctcagccttcagggcttcctgcgagagccgaaaagagctggactgtcgtggtgacgcccgtccctcgcgatt

SEQ ID NO: 686 - DNA, 691 bp, Homo sapiens
  Genbank Accession No. AI590722
  unsure (1)..(691): n = a or c or g or t
attctaaaactctgctttatttattaattacaaagagcaaagagcagagaaatcatcacagggagaaagactgtgtacatcatacgactagtcacttgtgcttccatgcatactgcggggcgggggttcacaatacttttaacttagggagtttgggggccaatggaaaataagtggaagttgttctgaaataagccccaggcgattttcagtaatgaaaaggaacagagatcattttcttataatgctcagcctcagagagaacaattttggaggcaagaaattaataatttagtaacaaagtgaagctccattggtgaatacattatgatgtaaaatcaaaggttgatctgatggtgagcaatgggtgctcagatggggcaggtatagacagagagaagtgagggcactaagcatccatacccagctctacctcggagagcagggaagactagaggccaggagaggataggcaacctgaggagacggctctgcagccagagaagggcctgaggactgtgggaccgagagctggaggcagcactttagtgcttgtagctcttnctgctggaggagggaggtggtggtgtacttgatggtggaactgccggctncaacagagctgangccacccccaatggctctngcactgctggtactgagccacnctcatgccaagccactgccatag

SEQ ID NO: 687 - DNA, 460 bp, Homo sapiens
  Genbank Accession No. AI609604
tcctcatccttgtaaatgtgaactgtgatactatgaagaggtggaaggctgaagaattcaaaatgttcgccccaaaaaatattgtctgctttggtcttgctggttgtacgagcaaagagggtatcatcaaggcacagttcgcagaaatatttctttttaggggcaaggtccttggcttcaatgatccataaacgaagaacattttcagctcgcctgcaattgtccttattaggttgaactgtcctgcgaaggttttccatccacttgtctctctcagaagcagaattacagctgaagcatttacttccacttaagtaggtaacctcaaagcagaagtcttgtccaaggatgctactatgaagtggtttcactgatacaggttcccctctaccaagatccagacattccactgtgctgcatgggctcagcaaggattcatgggaacgtgactctattagtt

SEQ ID NO: 688 - DNA, 567 bp, Homo sapiens
  Genbank Accession No. AI610167
  unsure (1)..(567): n = a or c or g or t
tttgagacagagtctggctctgtcacccagaccgaagtgtggtggcatgacctcggctcacctcaacctctgcctccctggctcaagcaatctgcccacctcaacctcctggggagctgggactataggcatgcaccaccatgcctggctaatattttcattttttgtagagacagggtcttgctatgttgcccaggctggtcttgaactcctgggctcaagccatcctcccacttggcctnccaaagtgctggtctcttcaataatttttaaacagagtgaaaaacaacagacagcagacagctatcttctcactggcccgaaccatttccagtgaggaagccggccatgctggtggaaaggccagcgggcggtgcagccgcgcacctccatggtatagttggtgtgcttgttgtcgaagatgagggcctcctggatgagctggtgctgctgctccagcangttcaggttgggcttgtagtccacgatgctgcgttcatactgcttcangtggctcagctggtcctncagggtccgttcatctcaatggagatgcgccgatctcct

SEQ ID NO: 689 - DNA, 474 bp, Homo sapiens
  Genbank Accession No. AI610692
tttttttttttttttttttttttttttttggaaaaccaaacatgctttatttcatttttttcacaatttatttaaacatctcacatatacaaaataggtacaatttaatttttctgcttgcccaaaaaacaaagcttttgtggaaccatggaaaaagatgaaaatgagactggcaaagaacaaatgctgaatctgaagaagatttgggcaaataatctgcatacttttaattgggaataagatggaaaatatgaatgctaaatcaaattttttaaaaaatacaccacacgatacaactcaatacaggagtatttcttctcaaattcttctagcaccatcaacattcttcaagtatctgaaatactattaattagcacctttgtattatgaacaaaacaaaacaaggacctcagttcatctctgtctaggtcagcacctaacaatgtgatcacactcatgggaaatgttttgagg

SEQ ID NO: 690 - DNA, 122 bp, Homo sapiens
  Genbank Accession No. AI610910
tatacggctgcgagaagacgacagaagggcaccacaaccaaatatcacgttggttggaatgggctgtagtttctagggtctcttactaaaaaaaaaaaaaaaaaaaaaaaaaaagtcgtatc

SEQ ID NO: 691 - DNA, 513 bp, Homo sapiens
  Genbank Accession No. AI611162
  unsure (1)..(513): n = a or c or g or t
ttaaaaattcaaaaaattagtttattagcttaatataattagatcaatggaatcctgttttgatctcaatacttcccatattgcaatatataaatgtgacaaattcagctgttttgtggcatagataagtgtctaagctgggcagttagtctacccgtttatagttcatgttcttcatggctttgcagcatttgtcacttttatgaatgtgttcaaagaccagaaaaggccacacttgacctgtcagnctggtccttgaccagctgtagggtttttttttttttttgagaccagagtctcccttctgttgtccagctgggagtgggcagtagcgcaacctcgactcactgcaacctctgctnncagtttcaaagtgattctctnctcaactcctgagtagctgggattaccaggccatgccacatcncggctgatnttatttttagtaagaagggggggtcacccatgtggcaggnctggtttgaatctgcctaaaaaggatcaccacttgct

SEQ ID NO: 692 - DNA, 576 bp, Homo sapiens
  Genbank Accession No. AI620209
gtagttaaacaagttgggtcttttactctacgtacaaacacaccaggttgagacgttgaggtgtctcagcaacagggtgttcggaggaaactattacaggatttcacctgtagttgggtgatttgggggatgatctaaggaaggaggatttggttctagattagacgcacgctggagcccaggaggtcgaggccgcagtgggccatgatcgccactgcgctccagcctgggcgactaagcgagaccttgccacaaaaacataaaaaaagattagacgctgtgggaaggaagagggtaattctcagcttatgatcgctgcatgtgacagggtgagctgtgcgttccctgcttagaatcaagaagaggtcttagttcatctcactttgtcgtggtgtctgcgtggcgcttcatgcctcacagaacatgggccggctacgagggtcaaaccaggccacagcaacgcgtcaggggccgcttgctttcttaggagcaacaggtccagaggcttccgctccaagagggactggggcctgggccaggaccttgccgaaaatcaaacgaagcccagacaacctg

SEQ ID NO: 693 - DNA, 486 bp, Homo sapiens
  Genbank Accession No. AI620433
tttttttttttttttggctttacacatcccaccccaaggctttattcttaagtgtgaaactcactgtctgacagcttcagggatgtggacttgatccagggatatgagttgggccagctcccccaggctgtccagaaaacggatttttcgtgtgaatttggaactgatgaagggccgaagcagtgccagaaatgctttcacataccatgtagcatggacaaccaccagggctcgcaggtttttccgtagccgccgatccagggtacggtaacactgacgtatccagctttaaggtggaacttgggccctgcttgtgcctccactcaaatgaacaagcaggtaattttcagctactagcagcttcagagttcccaccatatacctaaaccagtgttccatgacacaaagggtggtggggattcttggttttggtagataacaggaagccaaaaggattgacgccttgaggcccttcacggggtaccc

SEQ ID NO: 694 - DNA, 468 bp, Homo sapiens
  Genbank Accession No. AI620463
  unsure (1)..(468): n = a or c or g or t
ttttttttttttttttttgactggnagnaatttattgttacacacacacacacacacacacacacacacacacacactaggttaacatcaaccaccgcaccatccaggcactccccagccaccacgtgtgggcacaaagacacacacaccccttttggtaggcagatttccctgtctgctcccctcttcctgtgggagaggcatgccttctgggcagtttaaaggtgggaagttacaggggcctaaaaaggtaaaagagcagcagctctgcactggccagctgtaaacagtaaataggccagtcatggagggtcctgaatccagatcctcaggaaggttttcaccaaacaccacagtcccatttgatgtgatgcccagcctctatccttaaggcatttccagcgtccctgaggcgctctgcttagacaactggcacagaagtggtcagggccttggctgtggctctgc

SEQ ID NO: 695 - DNA, 556 bp, Homo sapiens
  Genbank Accession No. AI621034
  unsure (1)..(556): n = a or c or g or t
tggtggcggaaacgttgcagcactgcagcatgaatgaagggtcggttcggcgcggccaggaaagtccttttgggccgaaggaaggtgtggctgggcacctctgggcagccaccgccagtcctcgcccggagtgaaggggcgagaggtgacggagacggaggggctctagacggccggcgggacagtctgctgcttgatgaaggagcaaaatttcatctcgggcactaagcaattcatctctagtacttgtgatttcactgtccttctcctcccggagattctcagtatcgatgtgtaacctctgcaattgggcttgaagaacctgtatttgtttagtggattcctcaacttgatttcgataggcttttctttcttcttccaaaagagcttgaagttcaaagcatttttgtttacttgttctagctagctcctgggcttcgatcaattcctttcgaagatgctgtatttcttgctttgcctcaatttctgactggtgcaccctgaagtcatcttttaaaagggacactntggcaagaggctcatntangtcttgctc

SEQ ID NO: 696 - DNA, 582 bp, Homo sapiens
  Genbank Accession No. AI621225
tttttcaagtaagtgacttttatttttctctgacatttcacagtcaatttctgcaaaacttcatactttctcaaaagaattcacatttgctaaataaatttctaccctaaagaattcatagctgaaaaaccacttcaatatatgcacaaaagttacttttctgctaaaggaaccatagtagaaaataaaaagtcagacaatactataatcaataaaaaccaatgagtgtaataaattacaaatgtcattaaattccattcccataaccattgcaatcagcaacttttctatatatatttcaataatgccaacaaaatctgccaaaagttctcttaagggttgctctgagctaaaaatggcttctcaccttcagaaaacagcagctctgccacagtacttcatagccaattacgttattcatcgctaaaaccatcactacttacagccttgggcaaccgatggagatctttctggtcacctccgaggttcctccatttgctgatctggcttctggactcaatggatctctccttccaagatctatcttctctacttgggttcatctgcttacagctccaacag

SEQ ID NO: 697 - DNA, 664 bp, Homo sapiens
  Genbank Accession No. AI623176
  unsure (1)..(664): n = a or c or g or t
ttaaaaggaggtttttttattcaaaggtataactggataagtagatttgttccattcttgtgaaatactttttaaaaaaatacgaccaacttctttgcaaatagcagacacatacctcaactatgatgacctaatttttggtggataatgtacatgattaggcagaaataggcaagctcacactggtagattaactatcaaatactcagtcaaaactccgtttgtggcccccacttcttgatcgatttctattcccacttcgtcttctaccatcttgtcgacttcctgagcgacttccttgtcgactctgtctacctgaccggccgccagatcgaccacctgaccggcctgaccggcctgatcgaccacttgaccagccactcctctgtctggaattagaagatgtgtttccatcataatattcttcaatttcaggtaatttggctggcactgagagtatccagtcggaatcatgccactctgcctgtaacctttctgactcagttgtaggaacatcaaagcaaacacccatatttcctttcaggaggcacattctggtaatctgagacactgcattactactcagcttttctgtaagttctttccaagcacagctgacatcctgtatttcctctaggctttncagagtcatggtcacaaaacc

SEQ ID NO: 698 - DNA, 461 bp, Homo sapiens
  Genbank Accession No. AI623978
  unsure (1)..(461): n = a or c or g or t
ttctatgtaactgatagttcattttatttttataagccttttgtaaacatactgctatgtaatatgagtatatataacatactaaagaacatatctttttagtccataaccattacttctaatggattataagtatacccagattttgaaatgtatacaaagaaaatttaacaaataataacatgtaagctatacatgtcatattttacctgttacccatcaatctgtttctgtttttaaaacacagttttcaaacactaagtctgtgattaaacaatgacactaaaattaaattgtttatatgtcctacctagttcaataggcttaacaaacatgtatgcatatatgtttccaaagagctaatgattctaaaaactgctttagaatcagagaatttgggaagcaaaaggaaccctagaaatcattttatccaatgccccttgtgttacaaataatangac

SEQ ID NO: 699 - DNA, 213 bp, Homo sapiens
  Genbank Accession No. AI624028
tttttttttttttttttttttttttttttttttatggttctttgggtttattattacaaacacaccatgggtttgtcacaatagggaaatctaagctttacataccattttttttttacctggacagggccccataaaagcctccaagccacgtgtagatgtgagacacatttgacagaacatttcaactcatagcttataatgatgccattt

SEQ ID NO: 700 - DNA, 647 bp, Homo sapiens
  Genbank Accession No. AI625821
  unsure (1)..(647): n = a or c or g or t
cttgacaaaactttttattcacagaatcccttgaaagtagctattagacgaaataacaaaaacttttgtccaaggttttagccctttttattgaccttcttttcttcatgattctctctcaaaggataaattgtacatttcttgtatttgaaaacatcagatatccaagccatattactatagttctcagaaacaattcatttcttcagcttttcatgcacagctggattggtgcaggcattagcttggagctcttctgtttctccctttaaaacaaactcagcagaggctgggtgttcctggaccctggatttcacagcatgagctgcatagttaaggctggtattttcactccaatgccagtaacctgagaaggggttatagagcattcctaccactgtttgaactgacagaccatttgattccagaatgctctctagtgtttcaggtgaaacaaacttctcccatgtatgagtancctttggtacaatacctgcaatttgctctgaaaaaacaattccccaggcataaggaaagtgtgttttgttgattgtagtaatgaataaagaacccacgngttcagttaacagcccaccaccacagccaacgtcaagaatcttcatccccaacaaaggtttccctggctg

SEQ ID NO: 701 - DNA, 552 bp, Homo sapiens
  Genbank Accession No. AI627358
ttttttttttttttttttttactaaatagaagggatttatttaaaaatgtacactttatgcccataaagcctgcatttctaccacatttacagagacattgaaacctatgaaacaacgcatgaatcaggagatgtagatgagatgggagctcccgcccagggtcctatggcaggcacaccagggtacaccaatggatgccagggcacatcagtgcacacctgtgcatgccagggtacaccaatgcacacctgtgcacgcctggcagggcctcctgggcagatgccacagggcagcatattaatggggcactgatggaaattttctcgatccagggccaaagagcaggaaaagatgaggtgagaccctgttgaagccatcagcaggcgagcccctcggtggcatcacagccgggggcagaggctgtgatatgtccccccacctctgctgctgtggagtcttgcacatcccagggcccagtgacagtcagcagggtgaaaggggctggtaggggactcagtgtgtgcagtcactgctggatgggtgctggaagg

SEQ ID NO: 702 - DNA, 754 bp, Homo sapiens
  Genbank Accession No. AI627648
  unsure (1)..(754): n = a or c or g or t
gcttcatagtgcttactttatttataaaagagaagatcaagagggttgcaggaattttttttttttaacaacaaatcaatggtatgtgtcccaatctccttcttcctcttcctttagtgcaacatggcgcagcagcctcatggataaggtctgatttcaaaagacattcctgaaacctcacctacagcagcactctaggggtcccattaggggtggctctctttttcttctgcagccgattctgaacctttcgagattttactactttcattctcacctcaaaaacttcatgaatggccttccggaagcaatgaaaattatagtcaattagcccttttctttcaaagctttcctctctgacaaagcaaacgagagccaggaactttgtcacctcttttaaataaagcacggttgtattattaagctttatgatggctgtggattccttgtcatagggggttcctgctccatcttctttgagaccataaatacaagagatgtcaataaccacatctatcatatcacagcagagctcatagngttgcatatccaccggagtactatcagttgcaatataaatnntactgaccacatcaaatagaaatgccttttcaattncagaaattgagataaagatgttcagcaaattcttcagagnttggagttgtggnaatcagttctgaacaaacttgctaaaagctccaaatattngatgatcatatatgcttgtcagataaaagctgaggtgaatttt

SEQ ID NO: 703 - DNA, 390 bp, Homo sapiens
  Genbank Accession No. AI631355
  unsure (1)..(390): n = a or c or g or t
tgactgtgagacctcctttattaggccaagagtggccatgtgcacagatttacagagctgctcctccctgtgccaggaccgcccagcatcttcaggagcctctgggccaggggcgagtgaggacagcaccagaatgtggtagggccaggagaggcaggacacatgtggtttggaccccagggaaagggaaagggcaagggcagggagcagcttggcacggacctttttttttttcgagacagagtctcgctctgtcgcccaggctggagtgcagtggtgcaatctcggctcactgcaacctacacctnccgggttcaagcgattctcctgcctcagcctcccctgtagctgggattacaggttcctgccactatacctggctaatttttg

SEQ ID NO: 704 - DNA, 494 bp, Homo sapiens
  Genbank Accession No. AI631519
tctttggattataaatttaatcggaaaaaaatacttgcaacataccgaaaatctctctctatgtataagtgtatgtgtgtgtataaattaacaattttatgttagatattaatgcatttttaaatgcatagataggtgctatttgacaagtatagttatataaactttacatagaatctctaaagtggaactatcctcagatttgatttttagaaagtttgatacagatgattaggttaaagtgtttatagtcagttacattttttttgagtatgtgtgtcaaatgttccatttgatcctttctaggcaactgggacatctttgagaataacttgactaaataacttattttcagagtaggcttgcaaagcaagttaaaaaggcagagaatttaggccactgaactgtacatgacttcaatcagaaggtctttgcggggataattaagcagtcatggtataaactgtctttctgaaacacaagattttaagcct

SEQ ID NO: 705 - DNA, 503 bp, Homo sapiens
  Genbank Accession No. AI631585
  unsure (1)..(503): n = a or c or g or t
ttcactgtttaaaataacagctttattgctacagaggggagatcttttacaaaatgccaaggaaaaccattccgttttgagtctctggagcctgaactctcaccatgtaccagaaaagaatgcccctctttcgaactttcaaacagttgggattatttttgtttcttatcatcccaattatttgctcaagtttgcctccattgggccccgttcagagtttcttgggctgcttgtactagtcacagctccacttccatctcttctcaggaagaggtgggcacaagacacatctgagccccttagtattgtgatggtggccaggaaatgatcaaagggtagcatttaggaaatcagcaaactaaagcctcaaatcaaaggtggacaaatgcattctcaactcaaacaggttgggtaatgctttcataagatacattatgtttttgtgtacacagcacacaaattttattatgtctacaaacagattcagganagacctccaggct

SEQ ID NO: 706 - DNA, 496 bp, Homo sapiens
  Genbank Accession No. AI632232
  unsure (1)..(496): n = a or c or g or t
ttcttctgagatgcctgtagggtgggagacgtccttcccctaaacagacaaccctgccacagcttcacagaggtgagatttcggaagggagccccaggcagaaaaagggactaaatttgggggcaggagggtcaccgcttttggggaccttcgtagcccccgcaggtgcagccctgggggagagatctgcccatcgcagcctccagaggcagtgaggacgccctgcccaaggggcaagcaacgtaggtgatgggggcagcaaaggggcgcaggaggcctgngccaggcccagtgatcccacccctcaggccctgcccccgggcctcggcctgcacaaatcaggttgattcccgacctccacaatacccagggcactgtgctgcagggacactttcccacaagcccaacccctcacagcagcacaagggaagaggcaagaagacctgagggtggtgggcagagccaggcctccagcacacggaacacagagggactg

SEQ ID NO: 707 - DNA, 519 bp, Homo sapiens
  Genbank Accession No. AI632750
gtttggcactttttgtttatttacaaagcaattcaatttcttggtgttcaggagctccctgagaaacgggcccaggcccacctctggcacaggcagagggcacagcattagcaaaggcccaagggagggaccccacagagcagcctccgagaagagccaggagtccctcgggctggggaagtgagagggcattgaggcctgaaggaagactgggctgatcttcagacttcagtctattggggggcagggtgagtcctggagagacggtgccccacgcagccaaggcagggtgagggaggtcacacctcagcacattctcttctgtgtgacgttggagatcattaacctgtggaccctaacagctgccaccaccaccttcaggaattcaggtcctccctgcctggcacgttggccagcactcccacggcccagcccagccagacagtggcagaaagggcggcctgcctctacagcgacgctgaggctggctgaaatggcagggctgaagggcagcgtctg

SEQ ID NO: 708 - DNA, 562 bp, Homo sapiens
  Genbank Accession No. AI632972
gttgccaaatagcatttatttgagtacaaaatcctggcaggcaaaagcacttgcagacccgactctctgagaacttacaaacaaaaagtgaaaagctcttagttcattttgagtcagaacaataaggaaattatgaaatctaagatgtgcaggtttacttaaaagtgataatggtttatattaactgtggcccacacagggtctctctaatctaatgaaaacaggacagtcactgaaaataaggactaatcaatggccaaatgtttcttcactatgggcaaaaatgtgatttcttcatctgggctttaagagctataaataaaacacatggccgggtgcatgcctatagtcctagctatttgggaagctaaggcagtaggattccttgaccccaggagttggaggtcagccaactctaaacaaacacaaacatcattctgacaaatgaccttaatgtaggatctctttggacacatcttcagcaagcagtcatttaataaatgccttctgataggcagaatgtagctgctcatggctctttaagtatcatatccagaatatg

SEQ ID NO: 709 - DNA, 523 bp, Homo sapiens
  Genbank Accession No. AI634548
ttttttttttttttttgaagataaaaggagaccacgtttattaagcattctgcacatatgttcactctttccacaatatttgcacacccagcgcatagtaaacacattaaataggggcttttattactattagcagtggtagcagtatcataaaagtcctcaaggacaccacatggagagttagtcggagtcaccaggtgttccaagtttgcctttggcagtctcctgcctctcagctttcttcgaggttgctctggtacctcatcacctccaccacctcctccaccatcccgacctcagcctggcctggaagaaagtgcaatgagtgtggaagcacaagaccgatgcttccaccccagctttgccctgccctgggccattccacccttctgagcctccatttccttatcactgaaatggggagaatactttctggctggcttcgtttattgtgagagtcaagagaataaacgtttgtgaaaatactttgaaaacagcccccacctatcagttctccaccagg

SEQ ID NO: 710 - DNA, 686 bp, Homo sapiens
  Genbank Accession No. AI634580
  unsure (1)..(686): n = a or c or g or t
ttggacatctcagatgtgactcttgctgccaggctagaatttaggctatgtgataattctcagctgtcctacaatgcctgcttcttgaaagaagtcggcactttctagaatagctaaataacctgggcttattttaaagaactatttgtagctcagattggttttcctatggctaaaataagtgcttcttgtgaaaattaaataaaacagttaattcaaagccttgatatatgttaccactaacaatcatactaaatatattttgaagtacaaagtttgacatgctctagaatgacaacccaaatgtgtcttacaaaacacgttcctaacaaggtatgctttacactaccaatgcagaaactgtgtttggtttcctctctaaaaacagatgtgtcaaaatgataatattctaagataaagtggcatgctcagattcccatcttccagntctggattcactctgcctcctagagactgagggaatatgctgactacatgncatgaaccttcttctnctagatcccagcgtatgcagatcatttacacacaatccgtcagaaagaagtgacctgataaaggaaactgtgaagagaatggttagctgcaaaaagagtgctgatgacctttcatttattcaggctgtttaaccctgcngggtttggatttctaggccacctactatggac

SEQ ID NO: 711 - DNA, 563 bp, Homo sapiens
  Genbank Accession No. AI634652
tttatttttaaatcattttattttgtaataatattcatacactacaacccattgaagaaacaaagccaaaaaacgcagtgatgtaattctagttcccgcatgtagcaagactctctctactccattagcaacagtggccaattacagccaatcaaagtcgtccttcttggtgaagacagacatcaacactcccggggatgagtcatgctggacagatgaataagtgaaaggctatcctctgagaaatattgttcaaaaccttccaaggttagagaacagaagactccaggagcctttggacagtcttttcctccctgtgattcttttcctcttgggcttctgggatttcaaactcggtacatctggtctcttggagacacatcctccctggaagctccagcagaagatggccaaagaccccttttgccttttctgcttctccaaagcacaaatgagagactgataattcagaaataattctaatacctttttcactgagagcctttccactcccctccccttctagtagtcgtgaacttcagaccctcgcttcgactcccact

SEQ ID NO: 712 - DNA, 703 bp, Homo sapiens
  Genbank Accession No. AI635057
  unsure (1)..(703): n = a or c or g or t
tttaaagatggggtctcactctttctctctgggcttttggttgttttgagacaggatcttgttctgttgcccaggctggagtgcaatggcacgatgttagctcactgtacccttcacaactcctgggctcaagcgatcctcctgcctcagcctcctgagtagctgggactacaggcgtgcagtaccaccctgcctaatttttattttttagagacagtcttactatgttgtccaggctggtctagaactcttggcttcaagcactcctcctgcttcaaccccccaaagtgctgggattgtaggtatgagccactgcgcccggccctaagacctctgtctttatggatgtgagtcagcctgtgtccagcaacctacaccagtgtacccacatggcccagcacgggcctgagcaaagatgactcctgaaagccagcaaatggcaggtgcctgaggcttccttccacaaaccaccaggcctgggccagtgacaggtggttgctttgaactntatttgagaaaaacagaagatanatgtatcaaaagaacacacagggtgcnggggaaggcacagcagtggcggcagccagggtgggcatccgggctaaggcttacttggcggcagtctcatcggattttgcagcttctgggcccccagcttggcccgcgacttcgaagtgacctggggaatggatctcgtggactg

SEQ ID NO: 713 - DNA, 496 bp, Homo sapiens
  Genbank Accession No. AI635504
  unsure (1)..(496): n = a or c or g or t
ttttttttttnttttttttaaaataagaagaaacatttattaattcacatagtttctgtgggtcaggaatttaaaagtagcttagctgggtagttctggcttgggttctctgatggcagtcagataattggccgaagtttcagtcatccgaaggcttgactgggactgcaggatctacttccaaggtggctcactcttggtttgctagggctgctacatttcccctggaactagtctttccacttgcaagtttgtttacaattccacgttctttgcaactgaatggggcctcaccctcattaattggtggcaaaggtcactccttaacagatgctagtgtgaggtggggccccaggaggggcatctgagccccaagagagcagctctctttagcccctgctctagtttctttgcagttctcctaaagaagttcaccagcaaggccatttaccagacacgagggaatcaggccactttcaaatgttgatagcattac

SEQ ID NO: 714 - DNA, 709 bp, Homo sapiens
  Genbank Accession No. AI635827
  unsure (1)..(709): n = a or c or g or t
tgactaagcaaaatttgtacttgtttaataagaaaatcacttctttaaaaaaatagttctttacatgctgaggttcatctatgcaatgcaagagctgaaaacagattcgagaaaggctgttcctacaagggaaggtcctgaggttacaacgccggcatggccgggaaaacatggctgcagcgatcccagcttcttgctgcccacaggggtggcacatctgggcacacactgtgagctgctcagaggcactctggtgggcagctcccatcgcctcagtcagtgtctccgtccccttcactgccttccaggggactgggcaccttggcgcccgtgccacctgccgtgagagcggtggcactgaagttgtggatgggcaaggtgctcagccactgngccatggagcgttcgtcccgctcggtgccgatgatggtgggggtatgtgctcctccttgaaggctgcgacctttccttcctcctgcgcccagtccagcggctcatgcagcccatcgttgccaaagcgctggttgtacttctcgaagtgcaccctctcncagaccaggccgagtccgggcgccttgggcacgtncaccttctctgtgccccagctgcgcttcagcacgctctcaggggcataacccttcacaatggccaccacaaggccgaccatctttcggatctgatgcatcatgaaagctctgccctttaccct

SEQ ID NO: 715 - DNA, 599 bp, Homo sapiens
  Genbank Accession No. AI636422
  unsure (1)..(599): n = a or c or g or t
tttttctcaaggatgtattttttatttcttttttttcggggggagagagtttcactcttgttgcccaggctggagtgcaacggcgcgatctcggcttactgcaacctccgccccccaggttcaagtgattctcctgcctcagcctcctgagtaactgggattacaggcatgcgccatcacatctggctaattttgtatttttcgtagagatggggtttcaccatgttggtcaggctggtctcgaactcccgacctcaggtgatccgcccaccacggcctcccaaagtgctgggattacaggcatgagccactgcgcccggcctcatttcttgcttttatgtttttttggcttccttttttaatttctccaagatctcttctggagttgtagaagccaaaagcttcaccaccttttcacgagatttaccacccttatccaaaaccacatcactcttcctgagttctaggaccttggaaagataccgacagagctcagcattagcctctccctctgatgganngtgctgcatagctacatttacagcctctgctgtcaaatctgttacagcattttgttttgaagccagntttgcatggat

SEQ ID NO: 716 - DNA, 495 bp, Homo sapiens
  Genbank Accession No. AI636631
  unsure (1)..(495): n = a or c or g or t
gattcatagactttatcggcttcttctccacccagcggtttctgcaatgacaaccgcgcctgtacaatacacatggttcactctgttaaagctgcagggcaacgggagggggctgggggtccctgggcaggcatcaaggctaggggtaagcagcagccaagactgggccagtgggtcccagtgtccgacccagagggtggtggcagctggagttccaaggctgttggaaggggtcaggaggaaggctgggaagccaggggctgcagggagaggacagtgcatcancagtagcagggagggggcagggagcaaaagggggcccatgggacactgtcagggcaagagggcatgggacacagcacctcctatgtccatagaggatttttgctgcaggaacaagacagatcactgtataaaagggtctgtacaacattacctatgatacaatgttcacatatgatacaaggctctttccctctttgagttttaaaaaat

SEQ ID NO: 717 - DNA, 547 bp, Homo sapiens
  Genbank Accession No. AI638295
ttttttttttttttttttttccatttaaacatttttataatttgtttcattttcaaggcacaaagagtttatgtcaatcattttaatgtctaaaaatacaaagttagcactagtaacatctggtagtctaatcatttatcatgcttaaatgtaacattacaaaactacattttaaaatctgccccctaaccagatgtgaaacaacgtggacaagggtgacatgtgctaaacccaatctccaaaaacgtatggttgacaaagacagctgactgctggggtaaaactgcagcagtcataatcgaagagcgaaagaggccactctattaaagactttgtttcttttgctagacatttttcacctaatcccaggatagtttctgttaatgcatcttactctctttcaaacgaatcgtccctagagcaggtgtacacattaaaaatgagctttatagcatcaaacacataccacaaccaactctacaaggagggttttctgtaagatgtgtacgactgtccgaagaacacattctggctgataagtctcagc

SEQ ID NO: 718 - DNA, 718 bp, Homo sapiens
  Genbank Accession No. AI638445
  unsure (1)..(718): n = a or c or g or t
ttttaaagtttgaaaaaataattataaagtttatttaaatgttgattgtcccaaggtctacagtttcttttctgttgtgtcatcagtgacaaagagtaaaaaaaggaaactcccatatttagcactttagagtaaaacacatggatcatcgttattaacagtcctctgggcgtgctggagctcactgagaaggcttctattttgagcttggaatgttgtgctgagctgtgcagcctgttcctgcatctgttgttcctgcattttctgttgctctgccagccaattttgtttggctatctccatttgtctcacttgttcctgatggagtctctccctctcctgcatcatttgctcgttctgcctttgaatcgccgccaacctttgcgcttcagccttttcagcttctgctttcacttgtgcctctttcttctttttttccgtctctgtgagagcctggtcagtctgtaatattgcatgactcacagactccttggactttaaatatttctgcagaacttcttcagcctgtattcctttccgaggctcccgatagtactttgccctcagttcttctgttttctgaatgaagagattatggcctnctggcttagaatannatccctgcttcactgcttcttctagaggaccaaaaatatncctaagtaaagccgagcaataatccgaggatgctttcagggtccgttaacaaatgtccatc

SEQ ID NO: 719 - DNA, 639 bp, Homo sapiens
  Genbank Accession No. AI638611
tttgtttgcagcacaatttattatctggccatagtatttgggtacattatcaggtaccgatttaacaccatgtaacctctcttgacacagagcaacccaaaaagaaaactttaaaatgtgcaacagcaataaatatcaagctttgtcatctaaaatgtataaatataaaatatcagtcatttctggaaacatcttaagaaaatccggcaaccacatgtccatgagtaggtgtctgatgttgacggtgcttacattcagaacatatcacctcagatccaacacaattatttttatgtcttttaccaacacatgtttgcatatactgaacagcctgggctccttggtgtgtggatgaaagcccttttttttacaagcagaaacctcaagcatgccagcattggtgagcctgaagatgccagtgtctttatgctttggtgagcaaacaatggcaatggcctctggcaacatgagttgataggaacagtgagtgtgaagatcaacgctggataaaaatgcagtttgagtgggatgtgtatggatccatcctagagtgaggagatcatgttgatcctgaacattgaataatttctctacattctccatgtcacaatagtctggtcccgcagactgctttggcac

SEQ ID NO: 720 - DNA, 463 bp, Homo sapiens
  Genbank Accession No. AI640180
  unsure (1)..(463): n = a or c or g or t
aagtgacaaggaaactgcatttttaatgtaatttttaaattactctaaatagctacctgtcgctggtggctaccatatcggacagggcaacctcaggcaacaggacatctctaacaattaataacaaactagcaaagaaatcaataaatttataaaaataaattggggagaaaaaccgtattccacatgtaaggggttcccccataggatgcccatgcatctggtgattagcattctcttgcctttcttgtgtttcgtgcctttgttttggaaaacttcagtgggtgttccttgacagctgggcattagaaaatgcagaggacagtgaaaagatggcctatcagaaccagnggtcttgagagtagtaactncagggcttcattgtaaaagcagctgttaaaacaaactctcctctgtgaatctcagagttcaagttcatcgtggccataagttcagttaagga

SEQ ID NO: 721 - DNA, 451 bp, Homo sapiens
  Genbank Accession No. AI640222
  unsure (1)..(451): n = a or c or g or t
ataacaatcatccccctaccttttctttggtttgggctcgatagtgttttccccaaccccaacatactttaaaagtctgtgaaaggtcagtttcttagcacaggtcactccttgctcccccacctgaaagattcctttcaggacctgtcttcccccactggtccttccctcctctttagctactggcctctttattgatgcttcaaattaattttctatcaggtggagggggnngggggggggggngggggggggggnnggggggggggggggnggggnggggggggggnggggggggggggggggnngggggggggggggggnngggggggnngnnngggggnggggngnnngggggggggggggggggggggggggngggnnggggggggggggggggggngggggnggggngnggngggggggnggggggggggnngnnggnggggng

SEQ ID NO: 722 - DNA, 442 bp, Homo sapiens
  Genbank Accession No. AI640523
taagagaggatgtctcactatcttgctcaggctggtctcaaactcctgggctcaggcagttctctcaccttggccctccaaagtgctgagattacacgcatgagtccccacactcagccacaatgctgattttcgaaacaacagcaaggcttatgccttcatgaagcttgtgaccaagtggaggaaatagctattaaccacacaatcacataatcaagaaggtaatgactaactgtggtaactgctccaaggccacctagtactttgagaaagttatacagacaaccaagtcaggcttcctcaatctagcagtctattgccaaaaaggagcccttgctttgatctaggagttgatttagactagctttctggctgacaacacaatgaacacagctttagaaatcacacaagtcacactttaaataatctttcataatcttct

SEQ ID NO: 723 - DNA, 478 bp, Homo sapiens
  Genbank Accession No. AI650477
gcggccgctccaacatcagaatggtaacctgatgttggagcggtcgcaaatcttttttttttttttttttgacaggacactgatgacattgaaagtcctaaacgcagtatccgagacagtggctacatcgactgctgggattccgagcgcagcgactccctctctcctcctcgccacggcagagatgattccttcgacagcctggattcctttggctctcgctctcggcagacgccttcaccagatgtagtcctcaggggaagcagcgatggtaggttggagacttaataaactatccatcttgaaattaaacatttgcaggggctgcattgcgcctggcagagggatgggcactgggaaagcaggctccatatccaccttgccggaacttagtaattctataaactggcagaaaaaagaagtctttgaatgttgtttttcatggtccttagaattttggttggctttgccagtagtt

SEQ ID NO: 724 - DNA, 588 bp, Homo sapiens
  Genbank Accession No. AI651606
  unsure (1)..(588): n = a or c or g or t
ccagaaaaaaaaatctttattctttaactcctgacaactttttgtttccttcttctatgtcaatacttttttttactgtgcctctgggagaaccagagaatggtattgggttcaaatgtttacgtacctttcactccaatttctaacatttctcatggtcacatactcaagatgttgccagaaaaggggatcccaatctagaccccaagagtgggttcttagatctcacacaggaaagaattggagcacagacaaagaagcaaatttattggaaactactccattagagagtagggcatgcccagaaagcaggaggaggaacccctgtcctttaggaacatctctgcttataagaagctataaggagctatgattaaacttggaatgtgcagatgtgctcactaaaggtaggggctgttggtgctctagtgaccattaatccttcaacttgagtctgctcattgacgttatctctgagtaaagtgggctgtacttgngacatctggacattctgcaggcttggtgggagatgtcctatatagccatcaatcttctgtaattataagtggtggtgagcttagaaatgtg

SEQ ID NO: 725 - DNA, 359 bp, Homo sapiens
  Genbank Accession No. AI651803
ttttctccatatctgtgcatcttcacacttgttcaaggctgggattctcacaagggcatgacctggtcacacatggctcagcccgcagagtggcaagaccatcagaggctgtgaaaactttgatgccgaagttctgcctcccaggaccacacagcagcctcaaaactcagagcccagagatgagctctggaaatctgatgtcgtctggcaaatgacaaaaccccacagcagccatgtcaaggccacctaaacaagggcttcctctgcccttcccaacctccttagcaaaagggcagagcttttcctgctggacacaggctgccgctaggaagtctacctggatttaacacaaggaggag

SEQ ID NO: 726 - DNA, 528 bp, Homo sapiens
  Genbank Accession No. AI652991
ttagtaaactatcaaatgtttatttaaatttggatttaaaatattttcaagtaaaatatgtacaaaaatggttataaaatggttgaagcaactagaagcgtgacaggtataatacatataaatacaaccaaaattcaattcaatgcaaagttgaatgacatcatattgcaccaaaatttattccatacaaaagcacatgcatcaagagtttccataagatgaaaacaaacacacttacttcatagcatcttaccactatacttacacaaatagcccataaacaccatctggcattgtgattgcagtaccagaactctccccagagggaactcatttagctatagaagaatccattttatttcacatatcacatgcttgtgcaggcatcagtgctaggaaccctaagaaacaacgcaatccacagatgaaagtctctctgcaccatttatatcttcatagataaatatcttagttctaatatgattggaatgtggatgcagaaataaaatgcagttttgctctttaaga

SEQ ID NO: 727 - DNA, 698 bp, Homo sapiens
  Genbank Accession No. AI653050
  unsure (1)..(698): n = a or c or g or t
attggttatgttctatttcctagtgtgtaattcttttattgttctttgtatcttacatatttattatagactgtatataagaaatgttttagttttaaaaaatcccacctctttggagcccaatgagagacacagcttctggcaggcactgatgaaatggaagtcacacctgccccccggaggcaaagcctttcactagttgggcctcctgcagatgttcctcagttctgtgctggtctccccagagctgcaggacagctggctgcacccagccctgggcatccttaggcttcctggctcctggcagattgctcctgtacggactgccacagagctctgatgttgccctgaccaaagccagtggccccctgcctctgaatcagctccaggaagaaagtgtcctcagtaaaaagggacttggtgaagacctgaagcagaaacttgcctttatcaccatctagcaggatcccctgtcgagcaagcagatgaggctcgtgccctgcagctcggatctgcctctcctttcctggctgctggtagtatgccccagggggagccaggaactggcctncagcagttgccacccnctcagtggcctccacaatgttaggcgtatacagccccacgtgctgcangcctggccccttgtgcncggccaggaactgctccnaccctgtcctgtcgtgtcgtcgccccgg

SEQ ID NO: 728 - DNA, 620 bp, Homo sapiens
  Genbank Accession No. AI653211
gtcatgaccatctttaataaaaaataaattagttctgggtgggaaccatttcaggaggcagggagtggggctaggggctgggcggggtggtgggggagcggatgctcacatttctctttttcaccctctgcccagctgggccttgctctggagaggcagtctctttcctcctgccttcctgagtaaggcaggattggcagtggctgaccccagccctagctaattagggaggcaggggcagagatactaggcaaatgagaaggggtcagagacacagggcggcttagaagatgtgaggtctgaacatgagaaatgaggcttagggcacaaaactggagttggtggggagaccacactctaagtagctcagattagcaaggaactgcagacttgctttccttttcacctaggaaagtctcaagggaacaggtcttgtcctctcaggctgtgtaacctctttttgaaaagggatacacgtttgagcacacacatattcatgcagtcccaaagcacacctgaggcatatgtcaacacccatcacacacccatggcctgacacagccctgaagtcattgggtcatcaccctgggccaatcctggcctcgggccaatccccttag

SEQ ID NO: 729 - DNA, 517 bp, Homo sapiens
  Genbank Accession No. AI653380
ccttttcctgcctcatgctttattttccatagagcttgtttccatccatacctcctctggtctcatccatgctgattccagggtccaggttctcaggtctgaggtccataatgtcaggtgaagccctgcccataccattgcctagtggccaacacccccgcccaccacagcctgatgaagcctctgtcaaccagggtttcttattccaacagagaatctcgtatccctgagggcacacagtgaggctgcctcactcctcttccatgctaaggatttgcagcaggatattgtacacttcatgttccatgtaaccccgagcagcattcagtagatgattcctgtaggtggagatgatctcttcatggttcttctgggaatcctgcagctgcagggcaaggcgagcattttctccccgaattgctagaacctcttctgaaagctgctccagcttcttcaacaactccttgatcttggcttccttgtctcggcaagccccaatgagatgctccatcttctc

SEQ ID NO: 730 - DNA, 448 bp, Homo sapiens
  Genbank Accession No. AI653441
gttcttgtttgttttctttcttttttttctctttctttagttcacagatctagtaagttaccctcagtttgttttaaaaagtgaacaaagtccatgtaaacatgttcccagggccaggcacggtgtctcgtgcctgtaatcccagccatttgtgaggccgagacaggcaggtcacttgaggtcagcagttcgagaccagcccggccaacatggtggaacccccatctcgcaagggtccgtggcttcattcttgaagtcagtgagaccaagaaccccccaattccggatacagtgccactgcactccagcccaggcaacagagcgagattctgtctggacgtagccccatttctcttcccggacaggtcctctgatagtcgggtaggttctcaatcaagcctctcattagttatttggtctgtcaatccatttcattcctgcagtcttc

SEQ ID NO: 731 - DNA, 457 bp, Homo sapiens
  Genbank Accession No. AI653732
aataaaagattataccagagaaaaacatagtggtttatttaaacaagttctacgtaacacaagggccatcctcaggaagtgaagatcagaggaaacagttacacttgagtgtttttagtagtaggtttgatgaagaatggagagacacttgcagaaatatgatcaggcaaaaagagtactagatctaataggaataaatggagggaaacttagcagagcccgtttgttcagattcttctctgggtccctgtgtcttgggagatagggaactgcctttcctctgtggatacaggaagagcacctctcacatgagggtcctatgatgtgttttagaggaaggtcagcaaaggttttattacctgcttccggggagaaaggtggcaaaggaaggtcagagtaatatttccacttaaaatttgccattttctcaaatccttcagcttaaaaaattcagttt

SEQ ID NO: 732 - DNA, 548 bp, Homo sapiens
  Genbank Accession No. AI653782
  unsure (1)..(548): n = a or c or g or t
ttttttttttttttttttttttttttttttttttttttttttttttttttggggcacggggttaatttttttccttgctctaaaccaccttttttttgagggtgttaatcctaagggctggggggggggcaagcccttgaatcccaaatgtgtcaaggctcctggtcctgggtgtgctgggggataaatgggcacatgcccccacctggggtgggggaccccctttaataaatgtagggcatgatgcggtaaggcacaccccggcagtactcctgccaggccaggccgtacttttgaaggcactgccgttaatcccgggcctaacggggcaccaacagcgcggtgaaataaaggaggtaaaattagggcancaggtgtgacaccccgcagggcaaggaccaacccaaagccatgatgaggtctccaagatagttgggatgggggaccataccccaccacccaaacaccaacagtttccgccctgtggctgtagagatggttctaagcccagccactctggggcagaaggattctttngaaagtgtttt

SEQ ID NO: 733 - DNA, 436 bp, Homo sapiens
  Genbank Accession No. AI656113
tttttttttttaatttccaaactctttattatgtggtttacagagcatctgaagattggtttcatgagtctgaacttagtgtgaaagatgttcaaattcaaatccccaagccagcgcatcaatgtttttgtaggcttcacagtgctgggctccgcatccttctttggccgccttacaccaaaacgctgagcttggaaatcaaaagggtcagcccagtttcagtccctcttggaaaggtgacatatgtggttgtttcctcctttttttccttctctttttcttggtgtttcatattttgtcctttcttttttcccatttatttgttttctctcttctcttcttcttaatttttcccttggcagcatcttcaatacttgattctgtctggcttcctgaagacgatgatgaggaagaaggaaacataggatcatctgaa

SEQ ID NO: 734 - DNA, 542 bp, Homo sapiens
  Genbank Accession No. AI656161
tgaattttaaaacataatacatttttatttctttaaaaacgtatgacaaaatttcttctgccatcggccatgctcagatttatacattataaaatgatttaattccctaaagtacaaaaaagaatggctgaatctccaaagagttgataaagactgaagatgtttataaggcatgcttatgtatactatttcaagccatctacaggacttgagacaggaatgtttagtgtttgcaaagccatagtcactgagccagactttgtggtgatccagagatcctttcatttcacagaactgtccttgacggcttctcccaataaagatttacaaccttatctcttggctgtggcagtatgagaggatcttctttcagtacatatactaaagcttcattggagtagccacgcttaggaagtacctaggaaaaaaaataaaggaagatgatgatcactaacattttctaggagttacatttttaatattatttcctattaaaattaggtctcttatgtcatgtggatgactacttcatgtaactaatt

SEQ ID NO: 735 - DNA, 503 bp, Homo sapiens
  Genbank Accession No. AI658662
aaaattaaatttctctttattcaattgcctctgagtagtgctgtgatttccaagtgccaggtagttaggtgtacaaatatacataccacagaaacatacagtttttaaaaaaattaagaaactggctgcatctgacgacatcaagaaaaaagataattctgattcaagggcttctccagaagatggggtttcattggcatgacgctcataggatgacctgtcatttttgtactattttttctagaaccatagagggatgacagtaactggcttcttagagcatttttgcctggtgtctggatcctgtgggaatttattagcctgctttgtggcccttggccaaccctggtaggacatctagagaagaattcaattctgctttttcccagaataattgttgactaactcggcaacaccaaagtgtcacaggcatctttgtgtcccccagagtccaatgatatgtggacccaagaccagcgagggtcatgtttctgggaatacag

SEQ ID NO: 736 - DNA, 530 bp, Homo sapiens
  Genbank Accession No. AI658928
  unsure (1)..(530): n = a or c or g or t
tttttttttttggggtacaatgaattgaaacatttattgagcatcagtttataagttctttaaggaagaaaggagcaagcgagagaaaagagtcattttgccattttatccatttattatgtacaatattaaggcacaagtttaagcagcaaaggagaggaaaatctttggctgaccaacagcatcaatatttgctgtgggggacaggcagtgttcttggaatccccacactggtacacagacccatttggctgtatggccatgtacatcacccctcaatacagactggcaatatgaagacgtcaaacgttacagccagataccagtctgctgggaagagccggcacgagcacggcacactgccaccaagcacagcgacacacacacacagagcaggttggagggcagcggcagcaggacagctgaaatcgggtgcccatgcttaccactgtttcacagaattttacacaattctgtaagtgctcatggaggaggaggctccctgttcctcctcanaaggaaaaaaaaca

SEQ ID NO: 737 - DNA, 654 bp, Homo sapiens
  Genbank Accession No. AI659533
ttatacttccaagcaaaatttattagatgtctattcaagaaaaacacaatgacctttgcttgtaagaattcaaagtcaattacctggaagccaggtatgaatagttttttcttttaaaatcagatacagagagtagaaacagtaatttttcttaaatatgacaggcaacagatattgaagtcttttctcataaatggcatcaaagagaattattcatttatcagcaaagctgcatgcagttgacttaatttcaaacctgaagcctttaaaatatgaagctggttatgaccttgacagaaatcaaggtaggctactcaacgatgtttctttaccttcttcctaatgaaattcccttgtcatcagtcagtagatatgtacatttcatttggcttctacgatcttttaacttcatagatttttgcataaatgctatctgacagaatcacactatctaggggtgcttgtgatctgtgagataaggagaggctagtctgctgaaagtgttgtcgcaagataaagaccaaattaggaaacgcccctgttttctcaacaactaaatagtctgtacaaaaaaagagcaaacatatgtacaaaattctagaggctacatacattgtgaaaagatcaatcactgtccatgaaagagatgccata

SEQ ID NO: 738 - DNA, 678 bp, Homo sapiens
  Genbank Accession No. AI659657
aatgaaaagaaacatttatttacactttgtacatatcgattccaacaaacaataaaaggcctacacatcagtataatcataatatatgcgaacttccgatcttctcacactttgcagtgatctgatgctttcactcctggttctgatatttgattttttgaacagccttcttgaaaatgacctacacatgaaaaagtaaattattggatccaggcaaacattacacgcagacaagaaaagtgtaatttctttgcagtaatataggattttttgtgcagattcatctaaaagcctgtctaagtgactaaaagtaaaaggaattctgcacaagtgatatggtagaaagcaggtaaaaaacacagccacaacaaccctgatgctctggttatgttttcgctttcggcttgactgacttatgaattgcctgctggatttgtggatgtacctggatatggctatgtaacatccgatcagaatcaccagcacggccacaaacaagcagctgttcacataggtgactgccgtatgccatttgacccccaaaggactgttaagttttgagcagtcatggatattgtgctctgttggctgaccatatgtcatgatgatgtctggcaaagatcaaacagtcatgatcaccccaacacaaacagataaaaccttcgtgaatgttatgct

SEQ ID NO: 739 - DNA, 521 bp, Homo sapiens
  Genbank Accession No. AI659898
  unsure (1)..(521): n = a or c or g or t
taatagctaaataaaaagtttatttataatttatgattgggtcttctttcgtaagaatcaccctgtataataatacttctagtctaacttcccccaatatccagtatttttctaatctatgtctttgtccaccttctcacccttcactctttgcaggtaaaaggctgattggagtttggcttcttatttctctccggacaactgtggcagagaatacaaccatcctatgcataacagcctctttctagctgaacaagcagcctgcactaccactccattatgagaagacctangtagcctgagtgttcatccagcagcagtctgtgggtcactgtgagttcagaccctgctctgggcagattcaaaaggcagggtgtgaggatggcaatgcccacatggcaaaagcctgtcctttagatgcggcaccactgagagatgctgtgtcacaggaggttggcctggcttatccagctgtctgttcagatgttcccataggattctctctgccagcagagtccacg

SEQ ID NO: 740 - DNA, 490 bp, Homo sapiens
  Genbank Accession No. AI659966
cggaattaaaataagtcaaaaattttaatgggaaaatctgtgcccagtcctagaacagacaattcaattcatagcgttaccataaaattactgtcaaaaaaacgaactgaagtgggagaatgagtggcgtttcaggccatctcgagtcgcagcagacacatgagccggcgccacgggcctggctgaggagcaggggctcatgggcaccaccacccatctgggttttctgaggtcgtcggcggcacgttcagtaacaaagcaacggctggcgatacatggcagctcacgcagcgctctttcctgcttatcccccaaacttaattagatgtactggagttgatgctgccagggtctccagcaggtgaggcagttgcaggttggggggtgccccctgccagctaccctgggcctgggactgcaggcagcctcccccaggaggaggctggagagaggccagagtccgcagggtgaggaagcgtccccagcgctg

SEQ ID NO: 741 - DNA, 601 bp, Homo sapiens
  Genbank Accession No. AI660247
ttttttttttttttttttttttgggatgggttctgtttattaaaatcctattgctcctactggccctgtgtcccgcctccattcctgtggttggggggaaggaagggcaacccgacccctttccactggccccatcagccctcagtggtcacgggcagtagccgctcctccagcagggttatggcaagcatgaggccgccccccagcagcagccccagcccctgcaggagcacatggggcgtaggcaggggctccggaggacgaaacagggctggtagcatgtccacaagggccacatagaggaagaccccagcagtgaccccaaacacccagggagtgagggggacagggcccaggctgagccccacccccaggactgcaccccccaatcccagggctccagacacgaggctcagcagcagcagccgccgaaaggacagccctgactggagcagcatggcaaagtcacccagttcgtggggcagctcatggcagaagaccgctaaggtggtactgaggccgctggagaagccatcagagaaggcagcacctatggccagcccatcagtgaggtgtgtagaccatctcccaggaggaccat

SEQ ID NO: 742 - DNA, 501 bp, Homo sapiens
  Genbank Accession No. AI660548
tggcaaagagttttaatggcaaagttggctgcagcgacaatgcctctcggggtggggccggaagccatggtggggaaggaagggtcagcgggcggcagggcagggccgggtccctgaagaagcagcgagcgaggctcagcgggcagtggcgggcaggcaggcgctactacatgatggagcaggcggacagtgggttccgcacgtggcaggtgcacgcggccccacagtactgccggaaggtctggtagcagctgccctcgggctcagccccccactgacccccggatggggccgtcagcgcctcaggcggcaggcggctcaggatggacgtgttgacagccagcgcggccaggccgtagtcggtgaagagcacagtctcacggcggcaggtggggcaggagatgaacttgtacttggggcaggactcgtagagaatctgcaggcactgctcacacacagagtgcaggcaggacagcacgcggggcctccgctgggtgacat

SEQ ID NO: 743 - DNA, 518 bp, Homo sapiens
  Genbank Accession No. AI669065
  unsure (1)..(518): n = a or c or g or t
ttttttttttggcagctcactccaggtttatttcagggcagtttgggggtgggggacaaagacccccctccagctcctaaactgggtcacttttctcccaggtgaaggggaccatcctcatgggatcctatcgatgtgagagctttgtgtccaccaggtgtggctgggtgcaccaaggtgaagggtttgagggctgcacagggacccccagcactgggagtttggcctcctccctcagactggatggtttcccagggttggaaaggggcaggtctcccctctcagcttgggacttctcagagggaggagctgagtgtctcctccctcagacccgcagcccctcaaggtgctgcgatctgtgccaccctctttgaccggtccctctgccctcagactagcggaagcaaattacacctgaaagtggaggagcgggtctctttctttcttagacccagggcatttggcaaagtcttagaagcagaaagaatcagcaggggtcccatttcatccncaaaagc

SEQ ID NO: 744 - DNA, 596 bp, Homo sapiens
  Genbank Accession No. AI669212
tgatgtaacatttgttatttattggaaaaagctggtattaacatatttatagttttattcaacaattgggtaatttgtgagacaccaaagaaaaaaagaatgcacctatgagttacagagtccaaactgatcagggctgacaacttgaccaccatgtatcccacaccaccacccccaccaccaccaccaccaacagcttcgtcctcagagaagagctaaattaaaaacaaaaccaaaaaaaccccaacaacttcacaatgactatgtgaacgcccgtacattcgagagtaccaggaaatgtaagcagagccaggatgcaagtctgtgactattacactggtccttccaccgtttctggttttgtccctcccctcgacaccttttcttaacacacatttgatcttcacaatttgctttggacatcattattttccagggatccagagacatacttttcttcaaagaagatcttttcctttcttttttcttctttttggtttggtacccaaagtttaaaacagaagtaaggaactaggaactgtattaagacctccttttgaaggacatgtaagatttgtactttgaagatggtaaat

SEQ ID NO: 745 - DNA, 632 bp, Homo sapiens
  Genbank Accession No. AI669308
  unsure (1)..(632): n = a or c or g or t
ttttttagtgttaggaagatttatttccaaacagtggcctccacactgcgcggcagcacttctttttagtatttgtaagcttttgcccactttcaattgagccagccctagcgtggtatgtattgcatgctgaacaatatagagtttgtttttcctttctgatgattttaaactcttaaagaacaggaaagcatctggtaagaagaaatcatgagtccgtcagtgcccttactcatatgcgtctccagtggcctcatgttgtggtcacaggagtttcctgttcacagcaatgtgtgtgatatggacattttcattcaagtatattaatgtagatattttaaagtgggttataagtttaacattgtctttaaaatagaagtcacagctatcttccagcctgtcttctctaggaacgctgttgacatgccagggctccgtctacactggaagcagctatacagctgtgaccacatcgagctttagccagtcacacttctggaactgtccgttcagtccatcccatttctggctaagctcctcacgtangtgcgtangttctggttaataaaattcactggtgtgtgaaagacatcacggagcaaggacggcgtgtgactggccaccttcttgcc

SEQ ID NO: 746 - DNA, 692 bp, Homo sapiens
  Genbank Accession No. AI669751
  unsure (1)..(692): n = a or c or g or t
tttttttttttttttttttgagggtaaaatgggcattttattacacacagtagcataaatgggataagaataaaatctggagcgtctctgtaccaattctccaattaatagctgctcaacctaaatatctttgtcttagtccagggtgagaaatgggatctcatgtaaaggaaacctggggtccagtccagtcctactgaatgctatttagtctgagtaaagaaatgtctgagggtcaaagccatttgggaggtctccctggggatagagaggttgtcctaaataggtccatcanaaaagccaggaatctctcaggcccacaaggcaataaaggccatgaaggcaaaaccagcggctacacagctccacttagctagaggggcctcaggactagctagctcccgtggaagaatttctaggaaggtgacatacaggaaggtaccagctgccacaccctctaacacagcctgggctaagccccgccctccttcagagtcccctccagtcacagccagccctacggctaggcccaggggggacatgagagctaataatagtatggagaacactgcccatcgtgagctggtacctaaatgcactagccgcattcctacaccaaacaccacaagccccttatgagccaggacagcaaggcagagnctgacggtagctgctactgtcgctgcagcccc

SEQ ID NO: 747 - DNA, 646 bp, Homo sapiens
  Genbank Accession No. AI669815
ttcagtgtccatatttcaaaaatttatttatctcaaactgtgcataatggagtaaaaacttaagttgaaaatgtacctgttataaggatgatattagttcaaatatatacatggattctcggcagactgattcaaataatacagagccgaatcttttaaaatacaactacggaaaataaaggggggaaaaccttaaaatatcacaataaatttacagaaatattacaaaccataagaaaatatttcaaacacagtaatttcatggttttttttatctgaacaaaaatggaaagtggggatcgaacaaaagctattataaattaccaacggtgtcaacctgcatggccatttttgcttttaacagtaagttataaaatttagtacagtctaaaacttttgccctttttaaacaagaccacagagatggttcgccagtacttattctaattttttccttttgtacaatttttaaacaattaaaatgtccaaatttgaataattttcttcttttcacgtttgcaactgtcctaaatttcagctgcagaatcaaaattcagcaagaagcctctccttgaaaaatattggcaaattctcagcttataaacaatggacattttgattgccatgtttatctcgataaatactg

SEQ ID NO: 748 - DNA, 593 bp, Homo sapiens
  Genbank Accession No. AI669827
gcttttaaaatgtgagtttttaacacttgaaggatttcattcttaactctcaattatataattacaaaaaaaatccaagtttcaggaaaacatacttaatcctaacataaaattcatgtcacttatcacaaagacagtcaagtgtataaaggagaaacaaaacagaagcagtatttacaaatttaaactacatgagatgttgtgaacaatcttttgttaataaacagcacgttacatacttttacatactacatttcaaaaatgcatctgtgaataatatgataaagcgcatagtgttgaagactttaaattaaatccaaggtcatcatgttgaagacctgaaattaaattcaaggttgtagtgatgaaaaatttaaagtcaaggtcttagcgataaagactttaaattcaaagacagattgtctaaggacaaaccactagcgttcaagttgtttagtcaattagttctctgtgagtacaaaatattaggaatcactaaatggattagcctaattacaaattttgatcatttctaaataactcacaactgcaagaagtcttttcacagaatgagtcacatagtttctctctat

SEQ ID NO: 749 - DNA, 798 bp, Homo sapiens
  Genbank Accession No. AI670876
  unsure (1)..(798): n = a or c or g or t
gttcttctggatgaaatttctgagatgttactagatgggggatgtgggggtgctaggaggggtgggagaaaagcagaaagcagtacaaatacgagacttcaagcagattcttagagcgactgggaggtaaagacatggagagggtttggtggaggctctgggtgctacgacaaacacacgaacactagccgaactttccaaaacgtctattagtctaaggaggaaatgcagcaaggaaggaacgattctgcctgtgctctgcgagattacagaccctctctggttaatttttttcctttttttcccctacaagcggatggattcgatcttaactttgcatggagaacagaatgctgtgtgtgagtgcgtgggtgagtgagggtttgacacacacaccagccacactcccacccccatctatgagggcacacaccacaccccacatcccggcaccccatttctcatgctttaagtggaagcatcttcgcagcacgaaccacaggtcccttggaaggagagtctgaggtctttgccttttttgcagtcgcattgcatttatactcanggaggaaaaanaaatatatcaccaggcacaaagggaggaggggcngngagaggaangagcgggaaagggangacgagangcccgcgctctcaggtgaaaataaaaattgggaggtcagttcccggatccgattctctcnggtcattttcttgagtttcattctgcgattttgaaaccagattttgacttgtctgtcttgaaggttattgtctttgctatctccangcggcgct

SEQ ID NO: 750 - DNA, 504 bp, Homo sapiens
  Genbank Accession No. AI671829
cttttgttaaacacatttattgtcctgggctctagaaaaatgagcaagaccaggggaagaagtcaattctttccataatcagtgacactaatcttggagtaagtgtgagtggctgaggcatccccagttatgggtagagagtcctcttcggtgagttcactcttctgcttggatcaattttgtcttttctgaggaaatagtatccatgtggcttggttgagatgttaaaactctgacagctccacagcaccgggaattgcgaaggtagagggctcctagaaaacagtaattatactgatgactcaatgatgacaattgctaattttcaaatagcttaagagtccaggcactaaagtgtgagttactcatgtacatttttatcatcactctaaagatgtccagactagcttcatgggcatgttaacttctacagttgcaaatggccctgcacccagaagagccccacaattggttcaatgctctgctatcaccatctggatgatt

SEQ ID NO: 751 - DNA, 574 bp, Homo sapiens
  Genbank Accession No. AI672049
  unsure (1)..(574): n = a or c or g or t
cccagctaattattttattttgtatttgtagagacagggtctcactatgttgcccaggctggtcttgaactctcagtttccagcagccttcctgcctcagcctcccaaagtgagccactgtgcccagccagaggctccagttccactggtgttgggtgaggcctagtgagagggtgggcagagggccttgttgaatctgaactgcagcaagggctcgcagatctcaaaggaggcagggaagtgtgctggggtcccgtcagcatcgcatgaactcagggatggctgcatttgaggccagggtcaggctgtcctcacttatcaggggacaagagctggctgatgccgattggaaaggatagaatcctagtgagctgccccagtcccggtaagcatgagtgcctgcatatcctcgctcttcctcagttccacccccttcctggggtgtcacaggctcccggcagaaccagagcccatgccctgcatttgggctggcacatntagtggaaccagccagagaaatgctgtccctccttcctggggaagtggtggcaaacagaggcgccaaggctctctc

SEQ ID NO: 752 - DNA, 536 bp, Homo sapiens
  Genbank Accession No. AI672414
tcactctaaagatactttttatttaaatattttatgatgatacatatacaaatataatcttccaaaaaacaaatgtaaaactaatacaaatcactttttcaggaacaaagaaaatcatttagaaaatgtgattatgctaaaagaggcaggttaggtttccaaggctgctcaaggtggaagcttaagaccaacttttgtttgagtacacaagtgatatttacattttcatatactagtgatatacctgttgcatacttggcaaaataaaactgatagtaagtctataataataaaagaaacaacaattactaagtaaacaattctagatgatggaagagtaacctccatttaagctacagacttagatgtctaaaaatatgtgtcctgatctgtacagttagtgggagcacactatataaatcctttgcatgacaccattcaacaatattttttaaaatctacaaaattttaaagtttcacttccctagcaaaatatcttcagtcaagaaattagtctttgaaaattatgaaaattg

SEQ ID NO: 753 - DNA, 529 bp, Homo sapiens
  Genbank Accession No. AI672527
ccagtttgttcaagaacctttattggaaaaatgtccaacaagtgatatcactagcagctgaaggggctgccaggtgagagggggagcacctgaggctccatggaagacattggagtagtgcagtgcagcatctgcctctagggtcagacaattccttttatttgctggggtaagaggagtacccacagaaacacccctctctgagggccagaggcaagatgtggggcagctggggatgctcagagtcctgatacaggtgaaatggggcccccatttgggacctaatggagtagggtacaactagtgactctcccctggaccggggaatggaaggagatatcccatctgatatccactccccaggtccaggggcacagactctgaacagacctaccttctggctctgctcacagtggaaagaggatgggtaccaggcctgagattgtggccgctctccatccagaccttccactgtgatgtcacctgggcttgaactgtttgaaggtagccggtcagaacccttgagagt

SEQ ID NO: 754 - DNA, 201 bp, Homo sapiens
  Genbank Accession No. AI673818
gttttttttttttttttttttttttttttcagttaacaaacatttattcagcactcgttatgtgtcaaacactcgttatgtgtccagcactcttaagtgctggagatgtaatggaacaaaatgagacatggcctctctcatgcagctcacagtctgggcaggaatgtgaggatggctctttaagtatatgactctttatca

SEQ ID NO: 755 - DNA, 576 bp, Homo sapiens
  Genbank Accession No. AI674088
ttttgcagacaaagtaaaatttattgagacagacagaaatgcacctactcaggactacagttaagcatttactattaaccaaagagttgtgttcacattccagataagtctacgtggaaaagcattcagaatttactaggtttttgctacatcactatttcatctacaatagggacaacaaactgacactcaggatttgatgggctctcattacaatgctatacatttaacaggaacaaacatcagtgactttgagaaaaagttataaaaagaccaaaaccacccactgtagaatgggctcttggatgttactgtacagcgtggtcaaggtaacaagaagaaaaaaatgtgagtggcatcctgggatgagcagggggacagacctggacagacacgttgtcatttgctgctgtgggtaggaaaatgggcgtaaaggaggagaaacagatacaaaatctccaactcagtattaaggtattctcatgcctagaatattggtagaaacaagaatacattcatatggcaaataactaaccatggtggaacaaaattctgggattaagttggataccaagg

SEQ ID NO: 756 - DNA, 547 bp, Homo sapiens
  Genbank Accession No. AI674123
  unsure (1)..(547): n = a or c or g or t
tttttttaatgataaactaattttatttgcattttatacatcaaatattatatctttgagtctaacaaatttctgattatctatttttaaaaaatgattaaacaaacacttaatatcaaaggcagagtcacatttgttcaggttcatgttgataataactggtcttgaattcatgtaagtatctggaattggccagcataagccaagatgatggcgatggacctttattaaacagccatcactgcaatgccacactattccttcaattttaccctctttgcaatcttcaaaccaggacaggagatcattgtgcttcaatgaaggtagatttcttatttgaaatgctccatgtggtataagaagatgtaatggatgtttcttgctccctaacccatatgggtttccattgatatttgttcctatgagttccagtgtttgttctaagagatctgaaagtggcactgcactaatttccaaaagtccagaatcatcangatgatgttttagtaccagggcaatttcaaattcataattaactacagaggaa

SEQ ID NO: 757 - DNA, 563 bp, Homo sapiens
  Genbank Accession No. AI674565
aataaatgataaaaatactttatttctttaacacagaatatacaatattgcactccagttgcaaatagtgtatagaaaaagctctgtttagaaactgccatagcaattgtctaagtctactaatgttttctggcatcaccaatgataaccacagtgctgaactttgaaccaactgaaaaaggggaatgttcaataaagcctcctttttcttccagtttcagtgcccagtagtttaaaacattctattatgtttaattacattttgaaaaattgtcgttctttcatgaacaaataaaagtaccttgcagccgtcactattgcccattcttgtgggaagcaatcgcaagcttttcatcccgactgaactaaacagtctgatttttctcaaagtcactcagcaaattgcggtaattcaggtttaggcaagaagttctttagttttactttttatatatatttttagagacagggtcttgctctgtcactcaggctggagtgcagtggtgcaatcatggttcactgcaaccttgaaccccaaggcacaagtgatcctcccaccttgg

SEQ ID NO: 758 - DNA, 504 bp, Homo sapiens
  Genbank Accession No. AI675419
ttttttttttttttttttttacataaaaacaaaggccaaatctccttctttatttaggtaaccacctcataccatgaaagatcggaggcagcttataagagacacatacactttaagggtgaattataaataaaaagtacaaaatgagaccaggggaaatataaattagtggggcaggtcgggctccagtgggtggcaaagcagagaacatctatccagttagcctatgaggcttgaccctcagagttgctgtccttgggctggacttgaccacctgtaacttaagataaaacagtcccacccttaaggtcatcaaatgaaagacacaaggacagcatagcagaggcctagctggcttgtcagaaaaatgcacgggagatttcagttggctaaaacctcaatatgagccactgcatggccaggctgtgcaaaggagtggggctccattaatagtgcacggtgtggccccactgaggaggagagagtcctcccgcacacagcact

SEQ ID NO: 759 - DNA, 562 bp, Homo sapiens
  Genbank Accession No. AI675453
ttttggcatttctccaacatttaatcaggaaaaaacattccatgaacaaagaaaaactcatgcaactaaagaggagagaacggggggtctgggactgtcagacagggccagattcctcagaggaggcagaagacacagagtagtaaggcacggccgccttggccccacagggcgggcactggacggagcgggcgctgaatggggcggctgaaggagtcggagcaggtgcagacaacactgaggacgtttggcagtaggctcaggaggaggagtgttctagggcccccaggcccaagtcaggccctggcacaagcctgagtccagccctccaggtgctcagagagaatagggccccgagatgcttgagggggaccctgtggtccagcgtggcacagccacaattctgaggaagctttggaggcctcaccccaagtgctgctggtaccgtgaccccgccttggaatgggtggggtcagccatggcaagggtgaggtgccagaggccagaccgaggctgataatgctacacaaaggagcccagacgggtggcagggcccaggaca

SEQ ID NO: 760 - DNA, 590 bp, Homo sapiens
  Genbank Accession No. AI675886
aaataaacattttcaaggtttgtccaaaagaaggccatataggttcttggctagcggaagacaattcagaacagctgttgcacacttggactatcaccttctccaggctggcagttgatatcttttttttttccaactcatttttattaaaaaaataaaaaaaaatgctccaactatcagttttacaaaatctctaagggaaacacaagagcaaggtgctgaggtaaaaaacacctgaggtagctttttttgtgtgtttttctcgttaaaaaaatctgtaaatttaacgccccgggccaacaaccttggtaaatttctactttcctccacttttttttaaagaaagaaatcattttgctgaatattgatggcttatacaccaaaatgcaaaaagacaaaatacgtgctttcattgtggaatttattctttgtttggttgattggttggtttgatgggttcctgttttcctcttccaaaacgctaggacaagtaccattgactcttgttcttttgagtaaccaagtgtaagttgaagctggtttgtgtgttttgcttttgttccttttgtgtgatgtgataccaggcactg

SEQ ID NO: 761 - DNA, 562 bp, Homo sapiens
  Genbank Accession No. AI676059
ttttttaagtttgttgttttattaaaaaataagcactatgcttgggtttcataaaatttatacatgaatatgtacacagacacaaataaaataatattaaaaataaaaatcacacttgctttcaaggcagtggtcctggcaccccacatacataatcaacttttcctttaaagaaattgcttggcccaaggagaccacagttagagaaccactaataaagctgtagcccgttgcctgcaacattttcaattcgggtttcaaaaatatataaataatttaattacaaaacccaacattttttttctcttttggcacagtgaagcatcggtcaatagcaagaaatcactgaagagcctctgacatgtctctcacactcagtcatacctggaaatgccacatacgtacacggatgggggcccagaaaccccaaacagtagtcatatcatttatagtgtggaaaggttccctgatgtacttaggggggagggaagggacataaatcaatggaagttgcgacaaaaacagtagaaataagacgaagccctggcgttaaagaaagaca

SEQ ID NO: 762 - DNA, 489 bp, Homo sapiens
  Genbank Accession No. AI681180
tgcaatcacttaaaaattttaaattcactcagcctgaagcccctaagtaggctagaaagccagatttggcccaagggcgggaaagttcaccaatccctggtttaaaaataagcctttgctaaaatttttctaagtgactatgtgctaaattaatgttgctcaataaactaaacaatgatctcttatcaaattggtaaagggaatttccacagatgttattaggatacagggaacagagagaaacctaccacacagaatttagtggtctgattaataattaaagttgtatgaaactggcaagaataaaaccacactttgaaacccattctaaatctatcgctggttaatgacagaggtgggcagaaaaagagacaaaggctcgaccatttatggaaacaatctcacagaaagatgagccttaccggtaacccaaaatgtactgccttcttcacagaatgctccagcagaacatagctatcggatctcttc

SEQ ID NO: 763 - DNA, 562 bp, Homo sapiens
  Genbank Accession No. AI681868
  unsure (1)..(562): n = a or c or g or t
aatccataggatagatatcctgctaaaaaaaaaaaaaaagtcccctaagatatttatctcataacatcacgtctttgctcaaaaatgtcagtgcctgcttccatttgaaaatgcctaatttagaatagctagcatgatgtgcacatagttaacattcagtgtcaaaatatgagcgcccttactaacctgaacctgtcttctcagtctcccctacgctccctacaaaatctgtgtttcagcccttattctctaaacattctccctcctctttcattcttgtgctttcatcacaatgcttgatacangataagcatgcaataaatatttactcagagaatgaataagtgcccaatgttggctattaaattttaccaatccttcaagaagtgaagattttgtatatttctataaaagctttcttgatcctgctagtgaaggaatatgattcttcctctccttcccttgcaacactacagcattttaattgtacctccttacgaggagttaaccaacagagcagactattactagtgtattattttcatcctgagaatagggtcag

SEQ ID NO: 764 - DNA, 711 bp, Homo sapiens
  Genbank Accession No. AI681917
  unsure (1)..(711): n = a or c or g or t
ttttttttttttcaaagtggcagctgctcatttatttagccaaaaatagatactttctcgtacaatttggttcacacatatgtacatttctttgtatatatacacacacacaaaggcagacacgtttattctcactgaaactccaccccccaaaatcaaccggacaaacaaacctcacagcgaatgcggggtgccacaaaagcgacttggggagggctgaggaggactggttttatttctttttcttactttctttgtttagttttgcttttaggtatttatacacggacatgcttacaaggtggaactatacagagcgattttttttatacaattattacaacgattaaaaaaagttttttttgtttttttgttttttttaaagaactaggatgaggagagagccgataagaccagggcggcgtccaaatggttctggggccgcctgggcacgggatggaaagctgtcttgagtaactttttctccacttccaaggcactacagcgatctgttccgccttcgggctccgctggccgagcgaaggcggcggcggcagccgggtggcccgcggcttcgggaagtcccagcaggtgcggaggggcagagcccancagggaagagcggggtgcgggcgggggcgnggcgtgggccctgaaaacggcggtttgtcccaagccgggaaacttgcccagcggcgcttgagacagtct

SEQ ID NO: 765 - DNA, 481 bp, Homo sapiens
  Genbank Accession No. AI682297
  unsure (1)..(481): n = a or c or g or t
aaaataaaaatgtttatttttctaatacttaattgatctgataacttctgaaaaatagctacaatgtattagattacatatgctaatttgtgtgtgcttataggcataaaagtgaaatatagtaatgatggaaggtctgagagggaggatttaggattattttgatagtataaggtactaacactactcaagaaacggtacagtattatcagaattcatgtacttattatggcatgtgaaatatttaaaggttataccatattccttaccttcccagggttctgaggtaattttacatgtgtaaaaaaaattctgtggaattaatgtaaggcttcctacatgcattacaggtaaaaggcttctctccagttcgacttcttacaccttctagaaggtagaaaacattaatgtaagcttttccacaatcctaatgggatttcagtccactccaagttccagtatggtgtatggngtcacattc

SEQ ID NO: 766 - DNA, 482 bp, Homo sapiens
  Genbank Accession No. AI683036
tttttttttttatgtacactaatgtttgtatcagcagatttataatagccgaagaagcaacatagatggccgtcaatggacacatggataaacggggaatatttggccatggaaaaaaatgaaatataggttgagcattcctaatccccaaatccaaaatactacaaaatccaaactttttgagtataatgatgccacaagtgaaaaattcaacatacaaatacttaatacaaactttgtctcatgcacaaaattgttaaaaatattgtataaaattaccttcaggctatgtgtataagatgtatatgaaacaagtgaattttgtggttagactctgggtcccatctggaagacatctcattatgtaaatgcaaatattccaaaatttgaaaacatctgaaatccaaaacacttctggtctcaagcattttgggtaaggaatacttaacgtaaacggacacaagctacaatatggatggact

SEQ ID NO: 767 - DNA, 489 bp, Homo sapiens
  Genbank Accession No. AI683864
  unsure (1)..(489): n = a or c or g or t
tgtttgacaaagtcttttattacccttgctccaaaagagttgctgtaatggaaaggagacaagcattggtcgcccttgagaattgcagtctggtgatttacacggagtaacagtctgctgagccagcatgctaggaaatggtgctggaagtttgtaggttgttttaagacagtcactgagatggtaacagaccctatttaatatatttgggggctgggcatggtggctcctgcctgtacaagacttacccaaagcaagtaatgagaacatatgaagcaccaattagtcaaggatccctaactccatgaaatccttgactttccagacttcccaacaggatcaggactagggtgagatgagtgacgcactcggctcaggtacaaaatttaacaggtgccaataaactcagtagtataaatattntagtgcaatatttaaaattatttaaaatgtggatattgtgtccattctggattctcacatttttat

SEQ ID NO: 768 - DNA, 507 bp, Homo sapiens
  Genbank Accession No. AI684559
tttttttacctgtgagagcaacaactttattcccccatgtggtatgaagtgttaatcttacaattccagatttactaaaaacacagtgatctgctgaccaggctggtggtctctcaagtgagctaatatgtccaagatttggagtcccagattgcatgagctgtaacattcttattttataagaagggatactgaggtctagagcactagctggtccaaaatcatatggtgactcagtgaaagaatggggacgagcatactccttctattgtactgtctcgtaaccttaaaatcatctttacacaggtcatccttaaacaatgggaaggaaagcatgacttccacataaagtctggtagccaatttgcttccaccaactgtcccattgattccttctgcagcaattcgaatcttgcctgtgaggtgcaggtgctgacacagagctgtctgccaggcacagatccattggggatcctccaggtcatggtagcagtaataaaggagcac

SEQ ID NO: 769 - DNA, 585 bp, Homo sapiens
  Genbank Accession No. AI684645
tttttttttaacaataacatgagagtttattatcacatgactactcaggaggggacatgaagcggagcaggatggggaaggggtgtaaggaatgggcaagtgctgctggagcagggctgtggccacggtcatggggccaggataactggggctgttgaagagcctcttttcctcagtctggttcttcttccagcagtcagatgcagggacgcccggtgcagaagcaccaggcactaataatcaggagaggcatggctagattccactcacttccaacatttccttctggtctcttttccctttggttgggaacattctccagcagtacagccacagaggggtcagagatgccagaagcagcagaatccagacacccaagagcatggcctgaagggttctgaacaaggccttcagcatgtccatgaaggaggtacataggtgtagccttctgacttcttctggactctgagtgggggctggagtgttccagtcactcgagctggagatgcggcaggcactgttgtaataagagtagccatatcggaaatcttcattccaaagtttgagggcagcgatggctgtgga

SEQ ID NO: 770 - DNA, 652 bp, Homo sapiens
  Genbank Accession No. AI684745
  unsure (1)..(652): n = a or c or g or t
tcaggactgtactccggtccctttattgagactgacaggccagtgggtccacccaaacaaaaataaatttctctcccaaagcctgcctgcaggctggggcacccagcatgtcctggctggggcccatggctgcccctaaccccaacagcacaggtctggctccctgggaatgagaggatgctggctatccagtatctggagatcctaaatgaagagggaggtgagtcctggtggccccctacccccaggagagctggccgcaaatccatgatctgtgttgggccctcggggctcagtcatcggccagggtgatgacgtcgtactcgatgccctggtgctgcagctgttgaatgtgttcgggcactgtctcgtctgtaccaaacaggccctgggcttgggccatggcagcatcagccactgtgacagctgagtgtgctgcagcctcaagttgagcctgtgtgacaagctgctggcctggggacacaggcacatactggatctgggactcctgaaggaacggggctccttgttcatactggatgtgtgtgatctggccctcctgtacctggatgtgatggccttcanggaccacaacatattcctgggggagcaggtgctggacaccatcctgggagatgatatactgcaccct

SEQ ID NO: 771 - DNA, 768 bp, Homo sapiens
  Genbank Accession No. AI684746
  unsure (1)..(768): n = a or c or g or t
agaaagaataaaacatctgttttaattggccagtaaaatacattgcaaatcattagtattttataaacagaaacattaagttataaatccatgttaaaaattgcagctcagtgcagccccaacagctgtgtgtccaaaagtctatttttacaacattttcctccagtatttttgtgacaagaaagttcctatctgccatctagatcaagagcctgaactacagtattttcaaacaagaaccgggagaagtcggtacaaggatacgtcgtgctgtgtatttaaacggcgcttcccacacacctgccgtctgcatcccgggaggacgccctttgggaaaggcctcctcggcagtgtgaggtctggaggggtctgcctggaccccatttttaggatgctcccctccccaataaaacagcagcccccgcccctgccctgcacagcatctgggggttcataacacaggtgcaatactgaccatgggccctggagggacgtctgcaccccgaagcccctgtacctcanactcagagtttcttctcgatggcgggcttcagggtgacatgcaggtaatgcatccccgccagcttcatggtctcgtcgatgcacttgtacgccagtgagtttcctcggaagatggttgtggggtctgggtccgcttcaccttcgcgcttgcgatggcactgatgaatgcaccaccctgccatagtgtaggaagagccgnaccagcgggactggcgnctnnctgctctccgggcaacctttgcccag

SEQ ID NO: 772 - DNA, 678 bp, Homo sapiens
  Genbank Accession No. AI684761
gcagagttaaccagcccatagcatctttcacctttccctgagcctcctctccagtcccaggggcatctttggaatactgcagaaactgtgccacataggtcatgatggacttttcatcaggatcaacaacatccacatcttctggttccagcaatctggggatttttaattcttgttctgcaattctgaaggcctctctcagattgtctttgttggatctatgcttcacactcttcatgtcaattaggtctggtcgcaaggcatgaatgatggccaaaaaagccatcccatttctccaacttgacttaaaatcggtcacattgacagactcataggtggcgcattgttcctgagcccacaaaagaagggcctttcttgcagacatttgccatcttgcttgcactttagagcatttcttagctggaggacttgaggcaggagatgagtcaaccacactcacatcatccagggaaggctgattgtaattgcaagaaagagtctgggcaagcttctcaatatgaaagtgcaggataattgtccaaattaggccaaggataatggatgggttccatcaatgatatcagtaacatgaatatttattagcttaattgatcggtttcttaggaatgtcaaggcatgttctatattgattctacactgggaaggtatagatccttt

SEQ ID NO: 773 - DNA, 768 bp, Homo sapiens
  Genbank Accession No. AI684877
  unsure (1)..(768): n = a or c or g or t
gcttttgtattgcagagctttagagcaagcacagttttatttatttgccttaaaccaatatttccggataaaaggtatatttttcttgtggagattgtagaataactatcatgagcaaaggcagaaagtattcatttcaacttagtaaagacatattttttcactatcacagaaagatgacctttacataaaaattgttacatatacttccatagatactaatagtaagtatgattttttttaaaaaaataactttctaagacaaatggcaaaggctttctttttcatgaattctttggttataaacaggttttgagtgatttttgttctatgaagtattaagtgattctgctgatatctgttctgtgtgtcctttgaagaccagaatataattaattttattctggtctaacatatttattctgatttacattgcttttatgtaacataattacagaatgaaaatatacctttagatctgacatatatcgttgatgaagctcctgctgagcatgttgcataagcttttcatccttttaaaactaaaaactcagaggctcttaacaggaaggataaacaaagctgaaatacgaactctgtatatcttncaatgattctcgacatgatgttntgtattcactggcccagagactcattttttctatgcctggggacattattttctataccattgctatcatctgatttcagctggtcaatctgctcaaattctttccctnatctgagngctaatttttctttgtgtgt

SEQ ID NO: 774 - DNA, 504 bp, Homo sapiens
  Genbank Accession No. AI685069
tttgtaagaaatgcatgtcgacatttttattgatcagaaagtaggtgactggtcacccagaacattctcagagccaacaccagggcccctcgatggcccagcagcaactccagagcttcccacactcagtgtggccccgacccccagccctatctctgcaatgctcactcccttcctacccacagctctttctcaggggagtcccaaccccagctcacacccccggccccttcagagcctccttctccttcttgactcagtgcaggctggggtatgatcctgagcagaggacgctcaggttaaagcaggagcttgcaaatagagttctgtagaaccttccagaaggggattttcaggttcccgctcacccactttaaccatagcagttccaggctagcttttgttggttaaaacagtgacagtagttggctcagtgtgaggtctcagcaggggccactgaaaacctagatggaccgaagccctagggccaactgccctacaatg

SEQ ID NO: 775 - DNA, 652 bp, Homo sapiens
  Genbank Accession No. AI685200
  unsure (1)..(652): n = a or c or g or t
tttttttttttttttttggttttctagatccatgtttattttcagttcaaagacaaagtagaaaacttgagagtggaaaatgttaccttttagttcacactcctaatcccttagtccccataaaataaacattctaaagtgtaagcagtagaaataatggaaactccacagaaacagaaataaattagtttctttcagtcttggtggaggtccttttgccgaacaccatactccactgtgaacagaattcatcttgaacgaagaagaaatctttggcctatttcaccatgtctccagcattgcataacagacatttttcaaattcagtttcttctccaactgcagcaaaaaggcaaagagtagtctgtttcaggagtctgcatcgggtcctgtgagagccttgtccacttagaacaagcctttaacttgttctgtttcggtatcaagatctatgtcataaaagcagggccgggtgggcagtcctggcatggtgctcatcgntccgaccaaagggtaaatgaacccagcgcctatgctgcccccgcgtcactgataggtangatgaagcccttggcacacccttttttgtcaggttgtgagataagagaaaggtggtctttgccatgcagattggcaaatttccaaaaccttg

SEQ ID NO: 776 - DNA, 597 bp, Homo sapiens
  Genbank Accession No. AI686521
  unsure (1)..(597): n = a or c or g or t
tttttgagggtcaaatatctttaaataaagtgccaggaacaataaatactgtacaggaagagagtgcacgtgaacgtccagatctgtggtttcaacctcgagactccaaggacctgcaaggggggtggacaagggacccgggatcagggaggctccgggtagacaagaggggcaggactggggttgcagaggcaagggcccaggtaagtgggctgagggatcccagccacagtaggttccgtatcttgggatggaaggaagctaagggctcccccagggatttggccaaactagcctggggtgagagcctgggccaagggtcaagggtcaggatcccagaggaggggccagggctggaagatccaggaagcactggcctggtttgggagcctggggttaaagggagcccgtggaggccccaggggtgtggtgacccaggggctcacgagtagctctgatgctgttggcgccggcgggcagagcgcatcttctcgaaccgggcctccatctcctccagcactcgcgggtgtaacggacaaccagcttcaccgagccctgggccgncttcagcagctccaccgccttctcatgctgctc

SEQ ID NO: 777 - DNA, 476 bp, Homo sapiens
  Genbank Accession No. AI686894
gagaaatactatatttattgtcaaagagtggtacataggtgagtgttcatcttccctctcatgccggtatactctgcttcgctgtttcagtaaaagttttccgtagttctgaacgtcccttgaccacaccataagacaagcgcaagtcactcagaattgccactggaaaactggctcaactatcatttgaggaaagactgagaaagcctatcccaaagtaatggacatgcaccaacatcggggtacctacatgttcccgtttttctgccaatctacctgtgtttccaagataaattaccacccagggagtcacttcctgctatgtgaacaaaaacccggtttctttctggaggtgcttgactactctctcgtgagcacttaactggttgttttgagtggactttgccatcaattcatagttaggaaaaggaaggtggggtgcagggctcagcatcaggagagaatttcagtcaaga

SEQ ID NO: 778 - DNA, 454 bp, Homo sapiens
  Genbank Accession No. AI688604
tttttttttttaaagaatagaatgtggcctctaagaggctgtttattaggaagagaagattgtggtttaggcctcattccaggtcagctgggcaattctctcaggcttgccatcttgtgtcctgttttcttctacttcctcagtgatgtggaccagggggtgggtgacctgggccatggccagggggaggcccgcagggccctggaccatggtgggggggtggcccgcagggccctgggccatggccagggggtggcccgcagggccctggaccatgggggggggggggcccgcagggccctgggccatggccagggggtggcccgcagtgacctggaggatggccatgccccccacagtggcagtgcccctgtggaaagtcaaatgaacaatgtcagagtcagaggtcagggctaagcttacctgagatcagctctccctcactccacttccc

SEQ ID NO: 779 - DNA, 542 bp, Homo sapiens
  Genbank Accession No. AI689756
tcattttcttttaatttttaatcagtctgtgtcaagaagaaacaggacttgatcaagcttccagccctcaccactctatcagcatagcaattttaaggatcagagctttgtttacatttgtctaaaaccaagagaaggaaaggaatcaactccacagatcaacatgtatttgaagagacacttcaggacactttgggaaattttttaatcaatcagtttcttaggaacaacacccagtgggcatgatgagaccctcaaagtaggaatgcaggaatgataggcaggtgaggtggctgagctatctgggctgggaggccagcctcctggaatcttaggacaaataaaagggggaaaaatccaacctcacacttcttttgaaggtcggatatgtttacagaaacaatttctgttttggaaaataaatgtatggttcaatttggggctgggggaacaatgacaattgtcaactagagagaggctcatgattctgaggataatgttaagtggagtctttttaaaatgctgaaacaaaacattacctt

SEQ ID NO: 780 - DNA, 368 bp, Homo sapiens
  Genbank Accession No. AI690773
ttttttttttttttttttgggagtaacagctgcttttattaacatcagaagggcaacagtacaggaagttgggtagatgtggggacaacagagagactgtggcagaggcaggactgcagatctatggaaattgcctggaagagtcagctgtaagggatgagaatcctgagggtaaaagagaaaagggaaagactcctctttgatcttatgaagctgaaataacaagatcttaaacatgagtgagaatctgttgccccaacctaaggtgactttaaatccaaggtaaaaaacacggcatgggtattagtttgaatagggaaaatgagaactctctttgagctcaaaaaaaaaaaaaaaaaaaaaaaatg

SEQ ID NO: 781 - DNA, 448 bp, Homo sapiens
  Genbank Accession No. AI691066
ttcgggagccttgttttattctgcctcgggtcggaggctgggggagcgagacctccagtgcccgtgcggctgggggagagggtggaggggccacttagatgtaggagtcatcaccaccgggcgcatcgtagggacccccacccctccccgcgccctcgccctcatcgccgctgccggagtcactggcgccatccacgtccagggtgggcgcgttgagaacgaccacgtttgcctccgtcccgatgtcctcgccaaaccagacagccttgtacccgccctctggccgccgctccttggtcaggatggacctcaccgccgtggggcttccgccagctcgggccgctgcggggggctcaagggcaccgcctggggaggcagggccggggggtgcgggctatgcgggcatcggtgcctccgcgggcttggggtcgtgcgtggggctggggac

SEQ ID NO: 782 - DNA, 534 bp, Homo sapiens
  Genbank Accession No. AI692539
attcatcaatgcatgttagtaagaaccagataattttccattttaaaatgataggaatctaaaactctttttcaaaaatgccaacctgtttttccggcatcatagtagttggaataatacagatataattgactaatcataaagtacatgagagtacagaagggaaatttggaaacggtaagtctgctagggcattacaatcctgtcctagcactccacctttattctgccaacctgggttaattaaagatggtagcctggaaagtaatgaatgacattgacttcaggcaatctttccactgattattcttggctgaacttcatttatcgagtcagagaatgcactgcctgagaaatgtcccagaggagtgaatcctaggcctggccacagtagaatcgcctggagaatttaagaaaaaaattgttgggcactcattctttccagtgatctttatttagttggcttacaatggaatacaggtatggttcatgtttttaaatttgtccaggtgtttctattgtgcagtcacagtt

SEQ ID NO: 783 - DNA, 455 bp, Homo sapiens
  Genbank Accession No. AI692566
ctttcttaagtggtctccgactttgtagcatttttatttaagctaaaacagagcacatgtatatgtacataagacacattaaatctataaatactatttattcattttatataaactaatgtaatggaaaacaaattcttatgactttgtggttttatagatgttctagaaactttgtatgtaggtatctacaaaattagttcattcccctgaatatttttgcattcatatttttgaggtcttgatgttttcagcctctggcgaatctttttcattgaatttgaaccatttgtaaaatctgtgatgctgaagcagagtgtgtcacaaagtgatgagaacattactaaaatccacggacgcactgcgacctaagggctcaacggctgactcggcagcgggcagccaccccacgctcccctgcggtcactcgcacaccacagcctgaagctccccca

SEQ ID NO: 784 - DNA, 493 bp, Homo sapiens
  Genbank Accession No. AI692575
ttacaagtttggatgctttattacctaaagtcaaaggggaagatacaaaagctgtttaatttaccaagcaagtgcagcacgcctatggaaagctttggccctttttgctaagctgtcagatattcgaggcagctggccagacggctgtgttttaaatccaggcttaacattttcgaggctgctgaataatgtagatccttttcagtggaacaaccttttccagagcaggtgtgggtttttgatgcgccatgtgcactgttgctggaaatttatagttgagcttctccagtgcgtcattcagggcatccagtgtctgtattttggcaacatttgcaatggcacttgttttctcgaatcctgtttttttggtatgtctttccaaggtgccaatttcttgttttttggaaattctcattcctccagcttttactgcaggaggatgtccccctttccgaggggagagcaggtcttgcacttcatttgccatagcgtg

SEQ ID NO: 785 - DNA, 508 bp, Homo sapiens
  Genbank Accession No. AI693592
tgtaatttactttttattaagattataaatttaaacaatctgaacagttttacccggtgatatacaattcagtatgcacaaaaatacagggtaatgagggaaaagggccgagaaaggaaggattggcaactcgttttggagtccacacggtgctgatggcagagaaccagaggggctgcagacgaaccccacctttttacaacaaaaggcttttaaattaaacaaatctatcgagctgaagacacaggacggggttctcacaggctcgaacaatgctggtttcatgaaatgcaaccgaaggctgaaccaaggcagtgcaacttagaagcacacacacaaacaccacagctgaccaggaacttagtgcaaagtctccaacgcagtcggcggtcccggcccctccctcccccggggccgccggggatccaggtgaaggaattgacttccttttttgtttagtgaggaccgcagtgctaggcatgatgggaaatgtagtccgccgtgcccg

SEQ ID NO: 786 - DNA, 443 bp, Homo sapiens
  Genbank Accession No. AI694073
tttaagcaatggggacgagctttattgaggcaatcacatccacatttcagttgtttgcaatgattggcaaacggatgagttaaaaaagccttctgcttccacactgttccgtctacattcagaaagcagtaaaaatatattgtgcaatgaacactttccaccttaagcgtatcatgacagttcacaaatttgccaacagacaatgcaaaacaatatttacaagatagaccctttgtaagttccaaatttagatacttgtggtgtaattctaaaactaacatcgcatgtttttccaggtaaggaagaccagtcattataaaaatactttatataaattcaaagtcagaactaaaaacatccaagcctataaaaatatcttttcctaataaacgtatcaattcctggataatgttccttatcaacaacagttatataaattttca

SEQ ID NO: 787 - DNA, 330 bp, Homo sapiens
  Genbank Accession No. AI694139
aaaaggctgagttcagctttggggcatgtcggtccagggagccacagaccccagggaaaatgctcgacaacacccatacggtaacttaagtgtgcatatgtgtagggggaggatttaggggtgagggtcttgtgggtgtatgtacaggtggtccagccacaatgagactgtcagcatgccccctcattctcccaggttccaggggccacccatctaaggacagtggggatatgcgtcctcactccgcagccagcagtggccctggctgctctggatataaagtttcagctgcgaggcctgccttgcctcacctgtgctccggtccacacc

SEQ ID NO: 788 - DNA, 538 bp, Homo sapiens
  Genbank Accession No. AI694593
cagtttgttttattactttgtttgggatgcttcttcgctggtgcagtctacccagattgggttccctttgcaaaacatcccccttcctggagatgatgatgccatcgaagcccgggccagggcctgacctggcaggcacacacctggccagtggctctgaggtccccggggaccgagtcccctgcgagggcaggctgcccgaggccacacctgcccaccttccctactccaggccaccagctggtgtcagattgggccaccgggagagaacaggcctaggagggaatggaaggctggcggggaggctgtcatccagaagcctcctccccagaggtctccaggaggaacctggctcaactggggggcagtggtttacttttccctttttttttttttttttttgtcctctcagctgcccacagccagaaagccaggaccacccgaactggacagggagcagggagggaggagtggtcgcacggagcgtacctgattcaacaggaaatcagttattttctaaaacagcccctaccagagc

SEQ ID NO: 789 - DNA, 494 bp, Homo sapiens
  Genbank Accession No. AI697470
ttttttttttttttttgggggcaatcacagtctttaatcattaattgtcatatttctgatttgttagcaagtgccagcttgtaggctggttgaagtacagaactcagaggaaaaaagaaattaaattttagctttctggagagcagcccctctctggcaccatcaaacacttctttgtttcccttcaacttggaactcttcaaacatcaggggttgtgagggtttggccattcttttatcttgggtccatgtgagtgacagaaatggtgcggcctgggaaagatctccctcctttacattttctcttctccctcctcctccttattctaaaactgtgcctccaacagaggggcaggggctcttgtagagagatccctggcccaggacaggagatgccaaatctaatttatctcactgagggcctttgagaaaaacgcttctgggccaggctcagtggctcatgcctatataatcccagtactttgagaagctga

SEQ ID NO: 790 - DNA, 551 bp, Homo sapiens
  Genbank Accession No. AI697875
tttttttagcagcaaactaaagaacatattttatttttaataaaatagtggagcatgaaaaatatcatatattacaaatatacacacgcagaaaccactctttcctggcactgtgaagagaatacactagacaaagtgtctctgccaacctagtgcttcctgatctgtttgtggaaatcatttgtttaacaatagaaagagtcaataagccctttgggtaacttttgaatgatccttctccctcttcccccctcctttccacaaatcagtccaaacgtctataacattggcttggtttccattaaaaagccacaaaatgtagcactgaagggtttctgagggctgggcctcttagttcttttgttaggagatttcttttgttgtctttatatatagcaaaatacttgtttctctttttattttcaaggaaagagaaaaaaatgtattgcacatcgtttgagttcacaaatgtgaggtttgatggaggtttctgtcttgcagagagactattggtgaaggccggagtctattttaagcaactccaaatccac

SEQ ID NO: 791 - DNA, 571 bp, Homo sapiens
  Genbank Accession No. AI700684
  unsure (1)..(571): n = a or c or g or t
tctttttagagatgagatcttgctctgttgcccaagctggtatcgaactcctcctgggctcaagcaatctcctgcccaggactccctcctaacagctggaactacaagcatgaaccactgcacccagctactggtgtattgtttcagtagtctttttaaaaaatgttaatatcttggtaaaaaatatatttatactgttctctaacctgcttttttcatcagggtgatggaaaaatgctcatcatatattctgctgctatataactttagatgtctacactgatttcatttatgacatcacaattaaactggttaaaccaaattcatattgctcacttgtttctaattttttctctattaaaatgatatgataagcatccttgtagccaaatatttacacacattcattaaggtttacttaaaagaaattcctagacgtggagctgagtcaaagagaagggatcttttaagtatttttgcactgattgccatgaaaaggtcataccagtttatacattcatcaatatatgagtntcttttctaaatcttcttcaacatcatgtgagagaca

SEQ ID NO: 792 - DNA, 586 bp, Homo sapiens
  Genbank Accession No. AI701037
agcattgtatttttactttctgcagaaagggtgctggtcacagatgaaacaatggtgacagcacacccgaacaaaggagggaagcagtttttatcccttatgcagcttgtgtcctgtctccattggctggagctggacctcacaatttaaattaaacccgactggctaataacttaaaactttcctatatagggaaaggcaacagagaacaaaggaaaagaagaagttgcttgcaaaaagacttagaaaagtaataatatttccaaataaggaaggggcataggctgccagctggaacgtgcctgtgagcatgtccagcacaaatatcttggctaaagtacaaggacatagaatatacttattcccttatatctaacagctacataggatagggcttaacgaagagttattagcacagagcagagaaggcttgaaggaagttagtctttaaaagaaactattatttctaacacttatgatttattctttaacaagaaaggaaatttcgaaaaggaaactttttactttctacaggctgatgagtgcagctaatcctcattattataagcatcactattatcatcac

SEQ ID NO: 793 - DNA, 777 bp, Homo sapiens
  Genbank Accession No. AI701164
  unsure (1)..(777): n = a or c or g or t
gtaagtgaaaagagtttaatgaagcctcaagggtttaagggaaattaaatggaaacttttaatcctaattgcttttcatctgacatgcttaaaggaatccttttaaactgataagaaacaatgaataggaaagaaaacctgctaaaatctcttagaatttacacgattcttattctactacaagaaagcattatttggtacaaggtgtatttgtggatgtacatgaacagtatatatattatccggatcatgttgtgctatgtacaggtctttacaattcttcctgaaggttaaaacagttcattagaattcaaaatgcgtaatcatctgtaagttggcacttgttaggctcttgtcagcattgataactggcatgttttattgcagcccagttccagccagtgtttgccaacttgtacaacagaagtccagcaataggtgggtagagtgcaggaaaaacagtgccatgtttctcaattggagaccctgaaataagtgaagttactagctgctaaataaatgtcactcaaaagcagtctcttggcttttcttacacagcgggcaacttttcttttaaattcttcatttctatcttccctccattctttcgcagcatcaacatttagcaggtgagtctncatttagggtctgcagcatagaaatgacactaattcatgatggttttcacagtgtggatagggagnccagcgtcctctggctttcataaccatacttatcttcccccagctcatgaaggatagaaatgcacacatcacc

SEQ ID NO: 794 - DNA, 507 bp, Homo sapiens
  Genbank Accession No. AI701529
tttaattcaaacgtcctttattgcaggagaacaacatttagaacagagatgtggtggtgctagttgaggaacaggtaggtgctggggtgggagaggactttaacacagggcaaaaataaagcacagcagctgccaacctgatgtgtgggaaataaaggacagggaaaagatgttcaggtcttcctccttccagagcaaggcaccggggtgggctggacgaccagataaggttttgtaagcactcaagatacgcagacccatcaagtttaaatccgggaaagcagcgataggagatcacagtccccaccgggaaggaggtctggagctcagagatgtttacatagccattagaagaggctagaggtctcaggcagccttgacagatgggcagattattccacgttccatcatcgcgacataatgaaaccatattgtgtaggtcggggtaccggatcttgaatccttcatgacaagtgatgattagcttctctccatgtctatatgtct

SEQ ID NO: 795 - DNA, 344 bp, Homo sapiens
  Genbank Accession No. AI701742
  unsure (1)..(344): n = a or c or g or t
tttgtttttacaacttttttaatatatatttttataaacaggtcacgtgataaaatagcacaagaaacacttaccaaatataaggttatatcttccgcatatacaggagaatgaggtcgttatgtacaataagaaaatgattttaggggttggttggtttttgttttcctctctccccttaatttttcctcctacaggtcgttggaaatatcacagctttcagttgcattaatactttgggcaaatggacagtgcctcccccgngnnnnnggggggggggaggggggggtnntgaaaaaactggctcctgaccactcaaccctggagctttctggggctggcac

SEQ ID NO: 796 - DNA, 431 bp, Homo sapiens
  Genbank Accession No. AI701911
taacttttccttttttgctgtctagtcatcctcgtcggtcttctgcttcttggtatcgacatcgtcatcctaagcagagaaagactgtcaaaggcccctccaaccccaggagccctatccagcccactgcctcagctcctgctggcagagcaagaaccagggacccccagctccacagcccaaggcctctgggaagttgagcccagccctgtttccttcctgttcttaagattcaggaccacacagtggccacctacaaagtcagaaacagtccctccgcagcttgagcacctcagctaaaggcaggtggggagacccagatgccaaaccccccttcttctcaagccagaacccacctcatcatcttcagctgcccgcttgcccgtagctgactcagcttcctcatcttcatctccatcctcttcctcacc

SEQ ID NO: 797 - DNA, 494 bp, Homo sapiens
  Genbank Accession No. AI702482
  unsure (1)..(494): n = a or c or g or t
aattaaaattcattgaattttaaatgttctttccaacggaagaggtaggtatatttccacatatgaaaaatcaggaacagccataaatcaaaacaaggaaagcctgataaaaatcaacatattctaacagcacataaatgtaactatcttatgatgttactaataaagacatgagttgtttcatgtttcaatcagacaataatcttaattttcataatatatttctgctactaacaggagtattcaaatgctgccttttcatcacaaaaaattgtttccccacagtgatttgtgcctcaagtcatggtgatctctgggtcaccagacaagactttactgcaattctttcttattttcaccaacaccatcatcatcaagcctctaagattctacagagatcagcagattttaaaaatttaattacaaccaaaattatactctgactagaggtggagagatttgaccattccggtcagcaaatgaattcanatgtg

SEQ ID NO: 798 - DNA, 530 bp, Homo sapiens
  Genbank Accession No. AI703361
  unsure (1)..(530): n = a or c or g or t
ctttataggcaaaaggcaattgtccttccaaaaagtaagagtttaatatactgagatcaaatcactgatatttccatggtatctgctaacacgtataaaatatgatgttgaagagggaacttcctaattaataatatgtctgatatacttgtgtactcctccacctgcctccaaattgccttccactaaaacaaaccattaaaaacttcccattcaatgtatacttttgtggaaatgaaataatcaattcaatatctacttttctagatctcccgtcctcactgacatgcacaatataaatgagtttttactgttagaactttgagcaccaattcatattctcataaaagaatttccatctactaataagagctcttactattcacatttttaacaacaataaacacaaaccctctttgggttactatcaataataaagacgtgcattgtggtaaaatttccctagttcacaacagatattttcttcttgaacatctgattntcagaagaacaatcctgtcctgaattct

SEQ ID NO: 799 - DNA, 433 bp, Homo sapiens
  Genbank Accession No. AI703451
gttttcactctccatttattttccttttaaagtgctacatttgtgaactctttagcagttaccctatcaaaatttcaaaatcatgaagaaggttatacataaaaaatgaatgttggcttgagggccaaggaaatattgactgattagatagaagagcacatgatagatctgaactactctatgtcatcattcatttggtcaacaactgcaagctcctggatgtggctgattttgataaagtcatagaattcacagtattcttcacatttgttcaatggtcatcataaatacacatcacaataaccctaatttgtgactgaaacagaaactcttttcttttttcttcgaattttgtataatatttattttatcaaactcttttctaaatagcatttttaatgaacatgaatgtataaaactgtgaacaatttta

SEQ ID NO: 800 - DNA, 567 bp, Homo sapiens
  Genbank Accession No. AI703454
ttttggttttttcctaatttttaatacagtatttatatacaaaacccacttcaaactacttactgtacaagagaaaagagaagcatcagattgcatgattttagcaaataatggaaatgtacgacacctatgaactttgaccacagttggcagattaaagggaatgtaacatcacatcaatgagatcttcaagacaaatttatttctatttttcctcctggcctttgctaaaatgatgtttctcttggtgcttgagaaatttcagagagttgtttagtatcattgctgcaaatttagatcactcatatcatttatgagacttggttttatacacttttaaaataattgtccaacagtgacattcctgtgagtaaaaatatagagaagtgttaccaaaatataagcctttattaataaaaatctttggtagtaacagtattttaaattcctctcaacgatatttggttaactaataaactccctccacctttgagctacagaaaaaaaatcctcaatctaccatataattgatatttgaaaaaaaaaacccataaatattctaaagct

SEQ ID NO: 801 - DNA, 512 bp, Homo sapiens
  Genbank Accession No. AI703476
ttttgaagtaaatactggtatatttgtataatgcaaagagaaatacagatataaatcctcaaaacggaaggtacattaataaaaatgtagcattataagccaaaaatattatatagtacttgcagaatttagtctttcagtttaacattataatgtctaacaaagaaatattatttaaattatagttctcattattaatttaaaacaaccatcagtagaacagcacagcttaacctagcaaacattttaaggaaatgctttgtttcctagaaggaggatatcattatattccattcatttataccataaacaacagaagaacaattttcaaagtggaaattagtttcataagacagaataaaactgggcttctcaaagcacaagccatttccataaaattaattttttattggcaaaaaatacttaaaacaattttgatgtagtactctgcttctcagagccctcccaatcctcgaaccacaatctatacacacgaacacatgcaatactgt

SEQ ID NO: 802 - DNA, 536 bp, Homo sapiens
  Genbank Accession No. AI732208
  unsure (1)..(536): n = a or c or g or t
ttgcgtccacttcctttatttctcatcatttacaaaagatgtacagagagggcatgtgttgggcacggagcaggtacaaggggctcctccccacgggggcagaaaagggggaaagaggttagggggcaagaggtgggccccccagggagagtcctggagcccctggagggggagaaattgtcctgtccccccattccgcctgctttactttgaaggtctcggaccccaagccagtgctttggagctgctcaggctgccggggtggtctggggagggcagccaccccccgtctcagggacccgcttcttggatctgctgctgttgctgctgtcgctgccattgccagctctgaacagcccctgngcaggtgcactgtggggtacgacctcggaccccgcctcagcggatgaggggtgctgagcggtcattggtgatggtgggacgaagcttgacagtggcaaaaggatttgtgcccctcgggaagagctcctgtggtgggtactgctctgaggacatcagtttcttgacgtcagtgg

SEQ ID NO: 803 - DNA, 508 bp, Homo sapiens
  Genbank Accession No. AI732539
tttttgaactcggcagtcctttatttagatcaatgcggggctgaggggccctcattccactgcagggcaaagggggaccaggcccaaggaggcctccttctgcccaaggtctggaggcagagaggggctcgcaggcggcccgagggcgccgcatccaggccccggagcgcaaagccttcctcccagggggaggcagtttcccatccaccgaccaggtttccccggagagtcccagcacaaaagcagcagcgggcggtggccctgaaggctcaaagcgcagccagggggacacaggcggggagcctcactcctgggcgagcatcctcgcgaactcctcgtagttcacccgcccgtcctggtccacgtcggcctcgcggatcatggcgtccagctcctcctgcggcagcggctgccccagccccgccatggcccgcctgagctcgtccacggtgatgtggccgtcgccatcctggtcgaaggcgcggaaggcgacctgcaggtcctccag

SEQ ID NO: 804 - DNA, 536 bp, Homo sapiens
  Genbank Accession No. AI732969
  unsure (1)..(536): n = a or c or g or t
tttccagtttatgatactttattatagcagcccagataaattcagacagggtggttgaccaaaagtgatcttatattgtttacaaaaggcaaacccttcacaagaaacaagaggtattttgagttcacaatcagtccagtgaagcaatattatgctaagaaggatgttcttctgtttgctactcaacattgaagatgtgaagaatgagaacatttggctggaaacggcacctaatgaaacaaacacccactggtgggacataaacagctataggcataagacaaaccatctcggccctcctgagacttgcaagatctaacttctccaggcaaggcatttatatctttggaaatgcatgaggttttaatttgaccaagaataaatgtttaagtatgcaagagttagagaatggcagccacagggcaccattttaggttaaaatagtgtgcatttatacacacacacacacacacagcagctggagggagagtatggctcttggaaattntgaagcaatcactgtttaaagttcatgg

SEQ ID NO: 805 - DNA, 590 bp, Homo sapiens
  Genbank Accession No. AI733027
tttttcatttggacaggtttattgaagctgagcagtttccccataatctagatgacttcaggttacacgctgtgtggctctctccagccacgagtcctcgtcgccaaatgggatagataaacgtctgttcagtctgcaatataatttggcataaagctgcagccacaagtgggctctgctgctggatgtggatcaggctctctggaatgtctgtttgcacacttgaccttcacagaacatttccaggtggagtttgtctccttcgatccaatgggtccagcctctgttcttcttttctcccttctggatacaggtgagcctgtcattgtcccagataaccaaactcttgcattttctgttgtccaggcctctgttatcttcatcaaattcttctccaactttaaatttcacaaagtagttccttaggctgctgttcgtgtggatggtaaaagaatccccattctgctcaatcactttctgtggcttcagcaacttggctattttacgagtggcaaagtcaatacctagggccagcatgtagccctcgaagttgtcgctgctgagcagggtccaagtaccgctgaggtcgg

SEQ ID NO: 806 - DNA, 531 bp, Homo sapiens
  Genbank Accession No. AI733253
  unsure (1)..(531): n = a or c or g or t
tttttttttttttttttttttttgactccacatactttattataaaatactgcccaacttgacagttctggaatccagggggggaatataaaggggaaagcaggagaaacccctctgactggaaccttttacctcccaaaagccttgtatgcaaaaccagggggcattcatttgtatgttattttgcatcccgtttgcctcccagccttaagaaggcccccgaccctcccctggccagtttccaccctgactgccccctggctggctcccattgagcactggggggctctccccaccattaggtgacagatcaggaacaatccaggctcaggctctttatctgtgctctgcctcccacctggcaggtccactggccaggcttttccagggtcccttctctcccaggtctgccctactatttgtcctccccttccccctcagctggtagctcgataagaatcaataggtccactccagagcaaagaacacagccaaatgtgtcataccaggccctgccaganaaacgagctg

SEQ ID NO: 807 - DNA, 271 bp, Homo sapiens
  Genbank Accession No. AI733279
taataaagtgctgaatatctggcatttattgaattgaatactgtacattacatcaaaattgcaactgtttcacatcatcataaagtcaatatgtcatgacgttgcaccatcagaagttggggaccatctgtataagttatcaccttagttcatagactacgtaggtgtagcatgaaagagttaaacctccctccccacacatacacagggcacagggctgctgcgctgggtgggagggtgcacttaagcaacctagaaaacagcttagtat

SEQ ID NO: 808 - DNA, 500 bp, Homo sapiens
  Genbank Accession No. AI733324
gagacaaagtctcgctttgtcacccaggctggagtgcagtggcgcaatctcggctcactgcaacctccgcctcctgggttcatgggttcacgcgattctcctgactcggcctcccaagtagctgggattaaaggcgcgcaccaccatgcccagctaatttttgtatttgtagtagagacagggtttcaccttgttggccaggctggtctccaactcctgatctcaggtgatccacctgcctcaacctcccaaagttttaggattacaggcctaagctgcgcctggccaaaaagaaagctgtttttttaaaactatctgcactccctacttgggagggttggactcaagttcccacatctctttcctcttacggttatattaagggcttagtcatacatccctaaatttcatatatcccaacagggacttgggctgggacaggaagccctcttcctccacctcaactaccacttagccacccaccattttctcaaacctct

SEQ ID NO: 809 - DNA, 464 bp, Homo sapiens
  Genbank Accession No. AI733673
ttttttttttttttctgccgttcttcctttctttctcttttattcttcttcacttttaggatcagtttttgggggtgatttgctgaggcttatcttctccataggttttgctagttggggtttcttgataaaggttccactgggcttattaaatggctgcatcatttttctctttattcctcttgcagcagcaactgtcacattggtggatttgttttgatagccaacaacaattccgggtctatgaatgcttccaaaatcacccatgtgctttactggcactcaaaagaagaatttttagataaatatccttgaatgtcagacctccataagatccagggccataatcacgatccattccattaaagccctgataagtattcctgcaggcggagtgtgtgtaatcgtcctcgaagtccatggcagaggctgagggccgtcggccttggcggcgctaggctgag

SEQ ID NO: 810 - DNA, 489 bp, Homo sapiens
  Genbank Accession No. AI733800
gaagtgataacactttaatggatctgaggtctgtccatctcttctctctcctcttcctcatttctggaacgcagtgtccagcactcagggctgacacagggatgggctggggatgaccctaggccacatgcgcaggataaaaggggccgtgcaaaatcctgttctggccaccagatcactcctaagaaagttgggtgggggctgtggaagatgcttccttctgaagaggtaagggcaagcccccactgtggcccaggtcccaggtcccttccttgggagccagcactcagagagaagctaagtgctggtacccccatttctaacttgggtgcaggcagggaggctcggccttcagacaggcctccctcaccccactggacaccaataaatcctggatgagatctgcagagggcccaaggccctggggcagtggagggctcagaggccatgaggcagggcctgcagccagcccagacctaggccatggtg

SEQ ID NO: 811 - DNA, 609 bp, Homo sapiens
  Genbank Accession No. AI733811
cagtgattttttttttctcagtttttatttagaaagtttagtgaaacaaacatagcatcacagtttagtaatactttaatctcactataatttaacatggtaaaaaatctactaatttttgatttccaacaataaaatttataaaaataattatacatttataaaatgaattatttcacaataaattattcacttctattacctgaaaaaagttgaatactatataaaagtaataacttcccttatcaatattttgaaaatatgctgaaaacatcagttccttttttccagcatctatggcagttcagtatataaaaatataatattataaattccctgaccatagttattgaagcagaatcattactaacaatttcaaagatacagctgtttagtaaatatacacgaataaattacagggttcactaaaaatgaattttatcttttatacttcaaaggtatttgctatgttctgaatttttgtgttttccaaaattcacatgctgacacctagtccccagagtgatggtattaggaggtggggcctttggagggtgattcagtcatgagaattagtatctttattaaagagactcgagagagctacct

SEQ ID NO: 812 - DNA, 506 bp, Homo sapiens
  Genbank Accession No. AI734974
gcgcctggacccactttattccgatattccgcctgcaaaggctgtggaaagaagcgtaaggctcagggatggtagtccccaaagaggagggtccctgaggctctgcgcaagccccccctccccaacctttcgggccaagtcagacgaagcctcggaaaggctgggtctgttttgctgaccaaatctccttgttagccgtttccgcctgacaagcctggcgcaggcgttggccttctcctctccggcggccacctccaatgccgcgcggggagcaatggggcccggccctgcagagggctgcctggaccttgaagtttggaaaaacaagaagagactgagccggctccctcccttctctgcagacacacacgcaccgtcaggccgccgccacttcctgcctttgtttttcttcctccaaacattttttggcctcttgcattagccgcggtggggctctgggttgacgataaaaggaaatacactctgaagacagttttctggagatg

SEQ ID NO: 813 - DNA, 534 bp, Homo sapiens
  Genbank Accession No. AI738451
gcggccgccccccgcggatgcccccacggtgcgggccacacgcgcctccccggacccccgcgcctacgtgcctgccaaggagctgctcaagcccgaggcggacccgaggccctgcgagcgtgcgccccgcggcccagccggtcctgcagcccaacaggccgccaagctcttcggcctggagcccgggcgccccccgcccaccggccctgagcataaatggaaacccttcgagctgggcaacttcgccgccacgcagatggccgtgctggccgcgcagcaccaccacagccgcgccgaagaggaggccgccgtggtcgctgcctcctcctccaagaaggcctacctggaccctggggctgtgctgccccgctcggcggccacctgcggccggccggtcgctgacatgcactctgcggcccacgggcctggagaggcctcggccatgcagagccttataaagtacagtggcagctttgcccgggacgccgtggccgtgcgccctggtggctgtggcaagaagagcccctttggagg

SEQ ID NO: 814 - DNA, 648 bp, Homo sapiens
  Genbank Accession No. AI738919
tttttttttttttgaaaaatatttattcttgtttgatgaaagcaacgtttctcagcaatgcattttaaaaaatattttagctgtaaattaaaaatggccataatgtacccttggcagacttcagcatataccaaattttaaatttaaatcagcttgaattcagtggggtatacaaatcattttagttgttttagggctttttattgaatagaaaaaatataaacaatgttgtagagtaatgagaaatcctccacactgaaaaaaaactagtagttttaatttttttggaatcatattttctgaggtgtaactggctttcattagatgatcatacttttcctgacatttttacaatgtattctttctttaaatataaaaactgacaagataaatatagtgtttcaacttcttagcctatttgtgatttttctgttttcctctgacccatcattgattctataaaaaagtgccaggccaagaaacaatagttagagtaattcttcctttaagttctttcagcagtcttgccaagcaagcatgtatcattcctgatgtacttctaccattgacagcaagaagaatatcaccacatctaattcttccatcattgtattgctgtgttccttcacaatggatttgatgaaaaaa

SEQ ID NO: 815 - DNA, 463 bp, Homo sapiens
  Genbank Accession No. AI739473
  unsure (1)..(463): n = a or c or g or t
ttttttcccagngccactttttattttaaacaagaagcagcgggcccccnnacagccacggggacattgtctttccagaacagtagacacnagtgccttgtggctttgtaagaagcctgacaggagaagattcatgccttttctccttggcccnccatgaccaaangaagaaaataaaaatcacacaccatacactgccacacccatctccacccctccctttcagtaatatccaagtattcatccttctggccaaagaaactggctacaattctgattctaaagaaaaccttcatgcagccaagaaactcagggctctggaggggagaggcttactctgatactttccacatgcactgcccactggcatcaagtttaactccatccaaaaccatcacatggatggccagggacaggactggctacaaaaaaaagccatgaactcagctcaccatgctaagaa

SEQ ID NO: 816 - DNA, 335 bp, Homo sapiens
  Genbank Accession No. AI739558
tttgagaggaagctgaatgcagtgtgtatttttgctgaatctcaaaccaaaacaacttttgttaaagaacaaacaaataaacaaaaatgctgaacactaattcgccagggaacacagtctggaccgaggctctgggcagagaatcagggcagcgaattccacagccacttgggttctggtgggggctgtggatggcaggcgagctcatgaacaagagcttttggggacctggcagcaggagcgaggcaggagatgctggtgggagggggtatttcaggtgggggacctgagcctttactctgccatttccagcatttattactttgcagttccag

SEQ ID NO: 817 - DNA, 461 bp, Homo sapiens
  Genbank Accession No. AI739630
  unsure (1)..(461): n = a or c or g or t
tttttttttttttttttggttttattttatagagacagggtctcactcgttgtgcccaagatggagtgcagcggtgccatcacggctccagcctgagcctggagtggggacaggatgacgagagcccaccgtgcatcccaacgactctccagggcacactctggctgtggctcggacacagacaccctgggccccaggggaagcctcagctgcattctgagctcccttctgaggacagaagtcagaggacaccaagacccctccgaaggtcccctagggtaggtgtcgctcaaaccccttcagcctctaaccagacaggagctggggcctggggtccccagaggaaaatgaggggtgactaatgaggctcangagacctgggtgggggcatctgacggggatgcaactggcacctggcttcaggggcattcgctgatccacctggggcaccccggattgac

SEQ ID NO: 818 - DNA, 591 bp, Homo sapiens
  Genbank Accession No. AI740516
ttttttttttttttttttttttagtaatggaagtattctattatttttaattttatgtatgtacagacaagagctatatgggaaagtagctattacagacccattatagtttcatcatttataaccagggttggtagtaaagcaacagaaatacatcttcaatgcagacttgctcccagcatctctttcctttcatccttgaccatattgcatcctggacaggaagaagacatcctcagcccaccaccccttcccctccaatgtggactgagtgttgggtcaactgataagcagtgcagactcttcattttgctttgttggtgccttggaggcatgtgagggcacagcctcaaattccagagaccttgccttcaggatttgaggtgggcaaagatgtgaaagaagacctttagccactcagtgttatcaaaagcaatcaccaaagaagtttttgcatctggcattgtgttgggacgtccatcagcagtaccgtacggtctctttactggacaagtatttacaccttgttaacagcagtgtacacccggtggaaaactcctattcatggcatggcagaattgtaaacatttc

SEQ ID NO: 819 - DNA, 457 bp, Homo sapiens
  Genbank Accession No. AI740621
ttttttgccttgtgggagcatttcagtaatttcatatttagattctgcctaagaaccaccctaagctcctcattttatggtttaaacttacattctcttattaaaattttattcctaatggcatggtcaaatcccttacaaaggaaactccttatgaaaagatatttatgatttagggaataagttttggatcactgtcctatggattttaaagaggtgttaatgatgccatgggttggttttaggtttggagaaggcagctctcattcttggcacagctgaggacaagctggtgtggcttcatatcatattagccacgtgatgctgagtgaaccacacagcttagtgggcctttgtgtatcaacgatgaattgaggaggttggactataatgtttctagaatccttccattctttgagttggtaagtctatgccatcctatactcttcactggatg

SEQ ID NO: 820 - DNA, 572 bp, Homo sapiens
  Genbank Accession No. AI740811
  unsure (1)..(572): n = a or c or g or t
ttttagaatacctggtttattgggaaaacttcataatgaaaactacaattagctttttccacaacttacaaaataataatctgatatttaaaatgaattggttttcattatgtaagtcgaaatggtaaaaaatcataatgacctatccgatgcatcatatatatgctattcagagaaactcaaatccccgaattctcctgtggcatgttttatatcagacatttaaaatctgtttaccaagaaagaccaggattttaactatatgtaggtttctgcttacagttgcaaactatcagaagcctgtctatatgatagagcccagataaacctgagatttagaaaagcaagtcatttattctcctgaggctgttttagtggcacttttgtgacaagaatgaccctcctaatgctttactacacaacttaaccagatctatcagtcatgataaattagacccagtccatctttcaatccagtctactctggttctgaacatataaacacaaaacactacagatttattaatatagcattttcccacaccctaaccctataaagaactntaaaagag

SEQ ID NO: 821 - DNA, 538 bp, Homo sapiens
  Genbank Accession No. AI740961
ttttttaagttgttccaaaaatcctctttaataatacatgtagccaacattgctgcaatcagtataaaaacaaagttattcctgattttgtataaatgaacacgtcgagagtcaggattataaagcatcaagatacaagtaccaagtgggaggaccaaagacaactcacagtgaagagaaacgcttgagaacaagaaatgtcagagttgtaggacgtggtaacaacccagggtgctgaaacggtcagaggtgcaggtgcagacgcaggcttctgcctctgcaagggcaagggggccgttggtggctggctgcaaaggaccagtgccaggcagcggggcagagagcaccaggggtctcgactctgcagattgggctttgcagaggattcctgtttcccacctccccacccctctgacagagactgaggagaccacacacgttgacctcctcttcatagccagccatcatttccactccaacattctgctgcgggtgtcattctggaaaataattccttgctgttccttgctcctttcag

SEQ ID NO: 822 - DNA, 592 bp, Homo sapiens
  Genbank Accession No. AI741026
ttttttttttttttctagttctttaaaaatattttaatcgggcaaaatcaccataatgtactctagcacaatgctaaaatgttatctaagatggagtggcttttattagttttacaggatgtatatttggcaatagttcttaaaaataattactcaaaaggaactctaactctattattttagaaacaatattttaaaatacagcagtaagcaacaaaaactattgctctttattcattttttggcataacactgccatacggttacagaattataaaataagtattttatagtaccatacagatccagaaactggttacaacttctaccacatacacatggtattggtactaacgaacatgcacagcattctgtaattcatactgcagttgaatacagagcacagagaaggcccagtggccactggagaatcagagcttatgttataagtaaaacacacatctttgtaacaatcgtaggcattttcctgaaatatttaaaatacaagggacacaatagtttccaaaatgacataatctaccatccttcttagataatactaaaaaagaaagattaccttacataggaaaca

SEQ ID NO: 823 - DNA, 525 bp, Homo sapiens
  Genbank Accession No. AI741321
tattttttttttttttttttttttatttcaattctatatttttaatgaaaatttccctgttttctgattttacatatgttgaatgccaataagaaatacataaagaactctgagcatttatatagagctttcggtttctgtctgtttaatttgatgctctgcttattcagttatactagatgtgtttttcagagttatccagtccatacgtatttgaagagacaatttggtgtagaattgttagtgtccaggctcttccaagcaaggtcttccaaagggatatctcaaaaatattccttagagttgaagtggcaatgttatatagcctaacaattttcatgctattaaaagcttataatagctgatcattaaaatgcgagttacagattttatgaaacactacacgtttttacagagatttttaaatcaggtaataattaaaaaaaaaaaagcatatgctatagccccaaaccagctcttatgagtagcatttatcaagttggtaatgaacatttactgaaggct

SEQ ID NO: 824 - DNA, 614 bp, Homo sapiens
  Genbank Accession No. AI741566
  unsure (1)..(614): n = a or c or g or t
ttgaagtttaggtaacatttctttctcaaaagataaatgattcagaaggaatatatgtaattatgtaaaaaaacaaaaacaaaaaacctcatgtttccagttttaatcgtaaaaacagaaatcttaaaacacatacatacacttaggaggaaaaaggagatgaatgccaatgtccattagcaagtgttaccgactaattctataatctagttttttctagttatatccaaagttccaagtttactctaaaattttctttctgtacatttacccatttgaacaacatcaacattaaataactaaaacaagatggtccataaaattctttctatagattgttggctgaaagtctcatttctaaaactagtacttcagtattccgaaatgctctctctgcgtcttttcatttctattagtatgtttaggacataaagcattaaaataaggctactgctaatgtaccaaaatccatgttccagaaaggaaaaaaaaaaactaataattatcatgtttgaaaggtatgtattttattactcttgcaggtattttggacaaaaatattgaccagctaattatgctcttncacacatcatgttcactgagtntactaccac

SEQ ID NO: 825 - DNA, 454 bp, Homo sapiens
  Genbank Accession No. AI741880
tttttttgatttataaacatttttaatgactgtgttaaaaaaccatcatacaaaaagaaaagaaagttgttttcaacttaaaaaaaatccttatataatgtaccactcatctgggatatgcttctgggagggggacactccctgcttgggctgcagcagaaggcagtggggagaaagtcttaaagttctgggagtcaggctagcccctcctgcaggtgtcctcattgccacttcttggtccctggggtcaagggttaaaggtgccaaaagaccactgatcgaacctgagactgttgagatgtcctgttcccaacagagagtatctgaactccagaaacttccctctcaggcctccactcccccctcctttgtactgtgcatcctactctgacttccgtggctggggcagatcaaatgtacattctcagtgtcccctggtaacaacctctccctt

SEQ ID NO: 826 - DNA, 769 bp, Homo sapiens
  Genbank Accession No. AI742029
  unsure (1)..(769): n = a or c or g or t
ttttcactacaaagtcctttattaacaagtcaataaaaacagaagagagagagatgtcaaaatactttccttggaggccccaggagggagaggcactgtcaggactcacctggccagggaaggcaaccccaccagaggcagaacggaggtcaggggggcagctggcccaggaagcctttggggaatggctcaggcctcaggcagggactgtgcaaacgccgaggctgcgcagggagtgatgggttggggggcttaagccccgagcaccgtgttcccctgcatgggcagacacgcagtcaggctagcacctgcccactccacctgtgagtgtacacaggtgtccgcgtaaaagccggtgcctgcacgcagcttacatacagagagcggaacgagggtccccagcagaacagggggctcgttccagagcttaaggaaatagcttagagaagtctttggaagcctgggtcgaggggagagcagggaggctgctctgttgcccatgggcctcaggaagccaggccttcctgccgccgctggaggancccgatgacgctgccgataccgtcctcgggcacccanggcgtggtcgaagnntgaaggtgctgatgtagtangcnangaatgtcagccggcagccagggggacctgcnatctgtgccacgatgccacattcatcanagcccaagggctgtccaccgatgcgcaccattctncacagctncccccgaggagctggcannncagaggcactgggggacttttttctggt

SEQ ID NO: 827 - DNA, 603 bp, Homo sapiens
  Genbank Accession No. AI742057
agattagtaaaccacagcaaagtttattcatgtgccagggacataaagatacattaattgtttgtttttctaggctgccagtataagcttttcaaaatgtttaaagtaaataaaaccaataatacagctagataccacattgcaaagaaccctaatgctatttatcagctttaaaatactttcaactgaaatcaattacattttaatatacacatattatacagaaattacctatagctcttttaaaaattctatgacattaacatgaaactttattagaatttaagattctatatgcagacctgataaagccttaaatttaattattttggagtaatgtcttcttaagaaatggtagataggataaaataatttacagatttatctgcctttgaactggaaggaattttaggtaatcacctggttcaacctactccctaaagtcacacagctctataatttccccctcactcagctacttttttctgtctaaagatatgtcaaagcgatttcatatgtaatcatgagacattcaagtgcaagataatttaccaagaaatcccactccaagatccactgtacttatttaacaagacaaattaa

SEQ ID NO: 828 - DNA, 493 bp, Homo sapiens
  Genbank Accession No. AI742239
ttttttttacagtgcaagggttttaatagtccacactaaaataggctgtacagttttgtagtttaacattaaaagcaatcctgccttattttaaaatgcttctacttaagaatgcttcttcctcccccactccttcacttaaggtataagtctacccctaaagtgcatttctcaggcattaaaaacagcactgtgatttgctttccacagagtcctaaataacagccaccttcttcatttgagaggctacagagttcaagctgagctgtgacaggagccagggggccagggccccagaatagctttttgaaaaaaaataattatgccaccctcctccgcggcaggtatcttctcttaccacaaataaatatttaatgcatccttggagtcatgaaatattgagaacccaattgacacttcaatttccagaaaaataaaatcatgaaggcattgtgtaaatattctgaatttggtggaatgagacaacgcgtaa

SEQ ID NO: 829 - DNA, 672 bp, Homo sapiens
  Genbank Accession No. AI742378
  unsure (1)..(672): n = a or c or g or t
gcggccgccgacaacggggaggcagcggccgaggtgggcgccgacaatggcgcacatcgcctgcgcttcggggacgccgggctcaacagcgggtcgaaatccagagtccttttcagagtggctccgcacgccatggccgggggcagctgaggcgccgggctcgggtggggtcggggacgggtgacgaaagaagagggtgagggaaggggtgaagagcgggaactcgaggagagcctacccgacgggctcaggagccaagcgggtcgcggagcgccggctgtggaaaggagagccgctgccgccgctgcctccgcggcaggggcagtggccagggacggcccgggtgagagcgggaggggcggtggcgggcagaagcacacgccagtcgcgtcaggggggttcttccgcctcctcaggcgcggctcccccgagagaggctccggccgcccccgccgtccgctcgagctttgcgccgcgcctgaggcgcttctgtgctgagggctagatcctttctgaagtcgaaaacagcaccggtgggtgtgaggctgggaacgcggctctaatancgccgagtacggcagtagcttgcgagccgggatcgatgcagagagatngcgagtgggctgcgagcangaacccagcgnacacgccaacccgctttctcgtgcccga

SEQ ID NO: 830 - DNA, 577 bp, Homo sapiens
  Genbank Accession No. AI742422
ttttttcatccatcaaatatttatgggataccaagtatgggcttggcactgtaccaggccttagggacacagaagaagaagtatacagcagtgtaaactgacatttcttaaccactatataaataaaccccactttactactaatgtgacatttcaacatgttatacctgataagacatatgtaaagagggcacgattttgaggtatatagcttctttttctctacaattaccatgtgatataaattcctaaaccccttcaaatagcttttataaatgaagagcttccactaatgaaaacctcccaaaattacagttcagttttagggagacaaaggaaatgaacttcgggtataaaaaacaaaaatgaaactgggtatggtggcagacacctgtattcccagctacttgggaggctgaggtgggaagatcacttcagcccagtcgttcaagttccagcttgggcaacacagcaaaaccttgtctctaaaaaaaattttaataaaataaatagcctaccctattactatacacatcaagcataaaacgggcaacaaaactcaaaaagaactttagat

SEQ ID NO: 831 - DNA, 550 bp, Homo sapiens
  Genbank Accession No. AI742490
tttttgttttaaagcaatatttatttttcatgaagataagaggcatattacattcgctatagaaaatgctatgagaggaaaaagctgcatgttatcgatatgacaaaaaacataaaaaactctacttatgaaagtgttttgccctataagaacatattcaataaaaggcattattccaggtgaatgagccatgcggaaatgtggatttattagggtttgttttgaaatgtaatttgtacggccagctttttattcctttgatggctatcaaatagatttattggctacatgttagaagtgcaaaagataacaggtaaccaagggagaagttttaataaaactctcaggaaaggcaaagaaaagtgagtgaatatgcctgcttacatttcagctaataaataaaaagtgcagatagggctttaactgaaaaccttgctggttattgcagcctggaaggtttattgaaaactgggtagaacactctcattttttatatttacagctacattgtgagctgttcaggttagagtgatgtaacgttcattttgac

SEQ ID NO: 832 - DNA, 529 bp, Homo sapiens
  Genbank Accession No. AI743780
tgttttcaaacatgtaatcttttattcagtacactctcaaaacagcatttctgtatctagttccaagctgggtgatcctgcggccccaaaggtagtgatgactctgctgggaggagacacagacctcccagttcagtggatcccgagtgagtcagaaggtgagactggaagcagcagggtccttgagggaagtaggctctccttgaaggataagcaatggctgcctgaagtagcaggtattgaagctagggctttgaaggatgaataggagcttgccaaacaaagaaggtgggacatgcaaaccaagtggagggactgtggcccaaactcagggatacatggatggagtagcaggagaaaaacagactgggggagcaggaagagtcagtgtgagctttctccagatccaaaatcagcagcctgtcattcaaggccaagacattccacaatagttccccttggccctgtcaagcctatcaggcctggagcttcctcaaagcagctctgacaactccagccactgtcatct

SEQ ID NO: 833 - DNA, 505 bp, Homo sapiens
  Genbank Accession No. AI743925
ttttaagtttgtctggtttatttgcaggctgtagagatgatatcccagtccacgcacactcccatgcacacgcacacacatacttcatccacctgaatttgcccgacaaaccctcctctgagtcatagggacaaagccatacttggcagtcctcacgttactggttacattagatttggtctttcagaaagaagatggttgaaaccagtgggttaacccaacctggccatttcctcatgccttacctgttttcctccctcaatctgctatcagaggtgactaaggagccgcagggaacccacgttggctccaaccaccaagacctcccagtcctgtccacttaaggtgttgcaaaggctctgccaagactctcacccagtcttgggcccatctaggcccccaggactgcagggaagtcaccccatacctcccccttcctaacatttatctcattgtcattgtctgggtctcactttcctattggactctaagttccatgaatctg

SEQ ID NO: 834 - DNA, 568 bp, Homo sapiens
  Genbank Accession No. AI744009
tttttttttttttttttttttttttgagaaatgcaaactttttatattaattatatataaaaacgaatttctcaagtatttacaaaggtaatttccaagtacacaatatgaggaagtaacaagaagaacaaaaaatgaaaaaacgagttacagtttcaaacgtggagaattcacattaagaggaaaataatgtaataaacgttttaaacatatccttgtaaacatcacagatcatttaaaagtttatttctggtcaatatttccacagatatttttaggatggaaaaatactttcaacggctacgaacaagacgcctcgaaccttaggggaaaaattgcattttaaaagtgaatattgctttagcaaattcttcggctatttttcttttgtttaaatgcctttacctgtgttcattttgtatgcctaaaaaacctagaaaaatagggtactgttctaagtgggaatgattctgtggaaacagtgaattagcccaacaattggggagggtttaaaaaaagcccccaagaaccttataaataatggcaaaaccttttaagtccgacttaa

SEQ ID NO: 835 - DNA, 828 bp, Homo sapiens
  Genbank Accession No. AI744109
tttaatatgccacaatttttattgcaacgtggccatttttgtgagggtggggagtttgatctcaaaacaatgttccatttaaggctcttttatacagaaattgccatcatgactgatattcaaaatatctttagtgttgcaggactcacatggtaaacataaaactcctacacttattcagtagtgtacactcaatggaaaacaaaaaggcattaataacagctatttcttttaagaagatatgcaggtaacaggaatgaacactgaggtactaggataagttgatgacacagttaacaaaacttaattggcattccttttaggatattaaacttattacaaaaagtgcttttaatgcatagtgttatatccgtgctgccatatcactaaaataggcttgccaaggcaggtgaggtgtatgaatgctcaagcctcacagaactgcaatcaagtgccaactataaataatactgaaaaaagttgaccatctgaccagtggataatactttcaaggcattcaattagcttatcctttgcagtattctaagctattcacattgacgatcacacacattgtagtgcttgctttttaaggtgcactttcaggagcccagaatataaatactaggtcttctttcttagactctttttgttcgtatgtggcatcgtacaaagcatatcggcaatcattcagaggtagcaacctcaccaaagatgtgtaggggtcctcttacatattaccaatgtcaccaaccagatctgctttgcttctctacaattattggcttttgcatcgcttaaacagaagagaacgctttcttctctttt

SEQ ID NO: 836 - DNA, 588 bp, Homo sapiens
  Genbank Accession No. AI744118
tccgtatgttcaaaatagtttttaatcataagctttatatacaaattgctgtacagtcatcttaataaagtgaaatagtgagtgaaaagtacaaaacacaaagcccccacgttccccttggtgaagtatcaaaggatcactcacagcccagaagccccaaattagtgacaaggtaagtggacaagtctgtgaaacaggctaaggcaagtgctgtaaactggctattagaggcgaacaggctccactgcagaccagaagcctgagttcctactgcccaaactggttctgtggaagaattaaatgaaatgaatattgatgggccagaaccttctagtagacctgcgaactcataaaaatggtatatattatgctaaaaatagtttagcagtagtgtagctcagtctctcccaccccaattaagtattgacaatacacaaattctaaaacatgaagctgtttaaagcattaataaactgtgaacatattgcactagataagtgaacactcctgtttctccaaatacatgagtgagttgcatttcccagcacaagcaggattaatccctgtgtacgcaaggagcaggctctg

SEQ ID NO: 837 - DNA, 483 bp, Homo sapiens
  Genbank Accession No. AI744130
ttgagtgcttttacattttattttcaagtataaaggcttcatcgcagaaggaggccagggttacaggcagtgggcaaggggtctggaagcccaggtttaggtggacgtgcaggctagctggctcccaggtgccatggccagtcctgtggtccctgtctgtgcctgggaccctcttctgggtgccaagaggccgaggtagctgtgagaggagctggacatggggtggaggggcatgggttcacatgaccgcacaacactggcacgtcttttgcttagggccacttgcctcttcaccctcggtgggggcagatggctcaggctgccgggcaggcgcgtaggtgggcacagggtgggcactggggttggcgctgggcccctccccctgaagcagtggctggcattcggcgggctgctctggggctggggtctctgccagaagaggtgtggcatcccccaaggggccttggccctcagcagcggttt

SEQ ID NO: 838 - DNA, 574 bp, Homo sapiens
  Genbank Accession No. AI745624
tttttttttttgcaaagttaacatttttattgaactgaaattggtgtagaacaggggcaaccacagctgctgagctctgtaacaactgaaaagcccctgtgacattttacctttgagagtcctaacacggtttgagtggaacagctgagaaacagcatatatatattttaacacctcaaaatagtttgaaatgagcctcacagccttgttcaatcttcagattacaaataacattgatagcatctcctgtggccttcagttagtagtgccagttaatattgtttctgaaaactttcctctcaaagtgctggctataattttttctccatccagtacacataagaaaaggatttagtaacacttgggcaagtaataaactgtagaactttaaaagtagtaaaggcatataccaagcatacgtgactccacacattgtcagaaaggcagtggactggctaacgagtttctgccaagtttcagaagcaaagaatgcactaatgaaaagggtaaggcatccaagcagagtgtctgaattgatggaccatttttgtctaaaactaatttcaacatcttc

SEQ ID NO: 839 - DNA, 513 bp, Homo sapiens
  Genbank Accession No. AI751438
gcacgagtttgagatggagtcttactctgtcacccaggctggagtgcagtagcacgatcttggcttactgcaacctctacctcctaggttcaagcaattgtcctgtctcagcctcccgagtactgggactactgtcttgcgccaccatgcctggctaatttttgtatatttagtaaagatgggttttcgccatgttggccaggctggtctcaaactcctggcctcaagtgatgcacctgcctcagccttccaaagtgctgggattacaggcatgagccaccgtgcccggccaaagtcagctttcaaaatccaagccataattggtgaggggggagtttcagaattacatagaaaaattaatatttgaaaaaataattctgaaatttcgaatttaaaaacagatgtgctgcttctgggtgtaggtagtaaaagtataggaaaagaactgtttccttagaagcggactgtggaagggctatgtagaatgtcaaagggcaacaagagcctgtgttt

SEQ ID NO: 840 - DNA, 449 bp, Homo sapiens
  Genbank Accession No. AI753726
ttttttttttttttttttacaaacaacagaaatttatttaccacagttctggggacagggaaatccaagatcaaagcacaacagatgtggtatctggtgaggactcacttcctggtttacagatggccatcttttcactgtagcctcacatgttggaagggacaagggacctctctggggtatcttttataaggatactactcccattcacgagggctccaccttcataacctaatcactttccaaaggccccacatcctaatactatcacattaaggattaggtttcaacatattaattttgagaggaggcaaacattcagtctgcagcaagctcaatgttaaggtcttctgggaccacagtcttctgtactccattcagtcattaatccaccaatttatttattcattcaggcagtcagtcaattcatcaagcattttttgaatacc

SEQ ID NO: 841 - DNA, 515 bp, Homo sapiens
  Genbank Accession No. AI754693
  unsure (1)..(515): n = a or c or g or t
ttttttttttttttttttgggaaagacattttatttccaagtttctaagagtgttctacaaacaatagaggcttaacgaaaaaataaaaggttaaaaaaaaaaaaaangaaaaagaaaaacaagtattcttaactactgaaaagtaaacagcctttttaaaaaagacttcaacataaaaatgcgaaaatgtagttgtcatctctaatccaaatacattcctagagaaaaggatcatccatggngacagggttacttacagctgtatacttatttaaatgctattcatattccttttgagttatttcttcattgcaaattcaattggagatctgtgcaaatctagcaaaatattctttggattacaaaaactatntaaaaaaatgaacacaacctgcaattatggaagtattgagaatgtgtaatccttcactgagatgaaagattctaaagtgacattgtccacaaaatgtattccattgaaatgttcagcccaatttgatttcaatgcaaagta

SEQ ID NO: 842 - DNA, 535 bp, Homo sapiens
  Genbank Accession No. AI758223
  unsure (1)..(535): n = a or c or g or t
acttttantaaattttatttacaaaaacagatagtgagctatatttggcccacaggcagtggtaattcactgacccttgctataaaggcttgataaattttattagtattattaatacaatgacttacaaataatctttaatacttaacaaagcaatatattttttaaccaagaactaagtatatacctcatttacaattattttaaaacaaatttgcttatgggagcaatgaaaaaaaaaatcttgcctgtaaattctggtgtaacttaattgaattttaaagaaaaagttttaactacagagactgactgacattccattgttctacgtccctgagggagaagtaccttaattgaattttaaagaaaaagttttaactacagagactgactgacattccattgttctacgtccctgagggagaagtacaggccaaaatgaagagcaatgttcacaaaggcttggtagaaataagaggagaaatttgctggaatcttcaacatctctgacctttgttctctcttggaagggctt

SEQ ID NO: 843 - DNA, 633 bp, Homo sapiens
  Genbank Accession No. AI758408
  unsure (1)..(633): n = a or c or g or t
aaattttaagaagatttttatttaaacacttttattacaatatttaggtggcacaataactaacaagcttctgagacaggaggtaacattctcatagactttgcaactcagccagaagtaaaactcgaaataaatatgtcatttaaagtaactatgaaggtaataataaaaggagtgttgttagtactaagaaggttttcaatgcagggtccaatagctatatttacatatacagaaaaaatgaaattagttactaaacataacaaaaaaaacttggtatacctatagcaatgcatatttaccaaaaactggtgaaaaatatattgagagatatgttaaatatttgctgaaaagaaaactacttgtctgtatgtgaaaccccatgaatcattttacacatcaggaccaaaaaactaactccttttattcctcaaaatcaaaaggtggtctcatctaacccaaaaatctcgacttggcaggtatttggctttctaatttggacaataattacttatttttttctttaaccaggaggttccttagcaaaattattatattttggcccatctaacaaaatgggcattggactctttaggggngtgttatggagtaatttttgggggaagttcccag

SEQ ID NO: 844 - DNA, 351 bp, Homo sapiens
  Genbank Accession No. AI759990
aggtttttctgtactcttcaaaatgtctaaaatacttctgagctctttttacaagcagagcaacagtaataaatatcattttttaaaagggctgagtgcattggcaggagactggaattcttatcctggcttgactaccacttgctatttgaccacaggcttgtcaccttagatttcgtgagccttggtcctcatcggccaaatgcaataaccagctgttccatgtgctccatgggtactacgtgggcctaacaaggctaagcactctgtggcctctaaaaatgtcccaagtgacaccaagacacccacatggcctcgtgcagccgagcccctccctccacccctcgtgcc

SEQ ID NO: 845 - DNA, 544 bp, Homo sapiens
  Genbank Accession No. AI761506
  unsure (1)..(544): n = a or c or g or t
ccggtatccattggtagtttatttctttagggttctatcccaaccagtcgcttaaaaaccaagtaacacagacctgaggggtgggggctggggactgcacctccctcctactcatggtggacagcagtggggactagggaggggcaggagaggtggctgaagcaaggcagcagtaatggggccacgacgccacagagccagctccgtcctctcccagaccctggtgggagtccctgtggcttggggtggggagtgggggacccaacccaggcccctccctttcccttcctcagacagccttctttcgggctcaacccatttcttccggcaggagactgaggcacacagagaggaggaagtgggagaggaggacgagggaggggcagggtggcagcacaaatgaaggcagaggtgagaggcgtgggcaaggccactccacccccacacccaccccagagaggggcgaggaagccacaccatcacgcagcatgtcggngggacaaggcggggtttaaggctgaggggcccggggcaggcggngcct

SEQ ID NO: 846 - DNA, 535 bp, Homo sapiens
  Genbank Accession No. AI761629
  unsure (1)..(535): n = a or c or g or t
tactgattaacacttaanttatttatttaaaactatgaataattggttttctaaattaaaacagttttaagtttccagaagagaactctctttattgtatttgagacagggtctcactctgttgcctaggctagagtgcagtagtgcaatcacagctcagtgcagcctcagcctcccgggttcgagagatcttgccaccttggcctacagagtcgctggaaccacaggtgcacaccattatgccggctaatttttgtattttttgtagcaatggggtctcaccatattgcctaggctggtctcaaactcctggactcgagtgatcatgatccttccaccttggcctcccaaagtgttgggattatggggacgagccaccgcatttggcttgaagagtactctcatttatacttctgataagctttctgatggaaaagaaaggcatttttaggcacgaagcacgaaatggacagcaccttgggtatactttcagggacatgaaaaaatgtaattattacttatatgcatcatagaa

SEQ ID NO: 847 - DNA, 452 bp, Homo sapiens
  Genbank Accession No. AI761935
ggggatggaacattctttttcctcaatttactgcgatttctcctggacttataataataatagtaaggatcatcatcatcatcagaggtgtctgatggcaagtattcagaatctgtgtccttgttccctgattttctagtttctttctgaattttccttggactccctactgcctgcttttttgttttatcacatatatcctcttccttgtaattctttcccaatgtaaaagtcccagaaaaaccatggcctttgatctgtttcacgagaccttcaaaaattaaacatttcagcatccgtttcaaaagactcctgttccgttgaacatcgtatctatatatagaactgacatacttatagatggaaaggatggacactcctttttttccattcatttctttcacagctgtcagtatcatcacacgtgtaggagggcattgaactttttcttt

SEQ ID NO: 848 - DNA, 553 bp, Homo sapiens
  Genbank Accession No. AI762208
tgtggaagttgaatatatttatgttataaatgagcagttctgtttctggaaaatgaaaattttcacctcatcactacagacattctttgataacacagtcccagtgtttcatccagattatttcattttcttcttttacatataaccaaccattttggatgttaaaggaacaaccagtgagggcttaagatctgctgcttttgacttggcactcctgatcagttccatccgtgtctcaagtgtatcacattcacgagacaaggcttctcatcagcaatttcaattttatgttttctacttatttttatataagaatacaatgcaacaaaatattcatatattgcacaaacagtgatgtgcatacaaagatgctaacaacattggctggtaataggctttaccatgttacgatctaaatgcttgttcatcagagaatgtacaaaattctaagtttggcatccaaaagggggcttacagttattgaatatttttcccagccctattttaaatcaaattcaagtttgcctatgacaaagactgtctataagtaaca

SEQ ID NO: 849 - DNA, 554 bp, Homo sapiens
  Genbank Accession No. AI762857
tttaaatgtttacaaaactttatttaacaggtgcaattattatactgcgaaaatgaaaatattgcatactaaacagtacctagggtatgatctcaatgtaaaagagggaaaaatgtcaaactattgatagaggctatctctgaatgaaagtagttaatttttcctgcttccttacattttcagtaatatccaaatgttataatgaattggtcacagtgaaacacagggctgacaacccatccaggagaggcaagggaacaggctcctggggctgccagccagtgagagcagagtctgtcccctcacccccatggccagtgacatgctccaagttaggcctggagccttcccctgcctcttccgacctgcatctcagcagccaccctacccagtgaccaggagtccttaggctacctggatgcaagtcttgcggggtgacgggccacccccttccttcttctcccatccaatcccactggttcctggatcccaggccctcagctctgccctaaaggaactctgagcaatccatgatgagtgtgtgctacacacat

SEQ ID NO: 850 - DNA, 604 bp, Homo sapiens
  Genbank Accession No. AI762879
ttttcatcagcaatttcatttttatgttttctacttatttttatataagaatacaatgcaacaaaatattcatatattgcacaaacagtgatgtgcatacaaagatgctaacaacattggctggtaataggctttaccatgttatgatctaaatgcttgttcatcagagaatgtacaaaattctaagtttggcatccaaaagggggcttacagttattgaatatttttcccagccctattttaaatcaaattcaagtttgcctatgacaaagactgtctataagtaacagggcaagcataccaacatcaaaattattcttcttcttatctcacgtgcccctatttctcccaaataagtgacaaggagagtaaaaggatcactgagggaacatttgaagaatgctactaagtgccaggtcctgtacaaggtaattaattactacaaacactctcgtgatggacatggccaatagtgtattttgtcaaaaaacaaaaacaaaacccaagattccagaagctgtttctgacaagaagtccttgtttcagtactcttcagtatgagtccttacttgcaggactgaggaatgaaattgagaaagaacct

SEQ ID NO: 851 - DNA, 670 bp, Homo sapiens
  Genbank Accession No. AI763065
  unsure (1)..(670): n = a or c or g or t
tttttaataggggtaacatgtttatttttattatttagggggccaatgtctggggtaggtaaaactattgaagattaacaaggcaaactcagcagagaagagagtgtccaggttgagttgagttggagagatggtccggtttaatttttgactccgttgtaattgctggatcagttctagacatgtattttccagttgcctctagtttttgaacttgcagacaaaggagaacttgtcttcacaaggcacatccttccatttctggaatcctgtgcttgaggtcaggctcacacagtagccaggattaacactgcttggggctccaatgccccaggacttgtaggagaccagggacccactgctccagtgccagcggcggttctttttggggtcatggaggccaatccagacattgaagtcatcagtgccactctccttaatcagtgaggccacaaaggcaccctcggcctgggtgagcacagacaccaggntgcccgaattcatgttctggcaatagagatctgcatcaacccaggtctcacggtcttcattaaagtagtagcagtatgagcgataggcattggtgccttctgggcagctgatacgggcctggggcaactctgtctgggcctcttggcctcgctctgagacagaacattacgcaggagat

SEQ ID NO: 852 - DNA, 558 bp, Homo sapiens
  Genbank Accession No. AI763136
tttttgcttgataattgtttattggataaacgagcgaaggataatcacctgagcaccatagttgccaaagccccctctagtcccaaacctaagcccacactctgtccccttgcaagtaaagaaatgcaccaagcagggcttatgcagcagccctcggtctggcctggctggagctataaacatgcatgctccgaaaagccgcctcgcggaaggtattcctttaactgcaggtgtttgttgcccttggcacagcaatatgtaatttcccatttttagaacaatgctccaaagaacggtcacaaaaacaaccttaagagggggtggttttcttcctggccgcttctacagtcctgcatttggggtggagactgaaactgccccggcttggctgctggcttccttctgtttgttctggtctttgcattccagtgctgatggctgtggtgtgttcagaaccacttcagagctgcaggagctgaagacttcacgggtccaggtctggccaggctcgggagagcggtcccccttgcggtgcagcttcaggcccaccgtgtggtg

SEQ ID NO: 853 - DNA, 498 bp, Homo sapiens
  Genbank Accession No. AI765436
tttcccttaatttacatttaataacagtgacaatgaccaacattgagcagttgcctcgtgctccggtctcagcactggcttattaacatactcttaccactcagagagggacactgaggagaagagaaatggtaaacatcataagaataaaatgagaggtaagaataaaatgagagtcagaagcaaatgggaggaactctgagtcaggaatttggtaaagatcgggggaaacagagtgacctgagataatggggggttcatctttggggaactgtaggagattcttggtgcctggagacagcagggcaaagaggaaggaagaacctggatgccctagcgagccaggctccggcattctatccccacatccccgtggacgtgtttattagggtccactggccaaatgacaagctccaaagatcaggtaatgggtgggtgtccgtggacttcgggtcccagaaccttcttatgttccttcttcatctgaaaatagcccag

SEQ ID NO: 854 - DNA, 332 bp, Homo sapiens
  Genbank Accession No. AI765629
ttttttttttttttttttttttttttttgggggggggggtaggaaatatgtgatatgtatcacatcatctttctttcttttttttttttttttgggggggggggaatggactcttgctccgtcgcccggactggagtgtagtggcgcgatcttggctcactgtactccagcctgggcgacggggcgagaccctgtcttaaaaacaaaaacaaataaacagaatgagagtatgcaaccttttgggactggcttttcccctcaacagacaccacttttcttgagcaccttgatctcatagtcccagggacggtttctgttattcccattttaca

SEQ ID NO: 855 - DNA, 511 bp, Homo sapiens
  Genbank Accession No. AI765890
tgcttttgaattattgatttattgcacatcaggagaaacacaagattactgctataataaattcactcttacatgctttagcaaaaatcagtaaaaatagaaaacatggtaacaattaaagtgaaaaaattggggtcattaaagaatgtctgactgattagcttgcagtttttgagacggctgagaactaccatcaatgagatcaccttaaacaaacactcttaatgacttgaaaaagtccccatcccaaagtcaactataggtattcaatattgtatatttaactgaatttaaagttatgttaaaacccattttattgaagtaagagaagaattccttttacattatcattctcaagccatatatcaagaaaaagattgaaattacattcctttttttttttttaatagagacaagttctcgctgtgttgcccaggctggtctcgaactcctaggttcaagtgatcctcctgccttgtcctgccaaagtgctgggattacaggcatgagc

SEQ ID NO: 856 - DNA, 518 bp, Homo sapiens
  Genbank Accession No. AI765963
gcatatttaactgaagaaatttatttacttttttctggggacatagatgacataattatagacaagttttgatacataggaaaacccttccgtccacctctctttatgctaaatgaatcatcacaataatttttacaatttttaaaacaatacacagctttcttgggctgaagcaattgcaagaacatattggtactggtatattacagctacttacaatgtttttaagaacagcaatggagaaaaataagtgttttaaatattgatttcatatacagaaagtgcaatgttgttagttgttatataacttgctcgacagtttcttttctctatcaattttaaatcaagataacttggactcagactattatattttttttctgaaaataatacagtacacacatggcagcagtgacttggcaagttgaccttttttgctgcagttatgaaagcaaactttactatgtcaggaactgatttccaatagattagtaatttccaatttcacccatacctgg

SEQ ID NO: 857 - DNA, 338 bp, Homo sapiens
  Genbank Accession No. AI765978
tttgctgtttcacaatctttttattaaattacttaatgattccagtctgcaaatgagcatagactttgctctgttgttatagatcattgaattgggggggaaacatagtaagctaaactatccgtcactgctcatgaaagacccacattgttgattatttttcccagcacaaaagaaaagtgacaagtgattcatcctgcaatggcctctgccaatcttttcatctctatgtaaccttttgtagttactgtgtgatttagcgttgtgctattgtaaatcttggattaattaacaaaacaacaaaaatctatcacctggaatattgaaagaaattcagt

SEQ ID NO: 858 - DNA, 580 bp, Homo sapiens
  Genbank Accession No. AI765981
ttttgacactagactttttttttatataatttttttttgtaaacactttaaagacagacccacaatgcctttcaaagatgaaaaagaaaatgccctttccctcctgggctgaggggtgaggggaaggatagcagttgattcattcttctctcaaacttgctctcatccaatttggtgtcctcagggaggaagggagaaccatgatctggaagtcagtgcagaaggggtgccctgttcccgctggtgtcccaagctcagctctgccccagggtccggtgagcctcctccctggagcaggggcgctctgtccctttgagaggagtcagcaagcaagcccgcaggtcagtccgcagggtgttccggacaagatctgttcacttcaaaccacgagtctatgcagcttttgtgatagatgcacaggcagggcagcctggctatcgtgtccccctgcagcagctcctccaggcagatcacacactcacccgcgtctttagtcagcacatcatcgtgtgaggagaggcgaggtttgctcaaacacattataaagtgcatttccatctcgtcagaacccacagacttt

SEQ ID NO: 859 - DNA, 571 bp, Homo sapiens
  Genbank Accession No. AI766309
gatctattcatttattttactttctaaggaattgatagaaatataaatgtacatatacctaaaaagtggctatcctacatatgacagcccagaatttactaactccataggttttctggatatttcaagcacacattaaaacaattacagagaggacatacatttatgatttatgcaaattaaggcacatcaattacaatctatttttttaagttagtcagtttaaaaatcttcacttacaaaaattcaaaatatgtccaagctcaactttttagtaggaatgttagtttgttgggtttggccattttcttttttcaccttaaaggtcaaacatgaaacaatgaggaatgtaggtctttgtaaaacacataaatacctgtgatgttttgaatcatttggcccttaaaaatattgcttaacaagttaaacccagcttaattgtaggtaaatgcaagtatacccaaggctggactattttagtctgcttttggctgcagattgtacttctgtggctggaaaaaatgttcttcaatagcactgaccagttcattcagttccttcttcagctgct

SEQ ID NO: 860 - DNA, 337 bp, Homo sapiens
  Genbank Accession No. AI766469
  unsure (1)..(337): n = a or c or g or t
ttttgttttgtttattgtggtaaaatacaaaatctaccatcttacagtgaggtggcgttcagtaccttcaccacgccgtgcagccatcccatctgattccagaacattctcatcacccagaaggcagccctgtccccattatgtcacctnagtcacccccaggtccccctccccagtcccggcacccacgaatcctctccctgattctgntggattggtctgtcctggacatttatangaatggggatacaagcgtacccttctgtgtctgggggtctctcatgaaagcgtgacatctcaaaggtgcatccgcactgtggcctggggtcagagcttc

SEQ ID NO: 861 - DNA, 651 bp, Homo sapiens
  Genbank Accession No. AI767222
  unsure (1)..(651): n = a or c or g or t
ttttgacaacttctaagtttctctttatttcttttggaaacaacctccattcttcatctctcaatgtagtcctggcctagtgaaaaagaaggcttttctttctggcctccagagactgcttcctttgtaggaaaaggaacaataaacacttcccattaggtttctgtctccagataccaatcagggaatgactggccaggactggaacttaacggccttgagaacatgtgggatttgtctttgagccccattggcttgtgatgttttcctctgtcctccctgagacagttgctcctgtcctggggggctctgcctccacctcccagtccaggatgtctgaggtggttgaggctgcttgctgcccagtttccagtctgttctggccagggaagcaccaccccatggcctgctgctttggcaagngtcctaagagctcacctgtcccaggctggctatgagtgagactccattgggttgcgacgattctttgccgntctcggtgcatccccctcggccgaattctggcctcaggccaatccttagggggagcgattaaatcgaatctgtcttacgttccctggtggaaatggtatcgctcacattccacacatcagccgagctcaaaggtagccccggggctcaaagagtgac

SEQ ID NO: 862 - DNA, 601 bp, Homo sapiens
  Genbank Accession No. AI767291
ttttttttttttttgttttagttcagtttattttttaatatgtcctgagttctttctgttcataaaattatgatcttatgacagctgtaacttttaattaataatattaacaaatcattattgatataggcttttcaatttgctcaagattaggaattgtaagtggaatgaagcagcacttccagttgacaaatggatccaaaggtaatccaatgtcttttaaattaagcttgtgacaattaaaccaatacactgtagcaatgagaaaactattgacaaagtataaccagggaatattcatctcaatatatgctggaatctgaactttaagtaaaacaatgattacctgaagtagtacaaatggtaaccaggtactgagaaaacagacaatgagcttggataagaatatttttttagatctcacagtataactggagtgggatgaaaaaggaaaatataagatagtttcattcatataggaagttatcctgatagcctgtaccaaagtagtaacttcttcccaacaggttatgaaagctacaaataaaatcatcaccatgaaaaatgacagccagtaactctgaatgctgacatagaaagg

SEQ ID NO: 863 - DNA, 556 bp, Homo sapiens
  Genbank Accession No. AI767724
tttttagcattcatgcttggtttttattttccttgatttaaaaaaaaatcaacttagatattgttaaaatgcatcacagtacctctttgtcagcaagtcagtcaaaaagatttccaaacagctttacggtttccagctgccctctggaagcaacactagtttcacctcaaacaaggaagacacctcttggagtttcagctgttacaactcagctaaatttcaaggtctgtgttcccatattctctgtagtattttaaaccttctcagagcacttgttttgtcaatgggatgctgcattcctggtaaaacagcaatcatgtggtcacctaggcacactagccaaatggtcctgggatcccaaatcacccatgaaatccttcaagaagtcttcatcatcgggaaggtttgcttcctttgttcgtctcaagttttctgaatctttcaagaaatcctaaaatgaatccttataaatttcagcagaaaaagcacagcttaaattcctgcttccacatcttccagaagttgcagaactggtctcagaacaagggacttctgc

SEQ ID NO: 864 - DNA, 501 bp, Homo sapiens
  Genbank Accession No. AI767756
tttttttttttttttttttttttttttgtaattaaaactttatttcatatctattgttaaattacacaaaatcagggaatggtttggaaagctacaccaatggacagatgtttacaggtgaaatcatgggatttacataatggcaaaaatgtatatgtatatttataacatcctctatatacaataatcagtatagacagagaaaaggcacttaatctttgcaaatcatgcacaccacagcaataacacaaaatgttttttctggaacaagcttttccactggctcaggcttaatcctgctttccaacaatacctatcagttttaaaagcaaacattttcaattaaaactaaagaaaattgaaataccatagggatctactaactattttaaaaacacaattgtacacaaaatagttttactttaaaacactgcgacttcaaggggtggaaaaattcctttcagttttttagctctcaggattttcaagactgcaatactg

SEQ ID NO: 865 - DNA, 557 bp, Homo sapiens
  Genbank Accession No. AI768116
  unsure (1)..(557): n = a or c or g or t
tttttaaagttaaagattcttttattaataaattctccctcccctccaaactctccccaaaataaatatctcctccccgctttggggagttgggggggtctgtatcttagggccagccctcctagtgggccagccccctagtgttaaaaataggtccctaaccccccagggtgacccccgtggtggaatttcaggacatctgagtgagtggggcctagtgtcaagtctgccccccaagtcagcctggcccccagggcctctangaaggagggcacccccctcccctgtgcaaatgctgcagttccttagtcagtgtcagctgttttgtgtgagccagcgtgaggctccctttctgttctggagccagaggcagggcaaccagacaccttggaaggttcccctgaaccctgggcccaggcctcagaggtgattcaccgccccccaccccccttgtggttggaggagcttggctcccgccgcgtctgggaggcagagactggctctagaatggatgaatgaatgatgagtgggcgagccccggctggcagggggcacat

SEQ ID NO: 866 - DNA, 451 bp, Homo sapiens
  Genbank Accession No. AI768853
  unsure (1)..(451): n = a or c or g or t
ttttttttttttttaacacgtaacacaaaagcttttacttggaaactggcaaatactggactaaaatactgacatgctcacgctctggcgggagctcggatgcaaaagctattgcacaaagcccctctgattgccttgctcctctttggcatgtatcaacaaagccccaagggccaattgcccacaggtggggactgttctccatcaaggtatggggacccctacttccttgttttgttaaaaagtgcaggtagggcgaaaaagcccaggcagttgacccagtctttgaaacagctgactccccagcacccagtgtccactggcagatgagaggtttgcacctataccagcccttgtttccttggtagggctcaagttgtcagtgtccaagtacctgggctgggccaaaactggggccaggggctggtcttgaggggtaagggctgcangg

SEQ ID NO: 867 - DNA, 539 bp, Homo sapiens
  Genbank Accession No. AI768887
atataaccaaatgttatttaatatcttaaaaagtaacacaatccaaaatggatatttcacacaacactacataaacaacatgaacacagtatcaccatagggagggactttcaaatatagacttacaaaaatccctgtccttttttttcttttaagttattatactaagcatgacaagtaatcatcatttacagtatggtacactgacacgataaaaaccatgttacaaatgtgctgttataaatcagtaacattagggaagacatttcatgaactgtaattatttcatatgaaatactatacaatataaacagaacatccatcttggatgacctttacagcaaccagagaccaagtaatttaaaattttttttcagtgcaaacacattttattcaaggcagtcttggctgcaaaactcctttctaacatacagtaaatcccacttgcacgtcttaattcatttaccctaatgcaatagtcacattcagtcactcagagaaagatacctgcagaattatgatccctttaaacttgacgt

SEQ ID NO: 868 - DNA, 443 bp, Homo sapiens
  Genbank Accession No. AI769269
tttttatcagtcattgtatttatttaccagcatttatggcaaatggccagacctgggcagggtggtagcaatgatagattttacaaattaaggcattgttctttatttcaaaattttcatttacctatattttccttggtcttagaaatatgaataatttagagctggcaatactcaccatcaggatataataaacggaggtttctttgtctgaaatccataaaatgtagtaatactctattgtacttttaaaaatcctatttttgcagttggcttcctatcagtgaattagttaggtagttttggtacatttggagggtcataaacatgtcatagaaagagtactggcattatgaaaacctggatgttagggacttcacaatttggtcattttgcagctgtacaaccttagaaatgtagttctctgaatttcggttcctctg

SEQ ID NO: 869 - DNA, 486 bp, Homo sapiens
  Genbank Accession No. AI769290
tttttttttttttttaattattaaacattttattgcaaatgaaaaatatacaaacatttaagatttataaactttctaaaatcaacagtaaaaacacttgcaaaatataaggcttcatgaacagtttattcaaaatatttgagaacatttcatatattcatatatttttccacaaagctttgttggcggggctaaatagcatttagttcagtttttctggttttattaagaaaaatatttttattggaataattttgtattggtgttgagatagtatgatgaattcactttcacttgcattatttaaaatgagataatgtgacaaattgagaaaagatgaatgtataaaaataggcactcaatggtccttttaagtctctagtgacaagactgtaagaattcaaatgttgattcaaagaaaagtacattttactaagtgcctattatcaggcataatgccagatgctttccatgtatttaatactt

SEQ ID NO: 870 - DNA, 550 bp, Homo sapiens
  Genbank Accession No. AI769511
ttaatgtcaaatttgtacaaacatggtgctctaccaggaaggattcgaggtagataggctcaggccacactttaaaaacaaacacacaaacaacaaaaaacgggtattctagtcatcttggggtaaaagcgggtaatgaacattcctatccccaacacatcaattgtattttttctgtaaaactcagattttcctcagtatttgtgtttttacattttatggttaatttaatggaagatgaaagggcattgcaaagttgttcaacaacagttacctcattgagtgtgtccagtagtgcaggaaatgatgtcttatctaatgatttgcttctctagaggagaaaccgagtaaatgtgctccagcaagatagactttgtgttattctatcttttattctgctaagcccaaagattacatgttggtgttcaaagtgtagcaaaaaatgatgtatatttataaatctatttataccactatatcatatgtatatatatttataaccacttaaattgtgagccaagccatgtaaaagatctactttttctaaggg

SEQ ID NO: 871 - DNA, 552 bp, Homo sapiens
  Genbank Accession No. AI769689
tttttttgctcttcccagcaccaaagctttaattcctcaggctgacagcggtgcagggggcctggtcctcatcagggtttcagcagcagatgccatcacatcttgttcttgggaaactgctgacgaccgaaccctggggctgagctcccaagacagaggctgggcagggccagggccttgaacccatgcacacctggctccagtccctctggctggtccgtggagagcgctggggtcgcgccctcaaatccctctcctgttctctggtgacttcccacttcccactcccccacctctgtcctcacaagcggcgtggctgagggaagagagccatcccactccacgctgtagcagaggctgcccaacctgattaaagctgcccagagtcaagaggagcctgggattgagactaagtcccctcaactgcatgacatgaaaagttcctttttggcaaagctgcacctgagagtcctgaggaattctgaaggggccgagtccccgtccttcgtgccccttatccctgctgtccacgctgaggcctgagcctgcctc

SEQ ID NO: 872 - DNA, 325 bp, Homo sapiens
  Genbank Accession No. AI783611
aaatcgcaaagttcagctatgtcagtattcattgctcttcgtgcctcagcttgtttgtgtagccactcctcctcttctgctacttgtgattcacgaagagctgttgggaatactcgaggggtaaagttgattttaatactgccaacagagcgaggagcaggaatactgtcttcctttaacttctcagtaaatatattttctgaatttctcccttttggagcaagatttctagatgccaaatttctagtaagactcttatattttattttttttcttccttctttaatttgcttttctttttgacataatttctcttctctctgaa

SEQ ID NO: 873 - DNA, 472 bp, Homo sapiens
  Genbank Accession No. AI791593
gaataagctaggtgaactggaaaaactaccccaggcagagaaagaaccatgcagacacagagtgggggagaagtgaggagaataacagacagtgagaggaggaaggagaaggaagaagtagaaggtaaaaggaagaagagaggaagagagagaactcacctggtgctttctagaaagagaaaaaagtttaatgcaaggtaggttagtgatcacagacatagatgagactggagaaataaggggagggaatatgggcagatcacacagtgctttcttaaggttaaaaaattcataaaaacaggaaatcccttaaacagttttgagatgggatcagatttgttttatgaagtttaccacagttgtgtttagaaaagattgcagaggggtaagatgggaggtgatattgtttggctctgtgtccccagtcaaatctcatgttgaattgtaatccccagtttggggagggacttgg

SEQ ID NO: 874 - DNA, 326 bp, Homo sapiens
  Genbank Accession No. AI792564
atgatcgctcgacatcgatacgactttttttttttttttttttttttttgagatggggtctcaccatgttgcccgggctggcttcgaatgcctaggctcaagcaatcctcccttctcagcctcccaaatagctgggattacaggtgtgagccaccgcgcccggccgaccatgcaagcttttctgacggttcctgaaaccaccgagttggttctaccccaggaccgacgcacactctgtccctgctgcatggaattcttccctctggtcttgacatgactgggaaggcttgcgtgcgcatgtcgcccttctgtcgtcttctcgcagc

SEQ ID NO: 875 - DNA, 530 bp, Homo sapiens
  Genbank Accession No. AI796235
tgagatgattgttagtctttattttctctaaaaattgaaaggcaaacggaactctttacaaaaagaaaccatctgcatgattgaaatgggaaggtccaggtgagaggaaggaatctaaataggccagggttagccaggatctttgtgtgttggtctagactccagggtggtggcaaatatttttaaaaagaaagagatcaaccaagagttggagtgtatagcccctagaaataggcagtgatggtgctcttcttgcctcagctgagcctctggtgctgatgagggaactgacccaatttctcgggctcttctgccacccccatgcccagcctgggatctgcccagtgctgctgcccccagagggttgctgactttccaggtcttagagaagaacactctataggtgtccacaactcatgccataagccagtctcacaagagtgtcaggtgtgcaaacattcccagaagggtcaagaggatcagagcaggcaggattcgcagcaccagctggccaagaggacaatccttta

SEQ ID NO: 876 - DNA, 357 bp, Homo sapiens
  Genbank Accession No. AI797429
tgaaaatgaaaaaggtaaattttatggtgggtaaattttatctcaattttaaaatacatttaatgaacacctgctatcagcacaacagactttcctaagccctgactcatagtggccctgctgactgcctagcccagtggtttttacaaatgtatgcttcactttaaacataagggattttttagaaaagctttacatagcacatttttgtaaaatcaaccccccccacatagtaaagaaatcccataaggaaatattttgtaaaattaagaaagcttttgtaaagttactagttcatacctgatttatctgtcctgcaaatgtgaattcttttatataggatttacttaaagggaa

SEQ ID NO: 877 - DNA, 549 bp, Homo sapiens
  Genbank Accession No. AI798028
tttttttgaattttttttgtttcgtttatttaaagaattatatggatcaaaagagggcaattaagaattatgaattatgaattctttttcatagacacagaaattaaaagaacttttccttagaaagatgcataattcacctctactcttagtaaataaaacattttagtaaacaaatatcttatcctcaaatacacttttattctaaatattgatattaattacatagaaattcacatagaagctattcattcctcatatcttatagtgctttatttttaaatttataaatgtttttcaatctatcactgccaaatgagcaatttagcacacaaacatgtacttattttatttaaaaaaaaatggagttgagaataatttatatatacatatgtatactgacatttataaaattgtaaatcatactggaaaaatactatacatattattctcagtatgcaaagtaggagaaaaacacctaaaacctttaatcagtcttaaaattctgatagttgtacaaattagttctaatccgtagcaatgggacca

SEQ ID NO: 878 - DNA, 558 bp, Homo sapiens
  Genbank Accession No. AI799626
  unsure (1)..(558): n = a or c or g or t
ttttttcaatattacaacaatctttattggaaaaccccaagtattttgtcttgaaaaatcagcaatccaggtattaaaaatagcatggaatgcccaattttactttgataattacatggtagtcagtttccgctcctggctaaagccttggattttcttctgggcagttcctaaaggcacaggtggcatggaagaaatcattccattttcgtctcctccccttatttgattggtgtctggttaccaaaagagtcatcaggcccttggatacccttcttgaactgatcttctagatcgcaagtcaagactgccatcatgttcccccaaatgcaaaaagccttgttgctccacctctctcctttccagaacaagtgagctggggtttgctttcttctccatatcctgcagcttgatcaatntttctatcaggaacattntatctttgccctcattaatgatctgctcatggagcagccttatcataatcttccttccctctgtgatctgccagtaaagataggtgatgattagcacaatgagggtgaggatgaaaaagaa

SEQ ID NO: 879 - DNA, 403 bp, Homo sapiens
  Genbank Accession No. AI800499
tttttttttttttttttttttttaaccagaagcaagtttatttaagagatcagttcagcacaggctactgtagaatgtcttaccccaccatattgtaatggtatgcacaaaaggcctaaaatcagagctatatatctaggaacaagacagatatgttggatgctgttgtacatgcaccaataatattttaaaacaagacaaactattccagtgaccataattgcctaccatagactccagagaagatcagcattttagaattagaaacacacttgaatagatggaaaagaaacaagctgttctacctgtgacaagagcaccagtattgagtgatgaggacaaaaagaggaagaatatattcaaggaaatgtttagcacttttgttcaaagctagaacccactg

SEQ ID NO: 880 - DNA, 604 bp, Homo sapiens
  Genbank Accession No. AI801898
  unsure (1)..(604): n = a or c or g or t
gaggccttcagagcatttcactagacctctgtctgtgtcggtccagtgtctttagccaagctttgattaaagatgacttccttgtttgctcaagaaattcgcctttctaaaagacatgaagaaatagtatcacaaagattaatgttacttcaacaaatggagaataaattgggtgatcaacacacagaaaaggcatctcaactccaaactgttgagactgcttttaaaaggaaccttagtcttttaaaggatatagaagcagcagaaaagtcactacagaccaggattcacccacttccacggcctgaggtggtttctcttgagactcgttactgggcatcagtagaagaatatattcccaaatgggaacagtttcttttaggaagagcaccatatccttttgctgttgaaaatcaaaatgaagcagaaaataccattcaaaatgaggcacagcgataacttcttcacatgctatttcaaaaagcctgtttaataaagctgaatgttaaggtgtatgtaggttattgcaggaactntaggaattaaatatgttcatattcttcgattatctcctaagtgacagtgaagatatgagaatntactg

SEQ ID NO: 881 - DNA, 274 bp, Homo sapiens
  Genbank Accession No. AI803868
ttaagattggtatcgctttattaatgtggaatgtacaggcagtaaaacaggttatttaattagttgaaattatctaaaatagatcttaagagttcacttagaacacttttctggactgcctttcaaagtagataacatcagacacagtgataacataataactcattcaaaactaaattgtacatcacctatgatatcaacattttgtattcactgaaggaaattatatttgaaagtgtttgcctgtacattatttgacaaagttggggggatt

SEQ ID NO: 882 - DNA, 300 bp, Homo sapiens
  Genbank Accession No. AI804066
tttttttttttttttttttttttttttttttttatgggggaacagtagttatgaacagggacttaactaaaatgtcaaatgcttttaataaattttagtaagttttttgaattgggggctatatgttgtttcatgtttcctcaagtttagtaacaactaccttttcctacaggacttcccttagactttaacaaaacgcaccataaaacagggcccagcttggagaggtctggggtcatcagggaaagagggactgaaaaaaacaaggggctgtggagtggatgcagggtgtaggggggg

SEQ ID NO: 883 - DNA, 535 bp, Homo sapiens
  Genbank Accession No. AI804914
  unsure (1)..(535): n = a or c or g or t
caaaaaagtaggcaagtactttgctttattgacatcaaatggaacttcttgtccctcacgcagtccacacaacagtaaaggcacaatgaggcatattaaaacatagccagtttcaacagcttggatatttcctgccatggaaaagtatcctgcccacagattcacattaacatacatggtacattaatatcaatctctatcatataccaggccacggtacatgtttgcacgcagggtcacgttctgcaacaaacttattctaataacagtattcagaaggcaccctatgggacacaggtgacagtgaagttacgaggctagatggccacatcttttacatccaagaaccgccctggggccacaccccaaaacactatccctatcccaaatcacctaacaaaaatgagagctgggaagggcgcaggtgagcagtgcatctacctaggtaatactgtctatgtctaggtaatactatgtaattttatcttcatactgcgtgtggagataaaaaacacagcttctnctgcacctcttc

SEQ ID NO: 884 - DNA, 772 bp, Homo sapiens
  Genbank Accession No. AI805943
ttttttttttttttttttttgactcaaactttttattgtactcaagtaaaaacctgctggacccacagcaggtggcacaaaaaagaggtaggagggggtaaggacactgaggatcaggtctccagcaggtctgtccagtgtgcctcttctaattctgagtcttctacttttttctcagtgtccatctggcacagccagatcaggtctccccaaagcagtgacttctcacagcaagggcattggccctctaggggcagaagctgccctggttcttcctgaagaaactcctctgccaggcagatcacatgggcccttagcaggcagccagggtgggggcaacacaagggcccctcttcatcctggatggtctgggcgcacagggagcagcaggcccctggatccccctggtctggctcaggctccgcgtcatcaaagggacctgcgcggcgcctttggggccgggccctgggccggtggaggcccaaaggccaaaagcacgtgcggcggcggcgggaggcaaaggtcctggcggaggtctgggcgcacccagcgcagcgtgagcgggaggcgagcccagggcggtgcgcgcagcatgtgcgccagcacgcgcaggtggaaagcgaaggctgtctctcctccaggcgaagccccacgtgcgccaggcggcgcgaggcgttcgggtgcttgcaagcccactcaaaccgaaggccgcccacggaggagggaagccgtgcacgacgagcaccatctcccagggccctcgcccgttggt

SEQ ID NO: 885 - DNA, 565 bp, Homo sapiens
  Genbank Accession No. AI806507
tttggctgtatatagctttatttttagaaattaattcacacagttgttggggttggcaaacttcaaatccatagggcagactagcaggctggaaactcaggcaggagtcgatggctatagtcttgaggcaaagtttcttcttttccaggaaactgcagtgtttgttcttgaggcctttcaactaatcaggtgcagctcacccaaattatttaagtaatctctttcacttaaagtcaactgattgtagatgttaatcacatctacaaaataccttcacagccacacctagattactgtttgattaaataactgtgtgctatagcccaaccaaactgacaaataaaaccaaccatcacatccaccaaatcaaaactccaggaacaaatgtttaaattacaagcattaagattcttcactctgaagaagctttcttggtgcatttagcctgtttccctttgcaaaactttcatgtgcagttgtcaatactaagcaaagtctacctaatctaggcacttgcatttaagagaggaatacctctggaacccatcccatccttccaccctca

SEQ ID NO: 886 - DNA, 487 bp, Homo sapiens
  Genbank Accession No. AI806805
ttttttttggtgactgcaaaggacagagaacctttccactttggccatactgggttgctaagccggagccatttcagctcctggctcctcaagataacggcgagtccagtgccatcttggagaagctccaggggcagggctgacttttctcctacaggaggaacaatgtggggatctgagggatgggagggagacttccccctagagtggtggtcctgctgggggctcatatccagggacccaaaaggggggctgtgtaggaggttccacattggaggggctctctctctcgcagctgtcagagttggtcctggctgtggcgtccaaacagcttgagggaaaaagatcctgtctaaccacctcatctactactcaagttctttctgaaggagggatttcttcagttaaccatggacagtgaggtttctcaccacagtaacttgagtccaggttgagggggagacagatctgtggtaaatctctgact

SEQ ID NO: 887 - DNA, 593 bp, Homo sapiens
  Genbank Accession No. AI807036
tttttttttttttttttttttttttttttttaaaagggtcctccatggggcggttaatgaagtatatgcaactagtttaacagcatgacaattgttattccaagacatcttcagtaacttttgaaatagcaaatttaaattttaacatgttcttatatttaacatgtttgatattttcttctaaaatatcatagcaaataaatattcaacatacaccaaaagtacttaaaagaagctcctttcctttggacatcaacttttaaaaacacgaacaactttttgaaagacagaatttacaaatacagaactgtactgacttaaatttggaatttactaattactggggatactttagtgagtctgcatatgtgtattattaatacatgttaaaccatactgcagataacaaaaaatatacttacatttctcttccagagagtaatgactgtattcaaagtctgagggaatgacaaaacgggatgcacatctaacactgatacacggttcttcagaaaagactagtttcagctgtttccaggtttacataagatgatggaagcagtctctaatatgttaatcaagaaaatatatgc

SEQ ID NO: 888 - DNA, 530 bp, Homo sapiens
  Genbank Accession No. AI807627
tttttagtttaaaaagtatatttacaagtattagttgtcggccagcttgatctcatacaaagtcatttacatcctcttacagctaaagttttaaaaaagtatcttcacaaagtaagtctcaggcacactaggggttctatcataaaacaccaagtagatcagaatgtccaaacttactagagaagaaaagtggaattattggctatattttcaaattgcattcaaaggaaatttaagttctgaatttttttcaccttcatacttccaagttaatagaattcaaccagaacactccattccttcaaagcctctagccagacaaagttttactggattacttcttgctttccatggatatgaagcagagtcctggtaggcacattttgcatacctgcaaagatgcagaactaaacagttccatctgttccatattaaaacaaaagtcctgtgaaccttggatggtgagtgtaatacttcagcactagcaccaaagcctcaaatatgaaaagataccaagaacaccactagca

SEQ ID NO: 889 - DNA, 554 bp, Homo sapiens
  Genbank Accession No. AI807902
tctggagagtgctctattctaggatttaattacacttcaaaggtaattgtaatttacctaccctgcttgtccaaacaatcaagagccacttccataaaatctaaactactttagatataaaccatttttaccaaaagtcacatcatagtcacaactgcaaactggcattgctatgcaaggctggcagtaaacattaacattagcttgcaaaattaatacaggcctacagtctgataactcttctagacccagcctgattcttatcaggctatggatgaagaagtttaattaaaactcaatccagtctagactgtgtgacctgttctttgtgctattactgttcagtggcatcaaatgcatcataattataggtggaaaggctagtaatgatgccagcaacttgtttaaatgaagtttttataatttttaaagctcaaacataagtacatttcaaagttttataaggtttgggagaaactctatcaagctaataattcagtgtttgtaaattagaaatatattctatgaaaatagttatatcatgtaatatacat

SEQ ID NO: 890 - DNA, 443 bp, Homo sapiens
  Genbank Accession No. AI808615
ttttcatgtattaaatattcattaatttatttaaaccttgcagatagcttatgaagtagttatctcattcagttaggatctttgcaggaaaagaatggctcaaaataagataatacagagactatgacaaagaaacaatgctgaggcacctagatcagcaattttgttaagctattgcaccctgagagccaaagggactgagagagaagatatgtgatgaagccagcgttggagccatgatgtgggggtcagttggcaggtgctgtagtccagaaaggttgaagatgcatattttctttatccgatctgtcattgatgagcatttaggttgattccatgtctttgctattgtaaatagtgctacaatgaaaatttgcatgcgtgtgtgtttatagtagagtgacttatattcctctgagtatatacccagtaatgggattgct

SEQ ID NO: 891 - DNA, 481 bp, Homo sapiens
  Genbank Accession No. AI808768
tttatttgtccaacaaatatttattgagcaactatcattggccagtgactatcccaggtgttagagatacaaccacaaacaaaatagatgcaagtccctgccctcatgggacttacattctagtggaaggaaacaggtaacagacaaaatatatatgcaaaacagataaataaagtgcatgacatattattggatgataagtgctatggagaaaaacagagtaagaaagaggatagaggggatggatgtgcaggttgtaattgaagacctaaagatgaacaatcaaactgcaaaactattacagaaactatctttacatcaaacaagacacacaacacagccaaaaagattaactttacttctgccaacattaaaaacttatatattataaaagatatcacaaacaaaaaacattgactaggagaagataatggcacccaaatagttttcgataaatgattaatattgataagatgtagag

SEQ ID NO: 892 - DNA, 538 bp, Homo sapiens
  Genbank Accession No. AI808807
atggtacaaaaatgtttatttaaattaaatatttgcgagggattaatattgacaactgttccaaagtatgagttgttctttcaaaaaaacgaaacagtttagcttaatgtctgtgatactgttttatgagattattcatacatgctctggactgcgcatcagtcaatcatatcatcaacaatttactatttattaccaaatggcatataaagtaatagcataaagagtaatcataccttataagtgattatacaataggacatcttagaaggacaaaaaggatttatcaacaatacaaaacataagataaaaataataggagattatataaaacatatttcatacaggaaataatatgctaaaatcaaaaaaccaacaactgtctttcagcacactgttatgcatgctcctttaaaggaggtttgggggaaagatgaaaatattttgggggcaggggtccagggctcagaaacatttttggaatcacagtgagtttctgatttgcgggaagttgctctaaagcactggctgaggactt

SEQ ID NO: 893 - DNA, 596 bp, Homo sapiens
  Genbank Accession No. AI809005
  unsure (1)..(596): n = a or c or g or t
tactgagcaaatataccagctataaaagtttattaaaaaaagggacaacatatgtaaacatatttttcagtcacaaggcttcataatacagcacattaggcccaggccttaaatctctgcagtgagagtaccttaattttttactaacagtaattgacttatctttcagtgaacattaagcctacacaaaaataaataaccagattctgctaagtttactaacacagaaaattgcaaatgtacaatagattgcagcaaaagttaactatctgcagtaacatgtgagattgaattgttatattacaattattttaatacagcttcattttgaaattcatcataatgtagagttgactaaaataaagctaaaggggaataataacagagataaacaaacacccagatcacatacactccccaacacacacatgcaaacacacatttactaatatgcatgcacacacacacacgccaacatacatgcacacacatacagggatgttgtggtagaagtaaaactgaggacatagtttccatcctttttctntcatgtattgatgattntaggtatatatttctctacccttaagctggaa

SEQ ID NO: 894 - DNA, 787 bp, Homo sapiens
  Genbank Accession No. AI809489
ttttaaagttttcatactttatttcacagcgattgacacagaaacatactaaagttagtaacacggcacccatccccaccgccgcccagttcatggtgtcctgcttctacgaggactgtactgtggctgggggtggggatgggatgggggtggcgcctccaaggcaaacctggtggacctgcataagaagctggaggagctggaacttgacgagcagcagaagaagcggctggaagcctttcttacccagaaagccaaggtcggcgaactcaaagtcagcatcgcggttcttcggggcttggcgtacctccgagagaagcaccacatcatgcaccgagatgtgaagcccttcaacatcctcgtgaactctagaggggagatcaagctgtgtgactccagggtgagcggccagctcatatactccatgaccaactccttcgtgggcacgcgctcctacatggctccggagcggttgcagggcacacattactccgggcagtcggacatctggagcatgtgcctgtccctggtggagctggtcgtcggaaggtaccccatacacccgaccgacggcaaagagctggaggccatctttggcctggacgtggtcgactgggaagaaggagagcctcacagcatctcgtctctggcgaggcacccccggcgtcccgtcagcggtcgacgggatggatagcccgggctcgcctgggcatgcttgtactactggactatatgagaccgagcacctcctacgctgcccaaccgtggttcacgctcgacttcacag

SEQ ID NO: 895 - DNA, 496 bp, Homo sapiens
  Genbank Accession No. AI809578
aatttagtgtatgctttctgaaaaggtaaatttattgctattttgatacaatttaaaagggaaaatacatattaaaatttagatttaggaatctttattttggaattagcctatcaaagagtatgagaattaggattcctttgtgacggttctccatggaagtttagggacgagttcttaaatgagaacacatggatggactccaggggagtctgagaagcccttataggtgtgttgtgagagtgaattttagtggcaaatagagtacttgtgatgtgccaggcattcttcttatcaccttatttaaataaggcaagtaacttgtgcaaagttaaggaatttgtccaagaccacagggtagtagatggcagagattggaaccaacccaggaaatcaaataaattttcagaaaaagaaaattcatctgtggtaggtaaatgggaatgttcaatgagattcatttttgatcccatccaaatttttcaattgaaatgca

SEQ ID NO: 896 - DNA, 481 bp, Homo sapiens
  Genbank Accession No. AI809891
gccgtgatatatgtctcgctccctttcgcttacagaaaggatttcttccgacagacgtgaccccagaaggctgccgagggagactttaggacaagaggcgttgtttttttagggaaggaagaggagcctgtgcagagttgaactggggtggagaggtgccttgtaaagtatggtttccagagatggtgagacctcgtagctaagcgttgtttcctctgcacgtaacttttcagcgtggccgcatttggaaaaggctgaaggtagaaaactctggaatggagaggctggcgactggagcaggatccaggggctttaaattttaacctgaatgcgatcgaatgcgcgactcccagaagagatagccaggcgtccgcccggccgctcaacccccgccaggactcggaatgccttgcttttggttcttttctacaaggatgtctgcgtggatatccctggacactcgataccccccggggacctg

SEQ ID NO: 897 - DNA, 553 bp, Homo sapiens
  Genbank Accession No. AI810266
tcactatttactgaaagtttaatgaaataaaaaatagaataataaaacaatcaaggaccaagggataatcaaaaccaagtacatttgaaaaagaacaaaatagaactttgctatactccataatgataaaataaaaatccaaaaataagatgtaacattcaaaaccttatatgcacttgactacagaaccactactatgtcaataaataactgacagaattagaaggagaatttcaaatttacaattgtagggtaaccctttcataattctgtatgagtgttagattctcatattacaagcaaagaaaaatgctaatggttttctaggatttgaacaagacaataagcaaatttgatccatgattaccttcatttgacacagaaaacatcccttctttttttcaaagcacacgttggacaatttcaaaacaaattaaccctggtttcagaaagttacagaaattaaggaacataactacaaaaagggagatataaagaatgacaagagaatgctgtgtaacttttacaaaaaattaaactcagtggaaaataa

SEQ ID NO: 898 - DNA, 542 bp, Homo sapiens
  Genbank Accession No. AI810632
gtaattattactttttattaatttagagcatttgaagtataaaaataaaaggcttttgacatactgtatatacatacatagccttctgttgtacatcctttccaacgtgttttttaaaatttatatttcagtccaatattcaataaaagggtcattaaaaacaaaacaaaattgtgaaaaaaaagaaataagaatgtgtctctgttgcacaactgcattctatccttgcaggtaatattcttacatccaatgagagcgctgcctgcatagaggtcatgaaattgaacctttaacctctccatgtggatcagatagaaaaggatttctgaagagtgcatttgccagtttaaaagcaacacttttaccatctatgagatagaggaaatatgtcaacattaaccaataataatctttaaaagttaaccctttaatccatcctattttccttctcgtattttaaaaagtggctttaaatcataattttctttgaatagcaaattgtatctgatatcttttaaaaattactccatgtgaattcactg

SEQ ID NO: 899 - DNA, 401 bp, Homo sapiens
  Genbank Accession No. AI811865
  unsure (1)..(401): n = a or c or g or t
tttttttttttttttttttttttttttttttttttttttcccaaccaagggagctgtttatttgacagggaaggaatttgaggagccgggttagtcctggcccaaaacaggcagggggaggggggggcggggggtctttgatgggggcctaaaaaactgcctttcccctaataggcggactccccggggggccacgcttgggctgcaccttaaggtttaatngaagtccaccccaccagctggttttttacttttgaacccggggttgatgagcgactttcctggacaccgcctcctgactccaggtccagggccacctttttggggatctgggtctggaaaaaaaagctgaggccctgcaggccgggggcttttcctcgggctgacagctgttttttttg

SEQ ID NO: 900 - DNA, 733 bp, Homo sapiens
  Genbank Accession No. AI813532
  unsure (1)..(733): n = a or c or g or t
aagagacagggtctcactctgttgctcaggctggagtgtagtggcgcgatcatagctcgctgcagcctcaaactcctgggctccagtgatcctcccctcagcctcctgagtacaggtgcacgtcactgcagccagccagtctgacatcttgattccagggtggaaaacccttcttgtctccatggtaatggctgggctctcccaccctccaatagttcagctgccaagctcaagtccagtggaatttatcaacaatttatcaccctgcccctgctctgctagacaatttcatgccttctcctttatccccatgctcctgagactgagcctttccaggagcccctcaacctgcttcctcccagaatccgggcaaggctacactggtttcccctctgcagggccctggccctgggagggggaaggctgactctaatggggaggaatcccagcttcagtggcttcaaggcaggccattcaacttaccgaccttggctacacacacccatgacancgcacacagacgcagacacaagactgggcacttggatcacactggccatgtaccaaagtggcaggggcagcccgtttggngcccccagaattgaggttggggagtagtggggggagaccaccctttctgngggaaggaagagtctaggctgaggtangagtagaagatggctacaggactagtcatctctagtttctgaaattcctgaaagggagatgtgtg

SEQ ID NO: 901 - DNA, 499 bp, Homo sapiens
  Genbank Accession No. AI814274
tttttaggttatcatgtttattcacaaatcccagtacaacccccttcagggatttcagaaacctgtcccccacccccaacccctccaggtcatgtcagctgatgtgacaacggcgacattattctcccagcaaggccggatgccagtttagggcatgatgttggcgacgctcctccacagggcgggaaggttgatgaaaggcgtgttgaccgaggccccaaaggctaacggggtggttgtggcccctccttgatggctggaagatccgctttgatggttgccattcagcagctggttggcctccttgctggcttggttgaccccattatgagcattctgcagctccttcccggcctggccagcagcatggtgggcaccttggccaagcttctccacttgctttccagcctggtcagcagcatggttgaccccttggccaagtttctctgcttccttcccagcctggtggaccccagtgtggaacccttggaccgctttg

SEQ ID NO: 902 - DNA, 497 bp, Homo sapiens
  Genbank Accession No. AI814761
  unsure (1)..(497): n = a or c or g or t
agcggccgcacaggccctgggcatcaatccagcagggctcccgactcactccctggagaccagctccccaaccacccggccctgatggcatcccgctgcggccaggtgtcctctcagccgaggtccttgtcactgcctagctgcgtccgcctgccacaccagctcacccgagatgtaggtggcctgnacgtgaagggagtcgtcgagcaccacgaagtctgggacagagccgggcaatgagtagggggcaggagtggggccgcccacctaccccagagctgctccccaacaacccgacgctggtggggaaactgaggcccagggacacgactagtgcaagacaccctgacccatcacagatggacagaggtactggacaatgctccctgcaaccccttgcctggccttgtctgcaacaccagaaagcccggcctgatggcaacacggggctacaactgaggctggcagccggcagcccacctgagaggagggagcta

SEQ ID NO: 903 - DNA, 499 bp, Homo sapiens
  Genbank Accession No. AI816780
tttttaaatttagaaaggagattttatttttttataaagggttacagcctgcaagtggccattctgacagactgggaggcatagcttcctgctgaaacccgaaaagtaggtttccagggaggggagggcgaatagtgatttacgttgatctggctggccacatatacatattcaacagggaatagggggagctctgaatatttgtgaagggatcctgctgcatgcatgctgagtaaacatgcctgttacatgcaacccatgttcactttggggtggagacaacatttaaatacattataattaggccctatgcttcaaaaggtgaagcagggacacaaaggcaatcaagtgcatagcttctgtaaactgtccagaacccgcccacggccagtggtctcttatcaagagaaaactactgaaatcagtctcttgtccaatcaaagcagtagttacggcttgtgtagggagggctcagtcagtttatggtaataggtgagct

SEQ ID NO: 904 - DNA, 822 bp, Homo sapiens
  Genbank Accession No. AI816843
  unsure (1)..(822): n = a or c or g or t
tttttcttcatctttctcagatttcataggattttatttttctactaacacagacagacagggaaacctacaaaaggaaacggagtcaattgtaaatggctgtagttactggttacacggagttgacaacacaaaggatgcctggtgcttgcgtgcagaggctgcagcccagggcgggggcagagctgagccctcaggaggtggtttcgtgtgcagaactgagcggccctcaaaagcagggctgttttccagccaccaaccaacgttcagagccagcaccatgtggccgctgtgcctctagcctgctctcctccaggtgcaggggacacaggacctgccggccccatccagacatggaggagcgttttgctgcttaactcatgcttagccaaggcaggcagaggctgtgggaactgctgagccccgctgtgatgtctgggacacgctctgggcagcagccgtcactctacagcaatgccagccctagtctggctcctcagaaacatctgggggcacaagtgcagcctctgccccgatttgaactttgttgatggggctgattccttgngagaccatgcaagccagacgtagccatctggggcctctagtatatagaagcnnacctctttatggacaacccttgttaccacgtaactcccttgcgtaggcagcgcttnggtccttgctgccgnccgagtgttgggacgcagtgtttctgtcgtggatcagctgggcctctcgctcctgctcggtcttggacagctgcatctgcttcagcatctgcgacctcntgttcattcatagtgttcttctcgtagtgaa

SEQ ID NO: 905 - DNA, 763 bp, Homo sapiens
  Genbank Accession No. AI817147
  unsure (1)..(763): n = a or c or g or t
tttaatatataacaaacttatcttttaacattttaataactggatttcgatataattagattcctttgtaatcctatatattttatgcatttaaaaacatgattttaagaaggcattcataggctttaacagatagctaaagactaagaacccatgtttttattctactttcaatacttgaaaagttgtggataaaacaaaaattatgttaaaaactgaaaagtaggctgggctcagtggctcacgcctcaaactatattttctaattagtacagtaaatacacattaatcatgacacaattatttcttctggatacagcaggaaaaattaagttaagagaaagtgcttcatatttcttgatttgttataaaaaggagagatcctctagatttctgggtaagagggaaagctagcaatcccacaatgatttcctttatttcttgccatccgaatatatccttcttcaccaaagttgtggccccagctgtttttcacaagccagtattctttcccattaagatcaccatagccaaccacaagtacaccatgattcacattctgagtacaggatggttcatagtagacaccacttctgtagagaaagaaaggaagatgacgcgcatctacaccaaacagacactggcccttatttggccacagctctttcaggacantctctctgcatatgaggaaggtagtgtactttggacntgtgcagcacggattttttgagcataatgcacattctgaccactggctttg

SEQ ID NO: 906 - DNA, 572 bp, Homo sapiens
  Genbank Accession No. AI817448
ttttttttacttataaagtcaaaaaagtttttattctctgatatataaaaccaagaaaactttaatacataatatgcatagttttgtttttttaaaaggagaaagtggcagaagtacagacctgtgtagaaaaatacacccaagcagctgttctaagcagtaattcctaaaattatgaatagcacacaaatctcagtgaaagcctcatttcttaaaaaaaaactcacatttgcttaacaacttaaaatgtgataagaaatataaccttccttcttgatagccgacccagttatataacagacattcaagaatcagcaataacttacttagtaaaagaacatttcctttgtgagggtaacattattagttttagttccacaaaaactgcttctgactgctggggcactgaacgacatgcccttcatcagagagcaagtccggggggtgcggatcctcaccggagaggtcatggggaagcatctttggtcttctcttgcttaggaacaaagggccagcaatccattgcatacaaataacatcaaacacaggtgcaggaattcacaactcctcag

SEQ ID NO: 907 - DNA, 457 bp, Homo sapiens
  Genbank Accession No. AI817659
gcggccgcccaggggctggagcagggccgcgcagatccacggctgcgcctccgcgttgccgcagacgcagcccgacgggtccgcgcagtcctcggggcccacgctcagcgcgcccggcccgtggaagcgtaggcggcccgcgcgggacgccaggaaaacagccaggtcctcgtcgcgcgtgaacgtccggcccagagccgagatgctgcggacacgcacggggctagcgccagggccgagccccacgcggaaggaggcactaggcggaaagaagacgtcgtcgtggcggcagggcacgcgctcggcgtccacgaagaagaggccaggtgcctcgtccccagagcgccacaggtgcgggtcatgccaggagaagcggtcagagtcgcggaagacggcaggttcgcctgagccggagcacatccctgagctccacggaacaagcgccgcgccacaccac

SEQ ID NO: 908 - DNA, 548 bp, Homo sapiens
  Genbank Accession No. AI817698
  unsure (1)..(548): n = a or c or g or t
ctctcctaactttttcccacatctcctgttgccctcattgcccctcacaacaccacttgggaaaggagcagcccccaccccctgcccgcccgggcagccccgccgggcacgctccggcccgggcccagctggcctgcagcttccgacctcgcccgggcaggcgccccgcagaccctagctcccacagtcccacagagcccgagccctcgactgtcgtcgagggaaagggcacgtgggccggacagggagccccttctgcttcgctctcagctctgaccctgtttagccaaccgaactgaaaaatcattgcactttgaccgcgcgtcacgcccggcccacccggccccccacccccggggccttactccccacgccccgggagactcccgcaggatccactgcccctcagccctggggtcctctagggctgcacgctgaggacagggggaggaaactaccaacttgctgagcgcgctcctgataatgctggtgagggtcaagttggcgtctggctcanagaagggcgctcggggcggagagggagggag

SEQ ID NO: 909 - DNA, 470 bp, Homo sapiens
  Genbank Accession No. AI817781
aaagtcttcatgtttattaaggagtccatgacaatgctacatgttttacagataatgagtatggttagggttgtcttcacatttgaaaccctttcatttaaccagagacattacaggggagacactctataaaaagtatgtgctttaaatattcctgcttatgttatgttcatctttatgccaatatttttatgctgtccaattcatcagattttctttgttgtttagtgatttccacgccccccacccccaaatactagccttcccaagtttgtggaaacagcgtactattttgttatagaaactaaagaagatcaatcaggggtggtggtccatgcctgtagtcccagcttctcaggggattgaagcaagaggatcacttaggcccaggagttcgaggctatagggcactgtaactgcatctgtgaataagcaatccagcctgggcaacaccgagagaccccatctca

SEQ ID NO: 910 - DNA, 516 bp, Homo sapiens
  Genbank Accession No. AI818579
  unsure (1)..(516): n = a or c or g or t
tttttttgctatcagtggtgctttatacaaaatagcataatctgataacataagacattttagatttatgtttttaaatagccaaataaaacaaaatatcaagtcacagattacatatatttacattaattcaaatgtccaaagcacagtacagtagggtctatttaatagttcacataatttaagatttacatatacacaagcacatgaaccaatattaggtttgctagaacagggatttaagaagttactcagacattttggtattgacacttacatatttatggcaacaaattatgatgactttaaattttcaatgagatcttttgtacaagaatacagaatgggaagaatgtacaaaatgaagacaggcaaacaaatgtactttccttgcactatttctataacaccatataggatgtggcattatccagtacattttatcagtgtagtctattcattctggtctaaaacggtaattntggctgaataacccccaaatctaactttgcttta

SEQ ID NO: 911 - DNA, 514 bp, Homo sapiens
  Genbank Accession No. AI819204
tttttacaatctttcatttttattattaaatttgtcagatgttactttttaaattcctacacagtttctaaatggttactctcaacttccgtacttatctcattataaaacattaacaatttgtgaactggcactagtccatgaaccaaactttgagtacctctgctctagatttcaaaaacagatgtggatatatgtgtaaaaatttggtatataaaaaagatgcttttctagatgggtagaagaaaagattgttcaaatgtcctatggtctcacaatccagtggttataactgtaaaactcatccagcctttgggagacactgaaactccatttaaagataagaacttgaaggatgtttaatgtaaacctaaattgattttcccttcaactccttttgggtacataattacttttacctagaagctggtcttgactttactcataacaattataccatgacctcactgtccttctccaagatgaaacaaaaaacccttcaagtgggcctggc

SEQ ID NO: 912 - DNA, 593 bp, Homo sapiens
  Genbank Accession No. AI819282
  unsure (1)..(593): n = a or c or g or t
ttttaaatttgttactcctttttttttaatttcacaaaagttttcacaaggacaacgttatagaagaaaacccccagcagtggctaggtcatgcagaaccattaattgtcataccttggcccattctattcatccttgttgcactttagagagagaagtaagctatgtgagttttacaatgcttttaaactgtcatatttcctgttgagcactttaactggcacattcttatagttataaatgttctgagggcgtaactttataacctcctttgcaaagaatgcatgaagagctcttcatgatccaatactaggggatacatatatatagttatatatatagttatatatatataattatatagntatatataatatattatttatagtttatataaagagatagttatacataatataaatcaattttttgagagaccaaaaataatttgaaaaaattctccactcattagggttggaaatttacatgtattcaattattccccaccacaatactgggtttgatactacgctgcccctgtgcttggtgtggggggagagaggggagttattataccctaccattntacttta

SEQ ID NO: 913 - DNA, 539 bp, Homo sapiens
  Genbank Accession No. AI819340
  unsure (1)..(539): n = a or c or g or t
ttttttcaattttttttttttttattctgcagattaaagacactcaatctttaaccttgaagggcaggcaaaaggtcggctatgctgtcaacataaaagtcagggaccattttctttttaaacacgcagtcactttcctgattattcttcacatcccctaaagtggaaactccggtgagggtcaggatggtcttcaggccacaggtggcgcctaggaggatgtctgtgtccaggcggtctcccaccatgacggtgcgctcggggttgatgccgtattcctgggacacgcagtcgaaaatgaagcggttgggcttcccgatgatgtcggcctggcgctgggcggccatctccacggttcggaccaaacacccggtacccgcgatgaagcggccgttctcaagcggaagccggttgtccatgttggtgcccacgagcaggcagccgggctgctgcaggtagcgcagggccttggtgagcttcatgtagctgaagtgcgggtcaaagcccaccaccaccgcgcgcacgtngggctccagncg

SEQ ID NO: 914 - DNA, 469 bp, Homo sapiens
  Genbank Accession No. AI819564
ttttctgcaaataattttatttcgcaggtttcttcctttggatacaatgttcaaatattgtgcatttactccttttgattcagttaacaaacaagtattgagcacacctacaagcactagtcaatgttaaggttgtatagattcggtagcaaagttcctgcccccatggagcttacagtctaatggacatcaattctggcaccttcatcagtatacttttttaaagcccagggtcaaactcattttctaagtcctatttcctaggtaacatgtcataaatgtcaaagttttgacagaatgctttactgtaccacttaacaagggttctcagctgtgtggtcactggaccactgggatatgctgagctattgcttaaacactgacttaaataaaacaaatattttaaataagagaatgctactgtaattagaaggcaatcatttcaaagtctagatggaggccaggggcg

SEQ ID NO: 915 - DNA, 612 bp, Homo sapiens
  Genbank Accession No. AI819863
  unsure (1)..(612): n = a or c or g or t
ttttttggggtattttttaatagtacatctccgtgaacatattatatcacttctgggactacatatttttgagagcagaggccatatcttacatacagtagataccaaataaattttaacaccgaacatttacatagaactatgttctagcaattttttaaagcagatgaggaaactgaagactagggaggttcaggttacacagatggtttgtggtagagcccagatctgaaccttgcctgttgggccccaagggacccaaagttcaggctctatcccagaccgctctgttaggttgcatggagaatgcgatgcattgtgcaaagattaactgtgattgtgtctactacaggagaaataaggagcagcttagcttgctaaaaagtgaacacatttaattggtttaaacttgcattcattatgcaaactttgcttgaaatatttcatttgacaattctagtaaattaatacctattcttagtctagatagtgcataacaaattactgacgacaaatcctaagtgcgttaaagtaaaattttaagaccaaaagcacatgaatgcactcagttatgataatgtgagatgatacagtattttctttttgctntca

SEQ ID NO: 916 - DNA, 534 bp, Homo sapiens
  Genbank Accession No. AI819924
ttttttttttaaattcaaaataaaaattcgttttaattttaagaaaaatgtcaagaattacaagccatattaaagcaaactagttagcaggttatgattccattacaattacaatactgttgtgcagaacattactgcgggaacatgcagagtacctttttaaaaataacttcccttgagtgtatttgtttccgttgaagttggatttaatgtttgaaaattacctaaactcatctggaccagtggtatcgtgagtaagatacgtgaattagctgggatctggtggttcaaattaagttgtgactattaagaaactctacttaccttcttgtgagactcaaactgactttaaaacaattccaaacaataccaagagagcctctcaagtggctgttccaagtaacaactatcatttaaataattcataaatcttactttgagtggaaagttgaactacatggtctctgataccccttccaatgctcaatctttacaatcatacctcatacatacaaataattcctacacacattg

SEQ ID NO: 917 - DNA, 538 bp, Homo sapiens
  Genbank Accession No. AI820585
cagctttaaagtattaaacagaaaccaacaaagaagaatatgagacagggacgtacgtggtccgtaaagtttaactttctgatccttaataggaggataagcgccgtgatagagaaatccaaaggtcatttgtattacgatggctagataatgtaatgaattccaatgtctgtgcatcagcgaatacgtcatcaaaattgctacaaaacaataataataggttgttcacagcttaaaatgtttaggtagtgaagaggaaagaatataacctacattatttattgactacttatatttccctcattttacggaagagatctatcaatttacgtactcaataatagaactacaacatggttgcactccttaatctcaggatagagataacaatttttataaatctattacattatgagaacattgttagtactataaaaatcaggatcagttaaatgttctcttaaaataattttcaatattaaatttttaagtaactcagtggatgcatattttccttatttttggaaatttgacttat

SEQ ID NO: 918 - DNA, 600 bp, Homo sapiens
  Genbank Accession No. AI820925
  unsure (1)..(600): n = a or c or g or t
gagggctggaaggtgtacgcgggcaccagcaacctgcaccagttgcctgaggcagcctccattgccgagatcatcatcaacagcaattacaccgatgaggaggacgactatgacatcgccctcatgcggctgtccaagcccctgaccctgtccggtgagggaatctgcactccccgctctcctgccccccagccccagcaccctctgcagccctcgcacttgtcagcatctgtcaactcatatccgggccccaaagcttctgcagggcagaagtcaaagactcttaaagatccttacatggaacacttctgttttataattagggaaactgaagcccaagggttataaataagtttgctccaaatgacacatctcacattacaaattgatgacggagtcagggcttgggtactgatcttaatcaatagattgaattctttcactggtattaactgagcacctaggggccaaacgctatggtaggcatttcacacatatgatttcatttactcttcacaaccaaccctgtggagcaggcactattattaacttcatttgacatatgangaaatggagctttacagagagataattacctga

SEQ ID NO: 919 - DNA, 579 bp, Homo sapiens
  Genbank Accession No. AI821052
  unsure (1)..(579): n = a or c or g or t
cctttctgagcagctgtgtttgaagaaagctagtgggaaaagttccaggattacatgtcaggaaactacaagaggtagaaacatttgttgatttaccagtgtttttaacttcctgctgggctgaaaactgcttgtttcgtggaaaagcaaaacttgacagcaaacatctaaaatgaagagctcccaaacttttgaggaacaaacggaatgcattgtgaacactctactcatggacttcttgagcccaacattgcaggttgccagccggaacctatgctgtgtagatgaagtagattcaggagagccttgttcttttgatgtggctatcattgctggtcgccttcggatgttgggtgaccagttcaacggagaattggaagcttctgccaaaaacgtcattgcagaaaccattaagggacagacaggagctatactccagaacactgtggaatctctcagcaagacctgntgtgctcaggattccagcttagcttatgagagagctnttctggcagtgtcagtgaaacttcttgagtacatggctcacattgctcctgaagtagtgggacaggtggctat

SEQ ID NO: 920 - DNA, 419 bp, Homo sapiens
  Genbank Accession No. AI821102
ctactactactaaattcgcggccgcgtcgacttttttttttttttttgcgataaatgtggcaaggcctttatttcatcctcaaaccttagtagacatgagataattcatatgggagagaaaccatacaaatgtgaaaatgtgcaaagcctttaagcactcctctacacttaccagacataagatagttcatactggagagaaaccctatgagtttgatgaatgtgggaaagcctttaaccagctatcaacttttactaaatatgagaatttatatggaacataaaccctacaaatataaagaatgtgacaaaacttttaggaagttctcaacccttattatacagaattcatactggacagaaatcctacaagtgtgaagaatggggcaaaacctataacaggttttcagtcgacgcgg

SEQ ID NO: 921 - DNA, 542 bp, Homo sapiens
  Genbank Accession No. AI821447
tttaacatatcaatgtgttttattaattgtaacaaatataccacatattaatgtgagatgctaataacaggagaaactgggtgtggggtaaatgagacctctctgtactagcttcacattttttctgtaaaactgaaactgtttgaaaataaaaagtttattttaaaagaagttaatatcgaaaacctttgtcttgcccataatgcactctgcctaatctacccaatcagttcatactcttcacactcatagtttttcctaaattttactataattatgaagtttatgttcaactgctgatcatcagatagaggaattctgctgcaacaaatcccagaatattatccaaccctatcgatgccataagcaactgtccaggctaacggtgctttgctgttgtaaacacaacaaattcaattgaaccccaaatgctattcaagagagatacattttagttcctttccacctcactgtctatctagcaaagttttatgtgtttttggtaaactctgtactgtgctatatttgaattactgtactct

SEQ ID NO: 922 - DNA, 307 bp, Homo sapiens
  Genbank Accession No. AI821803
gcctactactactaaattcgcggccgcgtctacttttttttttttttttttttaacctttagacaacttttaataaaactttgaagttacagtaataaggtagaatccattatttgttacattatagaaataagtctcacacttctgactcctgtaattttattttatatttaatacttttgtaatctggttattttataggcaaggaacagcaatataatactctccacatcacttacctaagagaaagagcactcgtttgtatggcaattaacgccagagaacctttccaaaatcgtcgacgcgg

SEQ ID NO: 923 - DNA, 679 bp, Homo sapiens
  Genbank Accession No. AI821806
  unsure (1)..(679): n = a or c or g or t
gcattttcatagttttatttgataaaattccatcttacattctgtgtattaaaaaaataatatttctggtgtgaggctgaggtctcctctgtgtgtgtacccaagctgaagggtggtgagaacggaccactccagtctgaggggtggaagaggtgaggaagggggccagaaagcccccacctccatcacagtgctgtggtcttttcaagctcagggggcaagtcacgtggcagggggagccctgctggcagcatgctaacctgacactcctggtcctggcacgctggagcatagtgtggggcagggtagcaacagggtccaggggggcagacaccccggcgccaggccctcagggtcagcaacacagtagccagaaccagggcagcagtgagggccccaaacaccaccagggccaccaagctaggctcacctagcccagcctcttgcctccgcaccacctccttcactgagatccgcagcagaccagcccctgcgctgtggggggctggccccgtggcaggtaccactacagctgaggtgggccctagaggggtgtccactgtgtttgngggtctgggacaggtaagacaagctcacaggtcttgccaccatagccactggggcagaggcagtcgaagtcgtggacacgggcccgacagcgggcccctctctggcatgg

SEQ ID NO: 924 - DNA, 420 bp, Homo sapiens
  Genbank Accession No. AI823960
tttttttttttttttttttgagataacaactcacaattattttattaattcacatgctccatattataaggctggagttgtgtggatgtcttttaaagggaagggaggaggaagaggcaaactctttggttttaggcttcttggcaggtgatttcctatttatccaattgatactcagaactgtgtatcttagtttcatgctccccagcttgagaggagccacaggagaaaccaacatgctgtttccagggcacccaggcacaggcgagtcctttcctcatggaggaaggcttggtcccatgtggggagcaccacattaaaggcaggccttgacacagctctgccatttctgaattgtgcgaccctggaacctgctatcggctcaccatccttcactgtacaacggggaaaacacaccct

SEQ ID NO: 925 - DNA, 577 bp, Homo sapiens
  Genbank Accession No. AI824055
ttttttttttcatttaaatcacatttaatgatgaaggactgaatggtttttccaagatcaagaagaactaaaaaatgcccactctcaacattcttactaaagagcatacctgatgtcttaatacactagacaagaaaaagaaataaaaggcatacagattggaaaggaaataatagaattgtctctattttcaggtgacataattgtcaatgtataaaatgtcaaggaatatacaaaaaaatttctagaacgaataggtaagttctgcaaggctataggatacaagatcaacaaacaaaattattcacatttctatgtaacaataatcaatatctgaaaatacaagaaaaacagtatcatttacagttactccaacaaaaatgaaatatttctggtgtaaatctaacaaaagatgtacaggacctctatgctgaaaactataaaatgttgaggaaagtaataaaagctaaagaaatggagaggcatactatattcacgggatgaaaggctgaacatagtaaagatatagattatacccaaattgttctattggtttaattcaagcttgtccaacttg

SEQ ID NO: 926 - DNA, 589 bp, Homo sapiens
  Genbank Accession No. AI824107
gtgaaatatttgttttaattcagcagtaaaaggcagcacatgatcagaaatatgtagggttgtgaaagagcttgccaggaaatgagagctgttgcacagggtatcagcaactgtgtacagcttggcaaggttttcagtcctgtcctccagggaggatcttgacttctcagttcccacttcaggaatacatggtcaactgcagccattctttgatagacacttgaatcaggccatctctatctctatccagagacttgaaggcacgaaacatggcatccaggcggaccaagcagctgatgaaattgttaaaatccatatctccatcttcattagcataccggcggacaatcatttggtaaagttgttcatttagctggaagcctgcggcctgcagagctccccgcagctgagaacttcccagagacccagaatggtccctgtcatactgcttataaacacactgccatttcttgatgttgttccacagatacttaaattcttcaaagcccagcttaccagtcgtgtcactgtccatgacagacacaatgctccggcaggtgtcaagactaaaaccgtcagtcttaagatc

SEQ ID NO: 927 - DNA, 748 bp, Homo sapiens
  Genbank Accession No. AI827230
  unsure (1)..(748): n = a or c or g or t
ttttttttttttaggttaaattacttcgaaactttaattacagatacttttccacgcaacatttctgaaatgaaagctttgattctcccctttttttgcataaaggctgggaaggtggtttggccagaccgtacatctttttgtatatacatatctacacctgtgtctcttctttattaataaaaggggttcttgatcacagtcccaaaccaactctgcattggattccagcatataaaactcagagagtaaaacaatttcaaaggaagacaggctgcaaccacaggaaaatggcaggaaaagttgtagcttgatagttgtttcttctaagtttaactcagaaatataataataattaagagaaaaaaataagaggccctagctttcatccctgctaccaaacacgctcgtccagaactctaggctgtcttaaagtgcaattactgttgtgaagttgctcaggccanggatcanggctggacggagttcaaagcagaaacttcaaacactccttgctgttcatgactcagggggctggnagggaaggagaggagaaaaagaatggacagttctctggcattcaagtgcatcaaaaagaataaatgtctttttcttttggttaaagcacatctgtcaatagtaagggaattctggtttggaaaaaatgaactttcttaaacttttatctgcgatgtcccatgcagaaagggaacaagcaggcagtgcaccagcaccagggacccagttg

SEQ ID NO: 928 - DNA, 435 bp, Homo sapiens
  Genbank Accession No. AI827330
tttttttttttttaagctttttaaaaaaaattttattttttttacaacaggtaaaaaaacatacaacagaaacgcttttataagatacaattagtaatacaaatataaaatcttctaaacaatcactggtattgttctactactaactataacacaggggcattaacaatttgtcccactttttatactcattctgcttattagtttaaaactgactggtcacagactgattttgggaaccagctggcaaaatcacaacttcattttggtaatgaataactatagattttcaagagcttagaaagattttttggaatataatttcctaagtatgaaatatgaaagttaatatgataaatgaatgacaaattagtatactatttaaattttagttaaatattctggaaaaactgtttcacttgcttggtgatacca

SEQ ID NO: 929 - DNA, 520 bp, Homo sapiens
  Genbank Accession No. AI827476
gctagcataaagtcgtttttaatcttaaaaaaataagctgggggtgtctgctgcagttgcccttctaacgtttttcacatttatgtagaaaaaaaatttacagtatttaaaacaattttgaagaagaaaagtaagattggaaggtcttgtcctaccaggtaatgagttacaataaagccatagtaattgagacagtcttgtattattaaacgccctaagatggacaattaaaggaaggagatacagagccccaagaagagacccatatctatgtatttgggaatttgatatactggcattatgtattaatgagaaaatgattaattactcaataagtaatgctgaatgaatggttattctaatggaaaataaaattagatcactaccatatactatttaaaaatctctgccggattttttttaaaaaccctcaaaagtaaacagccatcattatgaatccagggatttaaagaagtttggtgagttgtaatccactgtagctattaccactattagtgct

SEQ ID NO: 930 - DNA, 388 bp, Homo sapiens
  Genbank Accession No. AI828439
  unsure (1)..(388): n = a or c or g or t
tttttttttttttttttttttttttttttttttttttttttttgggggggatagcccccttttttaaaaaaaatcaaaaaaaaaaccccaggagggtccctttttggacacaaaggccaggcgtcccaaccccacaatttgggggcccctggcaggatggcacttgaactggatcttcaggctcctgcaaatggggcagggggggcatatccccctcctttttttttcaancgggaatcctgccttcccccacctaagggactaactttttctgagcaccaacggcatccctccctcccttgtttgttggaggaatccctgggccttcacttccaaatgggtggggatttggcctggggtgggcggggccccgtgggcggggcccttt

SEQ ID NO: 931 - DNA, 539 bp, Homo sapiens
  Genbank Accession No. AI828498
gtcatttgaactttattaattcgacaaacactaaataagtacctattatgtgctcaccatacagaatgggcgagaggactgggaaatactccgttaggtccctcccagtttcagctgctgttctcaaattggtgcaccataccttccagtaaggatctgtagacagcttggggatctcctcttcttaggtccatccaacatccctttgcttccttctgcatccttctgcacagatgctggtatatgggtcttgagatattgatgactcattctcactggctcatactttggggtccatgggagtatgtcaaaccttgacatactagatttgttgcggatgttgcatgtggatatttggtttccctctcttacttgctcttttgtttttttatgagaaagatccaaaaagtacactgctgccactgttgttgccatcttcctaaaaccttgtcagaacagagttggaccaaggttctctaaaacaacagtcatctctaggaaataatgactcatccctctcacttttgggaatctttgtt

SEQ ID NO: 932 - DNA, 384 bp, Homo sapiens
  Genbank Accession No. AI828579
agcggccgccctttttttttttttttttttttttttgctttcatttgaacatttaataaaaatgtttaggttgatatcttaaagttgtcagtgaaatctcagatttacataacagtttgcatccagtagtttttttgagtaacacaaacatcagtatagccaaatgttaactcttatcactttttgtgttaataacaaagtaatatttgtaatatagtgtccctgaataactataaaaacttcttggaattattttgtttttaaaataaaacactatttaataactggtatcatagcccttcaaaagacacattctgaaatgctatcagtcagggggcaaaagttgttttagttcagtttattttttaatatgtcctgagttct

SEQ ID NO: 933 - DNA, 348 bp, Homo sapiens
  Genbank Accession No. AI829641
ttttgtaccacacgatccaatcacattttattgtggggaggtcgttacctgaaggggcggcaggcacgatgggccccaggcttggacggcagcagattgaggcaagactccacgcaggacttccctaggacaagcggtgctggacggtggctgcagaggccgggagaggtgggctggccagtctcgagggaggggcggccgtgagccctggcgccaggctgtgggggctgtgggggctgagcgtccgggggcctggaggagggcagccgtcagtcatggttgcagaggctggtctggcagcaagcgatggatacgtaggggcccaggcccaggctggggatatcgggg

SEQ ID NO: 934 - DNA, 494 bp, Homo sapiens
  Genbank Accession No. AI829652
gcggccgcggcccggactccgcggtgggcgagcgccctgtgaggtaagcggccggtgcgcagaggctgcgggcgaacttgggcggccgggggaggggacccggggcgcttccccaggcgaccgacccaggaggcgccgctcagtcctggccgaggctgagcgtctggtcgggcttcgggtatcaggggtctggcaggaccatgaggcgtaccctcaggccgcccgcggctccgcggtcccccggcatccggaggctcaggcgcgccgacggagagctatgccttggtttaccctcccgtaaaactaccggacgcggagcatgtatctccgcggtgcctccagccctgagatttttcgagtgtgtaagtaaagtcgaagaagaagaagctgactcttgggatgggaagagccttcacctaggaacgcaggggcaaatatggggctgggcacccactgtgtattttatgcaaatctcaaggggcaaatatggggct

SEQ ID NO: 935 - DNA, 541 bp, Homo sapiens
  Genbank Accession No. AI829717
tttttgaaacaaacggagacgtttaattacatgaacgcacacatgggaaaaaccgcctgtgcactcccggagggcagagcctgcctctctggttatttttgtgtcctccattcacttacaggctgtgacaaaccctgtgcccacgctgcctccactgccgggagactcagggctgggggagacatgccctggtcaccactgcggagactcagggctgggggagacatgccctggccaccagtggtgagccagcgagacaggaccccacgcgcgctgacccggggacgccatggaactcactcgcgattcctgcacgcgcgctgacccggggacgccatggaactcactcgcgattcctgctcacagcacgtttcctgctcgaaaaccaggagagcctccacgtgccgactagctctgtccacacatccattgcgcagctctgcagcggaaggaccttcagtaaagacgctggtttgtaacgagagaagcgttccaaagtgtcacacgacattgtttattactaaaaggagcagaatttctt

SEQ ID NO: 936 - DNA, 597 bp, Homo sapiens
  Genbank Accession No. AI831452
  unsure (1)..(597): n = a or c or g or t
ttcacattctcaatatgctttattcaacagaacaaaagaaggcaaagagagcagagaaagcagtgcaggaatgcagactgcatcagaaggtacatcacttgccattcagggacactgcaagagaagatcaggacaactgacttgtcagatgagaactcctgagtgtagctataatgggcaggatggttagcaattaaagagaggactcctcatctgcagctggacctagactgagtttcagttcttatggggatataggtcattttcttctcagaattatggcagactcagatacctgtaataatacgggaactaaaaaggacattcgcatgtctgagtgctgataactgttgacttgatggtaagcaacaggagctcagtggaacaggtattgatgagaagaaaagtgagggcatcccagctctacccgggagggcaggggagactggaggccangggaggacaagcaacctgaggagagggctctgctgccaaagaggggcctgagagctgtgggactgagagctggcggcagcacttcagtgcttgtagctcttcctgctggagggagaaggtggggtgtnctngnatgggtgg

SEQ ID NO: 937 - DNA, 496 bp, Homo sapiens
  Genbank Accession No. AI831961
ttttttacagtctgtaaaggtgtgactttataaagacatctccagcttcctgtctctgcactctgcgggaagcaatgcgagggcatgtccgcggctcaaagaactagagcaagtccctgatgtacaggctgcgccgcacggcgttggagacaccctcgttgaagcggaaccagacctcgctcctgcccaccgctgtgcccatgcgccgctccactgagtcctgctccggggccgtgtcccctgcactcgggactgctgtgctcctgacgaccacacgtccaaagaagtccttctcaggctgttcctcccgggccgctcgcctcatgatgtgctccagccgctgctcatggttgcgtggggcaggtcggtgcacccctttctccccaatgccccccagcagaccctcgagccctggggggctcccatccacctgggggctgttctctacccgggcagaagcctccgcccgccgcatcttctccacctcgatctcgcg

SEQ ID NO: 938 - DNA, 734 bp, Homo sapiens
  Genbank Accession No. AI832076
  unsure (1)..(734): n = a or c or g or t
tttttttggagacggagtctcactctgtcacccaggctctccgtgttactttatactttttacttacgttcacaggggtcctaaaaccaagatgcagccctaagcacctcataggagaagctgtattttttttttttttttttttgagatggaatgcttatacagtattatttcatagtttttttaaatgtcatgtttctaatgtttaaataatcttgaaagaaattctcctcacttcccctttatcctccatctttcatcaaaggaaaaaaaatcaaagcgggacaaggacttcctttttttttcccccaattaacccaagttccttagaaatgttgctgtttgggtgagaattatactgattatcccgacttacagccagcaatgacactttcagcagaaagttttcttggcataaactctttagttctcagactgcttactcataagttcttcttgagaacttggcagcgacgcaatctgttttgtcttgaagagcacaagactcagacggctgtcactttggggagagcacatagcatctcaaacagcaggttagccgccagcagggctgtgttcccagaaagatcatacggtggtgaaacttcgacaagatcacagcccatcacgttcaggccttgacaacccctgatgatctccagagcctgactaggagtgagaccagcaattttaggtgtccctgtccctggngcataggcaggatccagagcgtc

SEQ ID NO: 939 - DNA, 475 bp, Homo sapiens
  Genbank Accession No. AI832201
gcttgtaaaactgttttaaataactcttgctaaagcagatagtaccagagagcagaaactcagcgcccaggtccttaatggttccttctctctaccctccttcccctcccaccccccacgtgtaaacagtccacagtcacaccagcgctttgggaaacagaagcccactctcggtcttcctgggccactgcttctcatcgttggtctttggggatcaaagactcctctgtgtctgagtcaggtcgcccaacacctgctgtgtacctcccaccccccacaagaaacaagtgcccagatccttaaagacacagtttgttggagtagagctaagagaacccctggctcaggaggtgggggttccagcagcaggggaggtggtgggggtgctgtggaaggtggagatggcagtggcgacccccctggaggttctgaaatgtcctgagggggccctggggctgggcctgggggaggtggg

SEQ ID NO: 940 - DNA, 746 bp, Homo sapiens
  Genbank Accession No. AI858054
  unsure (1)..(746): n = a or c or g or t
ttttttttttttcaaagtaaaatactcataaatttaaggggataaataatctggtgtaccaagaagcctactttaggccaccataatattcagaatcttaacatactaatttaaaaattacatgaaaaattgcaagcaaattattgcttacagtagaataaagtcacaattttatatcttctttatagacagatacattttatataatttaaagcaatgaccctacagctgtattcttgtacttctgctgttttaagaggtaaagaggaagaaaatggttctgtttgtccccagcatgagtgtgatgccagcttctagagggaggacggtgtacggactcaaggaacgctctcatggagaagctctggccagacctggcacgtacagcacgatggctgttactgcaaccagggcagccaacatgggcatccagggccagggtttctttctctaccacaatggaccgaaacaccaaaacaggaaagccaggaataggccgatgaatacggctgggacgggttgtaatatggaaggattatttcctttctctcngagcagcttcaggttgtttttacactgtttgagctcatctgtgattgactgcttttcctgctcagtcatttcaaacttcaacttcagttctgagagtacagtctgtgtctntcatactctttctgcacatccctttgcttgttttctgccttactgagaagagtttttaatcagctgaattcccgagaatgctg

SEQ ID NO: 941 - DNA, 654 bp, Homo sapiens
  Genbank Accession No. AI858718
  unsure (1)..(654): n = a or c or g or t
gtaaccatgatgatctttttaacaagcaagtgactggactgtttgcaaaggaaagaaaacattttccaaggatagtaagtattctacgaattcctagccagcttttgtcttcttgaaaattatcaccataaggaaagaattaaattacactggcatttataagggattaggcacaccangtaccctatgcttcaatcctgtcctttcatcttccttccatttctctgtcttgggacatggtaatttggaggtgagaccactctttcttgtccctgacaaagaatcctgtcatctgcagaatctctattcttccagctggctcctagcagggtagggagagacacagaaagagagagtcaccgttccacttcagatgctgcaagttgctgtagaggagctgccccgccgtccctgccgcccgggtgaactcctgcaaactcatgctgcagaggtgctcgccgttgatgtcgaactcttgaaagggatacaattggcatccagctggttggtgtccaggaagtgctggagccactcccacacctggtactttgtccagtactgaagatgaatntcatgcgactggcctgcaagaaacccactggaaacattgcacgtggagtagctgtctgttcaggctgggcgctgtggagggag

SEQ ID NO: 942 - DNA, 707 bp, Homo sapiens
  Genbank Accession No. AI859366
ccaaaatcaaactgctttactatactttattgatataaatacagcaaatctcaataagcaccagctaccattttaccactacacaagagaaacaaagtcaaaagaattatatattaatgcaaagagtaaacacagaatgctttcacttccactatagtcctctataacaaaacatgctacatacttggcacaatgtgcttataattggttaaatatttgatatgaagtataaattaagttcctgcagccacagctgtgggagaagcatacttgtagaagcaaggccagtccagcatcagaaggcagaggcagcatcagtgactcccagccatggaatgaacggaggacacagagctcagagacagaacaggccagggggaagaaggagagacagaataggccagggcatggcggtgagggactgaggcccctaaattttggtcccaggggaaaggaagaggccagttggtccagttttgatggctatggggaaaggaatgtattagtaagcatgggggagaggatgccagcaggcacctcagaggtgacaggacaggctgaaccccccaccctgacagaaaagagcttgagagctctggggctctctgggaatgtcactgctaaatatatatctacatatatattaacccttccgtggaaggcaggggcaaagccctggggtggatcccaagatctgcgtgccatcc

SEQ ID NO: 943 - DNA, 518 bp, Homo sapiens
  Genbank Accession No. AI859398
ttttttttttttttttttttgggtgtatgaaattaaagcctttattaaccttctttgatttgactgttatttctgaaaaggacacattcttgctgatacttgtaacaacctgttcaaagttgtggaaatcaccttctgttggctttctgacatggacttccttgcagcactgttactttcttaaaaggaacagaatggcaaaccagtgtctggccgtagtccccattgattcctgttattttcatctgaggagcctgtgaagctttgcagaggcttctgggtaagtttgtaaacctagcattggccttcactaggctcttgctttgcctcattattaagggttgggagagggagtgaagtagcatatgcatttcatacttgcctttaggtctcaagcctagccccagtggaagtgctgctctcactggtactgtttggaatttgtgaaacctcttaagaggtagtcttggggaccattcaactctccttcagccctttaacttacccactgagtaagg

SEQ ID NO: 944 - DNA, 525 bp, Homo sapiens
  Genbank Accession No. AI859619
tttttttttaggctcagcagcatttattttctagttttaagaaaatttgattattcttgtatgaggtctaaagtgtgtatctatcagtccaatcaagcttttaaattttcggaaatactaaatttctaaatcataaagcgtcatttaaaaataattaattgtttcagtccaaaaatagcgtgggtcaaactggaattttcaaagtgacgtatctgtggatgatatgcttatggtaccaaaaagactctcaaaaaccaatactcccacgggcaagggaatagccaagtttgttgcggtttccaatgaatgacatcagccctgtgtaggtctcaatcaaaatgggttcagttaacaccatcagtttctttcctcttccagatccagttgaattcttgtgggcattctggatagctggaacaagcttagacatgaacccagacaacttgcaaatttcaaggaatttctcactggtgtatttcataggatgctcagtgaaagtagcataaggaacttcagtggaccatg

SEQ ID NO: 945 - DNA, 507 bp, Homo sapiens
  Genbank Accession No. AI859849
ccttttggtgtttttttttttttttttttcgggtaaatgaatatgtttatttaaatatgtatacaagcatggccctaggagcagcagatacactttcccaaaggtggttgcttcctttaagatattgcacaatagaaaataaactcttgtcaatccttaaaattagtcttcaatgctatgtattttagctatgtaacttgtactgtgtcaacagtgaaccttattagattcacgatgtcatcgaacttatagcaagataaaaatcaatcagtaggaatgtcattttaaaaagtaaaatagtgggacggttgtggtggctcatgcctgtaatcccagcactttgggaggctgaggtgggtggatcatttgaggtcaggatttcgaaacccgcctggccaacatggtgaaacctcacctcaactaaaaatacaaaaatcagccaggcatgctggagggcaccttgtagtcccagctatttgggaggctgaggtaggagaatcgcttgat

SEQ ID NO: 946 - DNA, 455 bp, Homo sapiens
  Genbank Accession No. AI859854
ttttttttttttttttttgaactctgaactttttattggcctcctgctccccaaagggtaccctgcttctgctggcttaatgcctcaaaactttggtgtcattggtctcaaacaccactttgccatccactatccggcgggtgggggtcttttggatggtttgcatggaggtgcttgctgtccaaggcatcaccaagactgtaacagaagaccaagcccaagttataaacagccccgtggagtagaagggagacaagaaaggtagagggaaaaagcctcctctgaaaagggaaactcaaggccaaacttcatttgcatactaagtacagctagggacaatacttagtttgctttcttcaagggggagacctctgtaactgttactcccttgaagacacaggagcacccacggagcaacggcccagtgctcagtggataccagtgaacagacacat

SEQ ID NO: 947 - DNA, 528 bp, Homo sapiens
  Genbank Accession No. AI860139
  unsure (1)..(528): n = a or c or g or t
aacaaatttactttgacacctgaggtgaaaaaaattgttttttcgtggactttgcatcaagttctctctcttctttcttattacaaaaggaaaggccagggactcacgagggggtgggagcggctgctcatggctgtggcgggctcagggcgagctggccgggctgatggtggggctgctggcgtcggagcggctgtagtcgctgagggagccggtccgtgagcccccgccgagccgttgcagcattcccgggtggaagttggcgtggcggcgcgcgtgcttggtcaggtggtcgctgcgcatgaagcgcttctcgcagatggggcagctgaacttcttctcgcccgtgtgtgtgcggtagtgccgcgccagctcgtcggagcgcgcgaacttcttgttgcagtcctgccagctgcaggcgaagggcctctcacctgtgtgagttctcaggtgcgccttgaggtgcgaagatttccctgaaactctctcgcagcccgcgtagtggcacttgtgctttctctgcggnga

SEQ ID NO: 948 - DNA, 637 bp, Homo sapiens
  Genbank Accession No. AI860751
  unsure (1)..(637): n = a or c or g or t
gagacagagtcttgctctgttgcctaggctggagtgtagtggtgtgatctcggctcattgcaacctctgcctccagggttcaagtgattctcctgcctcagcctccagagtagctgggattacaggtgtgcaccaccacgccaggctaatttttgtatttttagtagagacagggtttcaccatgttggccaggctggtctccaactcctggcctcaagtcatcctcccgccttagcctcccaaagtgctggaattacaggcatgagccaccacgcccggccatcttcttgccagcaactcttagaccaggaagcctcggatggcagctatgaagtcctgtgggcggtcagcgtggatccagtggccagcgttcggcaccgtctgcatctgggcccgagggaagagccgcataatctcanggtggtggctgggatgcacgaactgggagtttccaccaaggagaaagagtgttggcccgaggtaggactcctgcctctgtgggaaagccaagatcttgtctaggtgctgggtcanggcatccaagttcacccttcacacgaagcgcccgtctacctctaccaggttagtgagcaagtgctgccgcacggccatgtcctggatgacagaactgagctg

SEQ ID NO: 949 - DNA, 379 bp, Homo sapiens
  Genbank Accession No. AI860791
tgtaaaagcctccattgtttggaatctctttgagcttatctcccaaggagttatcactttacttatcacattcaactttccattcatattctgacagtgagcagaggcccaggatcaaagcttgatttggcagattgctcagtttgaaggcactgtgtttagtttgttttgtttgtaactggaattttgaatgcatttactgaggcaaagtctgcagggccaaagtcttgctgttccctcctctccttggggctggctgctgcttcttacacaggctgccttcctagcctctggagtcattggagcttgtagtgaaacatcctaatacaattgggcctctagatggtgaccttccatcatgcagcactggaagttcctg

SEQ ID NO: 950 - DNA, 301 bp, Homo sapiens
  Genbank Accession No. AI864014
  unsure (1)..(301): n = a or c or g or t
gcggctctgctcctctactcagccgatgactcgggtttcgagcgcctggtgggcgccctggcgtcggccctgtgccagctgccgctgcgcgtggccgtagacctgtggagccgtcgtgaactgagcgcgcaggggcccgtggcttggtttcacgcgcagcggcgccagaccctgcaggagggcggcgtggtggtcttgctcttctctccggtgcggtggcgctgtgcagcgagtggctcagatgggnggtgtccgggcccggggcgcacggcccgcacgacgccttccgcgcctcgctcag

SEQ ID NO: 951 - DNA, 511 bp, Homo sapiens
  Genbank Accession No. AI864016
  unsure (1)..(511): n = a or c or g or t
acattcaagataaaagatttattcacaccacaaatgttatattctctttttaagtgggtaaaagtattttgtttgcttctacataaatttctattcatgagagaataacaaatattaaaatacagtgatagtttgcatttcttctatagacataaccctgaagcttttagtttacagggagtttccatgaagccacaaactaaactaattatcaaacacattagttatttccagactcaaatagatacacattcaaccaataaactgagaaagaagncatttcatgttctctttcattttgctataaagcattttttcttttgactaaatgcaaagtgagaaattgtattttttctccttttaattgacctcagaagatgcactatctaattcatgagaataccaaatttcnnggtgtntatcttcttcttactttttggggtctacaaccacatatcttctgggctgtgaaatcatgggctgttggaattacgctgactttgggaaagtt

SEQ ID NO: 952 - DNA, 343 bp, Homo sapiens
  Genbank Accession No. AI864428
tttatttgtaattaacaaatttatttacatttcctgaaccaaaattaattgtaaaatttaacaggaagggggtaacatgacctctaaggtgggctgtacacatagttgctctatttccaaactaataacttgagtcctcacccatagctgggcccccccttcttcctttgaaaggagacacagaatagcatcaggcttccggaagcttcaacatttaaagagacaactctttaaatgcatggacgcagagaagggtgagaagaatcacggtacaaattgtaatgaaagaaaaagtggccagagaatcgatagcaaacccatttctgtctccagattaatggct

SEQ ID NO: 953 - DNA, 523 bp, Homo sapiens
  Genbank Accession No. AI864898
gcggccgcgcctgcccgctcgcacccctctcccgcgcccggttctccctcgcagcacctcgaagtgcgcccctcgccctcctgctcgcgccccgccgccatggctgcctcccccgcgcggcctgctgtcctggccctgaccgggctggcgctgctcctgctcctgtgctggggcccaggtggcataagtggaaataaactcaagctgatgcttcaaaaacgagaagcacctgttccaactaagactaaagtggccgttgatgagaataaagccaaagaattccttggcagcctgaagcgccagaagcggcagctgtgggaccggactcggcccgaggtgaacaggtggtaccaagcagtttctctacatgggctttgacgaagcgaaatttgaagatgacatcacctattggcttacaggagatcgaaatggacatgaatactattggcgaatactcccaacgtcactaagaatgaaagactctgcaatttggtccccggaaaccctaccggtttaggcatgg

SEQ ID NO: 954 - DNA, 283 bp, Homo sapiens
  Genbank Accession No. AI865729
tttgtgtgtgatttttatttttatttttttagctcatcagctatcattagtgctagtgtactttatgtgtggcccaagacaattcttcttccagtgtggccgagaagccaaaagattggacacccttgtataaagaaacactgactcctggtcatttcttttggagaaacacattggctgtgtgactttgttcaggtcacttgatctttctgaggctcagcatcctcacctttaaaagaggggaaatgcaaccccgtcctgcctattccacgggcagtgtgtg

SEQ ID NO: 955 - DNA, 479 bp, Homo sapiens
  Genbank Accession No. AI866583
aatgctttattaaagtttaattttgaactcccaattagcgaaagtgcattacaaatcgattgcaatttcctagaaggtgcagcaagttctctgcctgcctgccacgtgcgagacgctccacagcgagcttccccagctccgggcagcagaaaggggatggttcagagccgatctccgcatcccaggaagtccctaaaatccgcgccagcccctcctcccgcagggcgggggcgtccacggcgcgaacccgccagaggtgtagggggaagtgtggggggctggtccgcagccttcgaggggtggggcgacaggagcgagcggccgggggaggagaaaaaggcgggcggcgggagagggggcctctattatctcggcttctcgggaggagcctcatctagtcagtcacgcagaagtttctctttcgctcttcgcgctacacacccagattggcttccagcgcgcaggcgagtggggcgaag

SEQ ID NO: 956 - DNA, 289 bp, Homo sapiens
  Genbank Accession No. AI868289
  unsure (1)..(289): n = a or c or g or t
tttttgaggcaaggaaagtgacttttattcagagagccagcaaaccaagaaaatggaagagtagtgtcctgaagaaccatttttaagtcaatacaaatttcaggctccttttacgtgagaggaagggggaagaggggggagnntgaggtcaagaagtggccagtgatcacatctgggtggtggcaagggtccaaggaggtggtgaaactttgtccttggtcaggtcacagtgctcttataaatctttaacataacattattacttgtatacatcctccttatctcctca

SEQ ID NO: 957 - DNA, 352 bp, Homo sapiens
  Genbank Accession No. AI869008
  unsure (1)..(352): n = a or c or g or t
ttttttagtccacaaagaaacaattttattagcccaagaagtgaagacccagtccctctgcttgccccagccccaccccaaagcccctcaaaaggataggtgtgggtaagggagaagcttgggattcacattgtgtactacagcggcaccatatccagccttctgggcatttaggaccttgaggtcaaagttgcagtcgaatcttcgaagcagcgcaataaagactgacccattgaccggggctgggggtggtggggcaatggggctgcaggcattgtntggggtgagcctccacaaggaacccctggaggccctcctggtcaaaggttagccccaacagagctggaaggtc

SEQ ID NO: 958 - DNA, 279 bp, Homo sapiens
  Genbank Accession No. AI869919
ttttttttttttaagctggaaaataaatctgtttattttattaatgagctcagagtaaggtttggagtgacaatcctggcagcaattagagcagagggcagaggagagggatggagagagagagactccagtggggtcttattagggttcaaggaaggagtcccccagagctgggagagaccaaattcactgggccagaggaaaggaatgagagtcttggatccttgaagatcttctcccaaacggctggctgctccctttcctccacattggccttca

SEQ ID NO: 959 - DNA, 536 bp, Homo sapiens
  Genbank Accession No. AI870013
  unsure (1)..(536): n = a or c or g or t
taatacccaaaccatccattttcaaagctttttttttaaaaaaattgttttttgattaaaaaaaaaaaaacaaaaaactaaaactgccacaaatactgaagaggcaagctccaggcctggcctttccagctggaggcctgctctcccgtggaccgcaccgcagagcccagcccggcactgctgggtgaccgtcccatggctggttcgccccggaccactctgctgaagtccaggtgggtgttaaatgcccggcggcatcgctaaataaggacaaggggaaaaggcagcccacctttccctgaacaccttccatctgggctgaactttcttgggaatgtataagttatctggatgaaggaggtgggagatggagaaaaataaataccaagaactaaagtgagggtcccaggacctctggtggcagctcancccctggggcagagctggcctccagggaggagaccctgattatccaaatactgcgctcttgagacttgctctcctccacaagcacttgccctgggggacgtgagtct

SEQ ID NO: 960 - DNA, 398 bp, Homo sapiens
  Genbank Accession No. AI870708
tttttatagcataaatgtgtttattttaaaaatgacaaaatcaaaatcgggttcattaaagagacaaatagacaacctaaggcaatatgaaatagcagaactgaaatggaggccttaatacagatactgacaagatttttcaaattataaaaaaatactatgaatatatcagtgtaaaagtttgagaaatatgtattttccattataaggttagtatagctctgataccaaaaattcaaaacaaattgcaaaagaaaacaaatctcattgttggacacagattaaaagaatctgaaataagatgttggcaaatgaaaaattcagcagggtttatagaatgatgcataatgaccaaatagagtttatccaaaaaaatcaagggttgttcaatgattgaa

SEQ ID NO: 961 - DNA, 401 bp, Homo sapiens
  Genbank Accession No. AI872472
ttttttttttttttttttttttttttttttttttttttttttttttttttttttttaagggttccaggaacatatattacacaggtctgagggcaaaaaatggcaaacaactggtttgtttgctttaaaagctcatttggaaccaatgccaaaacccgatgcttttgatggccccctggtttttggcccctcctgagggtgggctcaaacttttgggggagggggcaacctcggaatggaacctcctgccttttgtcacctgaggcataaagcacttgggggatgctcagggctggatcctttttcactggttgggcacactcaaactcccataaccagccctggctgggatccttataaaaaggatgggccaatctgggggcactagggggctggtgttt

SEQ ID NO: 962 - DNA, 575 bp, Homo sapiens
  Genbank Accession No. AI885390
  unsure (1)..(575): n = a or c or g or t
ttaattacatattttattttctgttttacactgatatttcctgtttacacacaagcttctaaccctaaatccagcttcccccaacccaggtgccccataggagttcctggtcactgctcctgcagacaaccgctcccttcctgttggggatggctctcccgctgcgtggtcccctaaacagcccctcccccacctgccttccgctggaaattctcaagtgggaaatacaacgggttttcctttcaatgcaaaactgcttgattctgttttgcatgttataaaagcttagtctcagagttcatgttaagagtgtagaatacacacagtccatgattcagttttctttttggtttttttttttttttgagataggatctcactctgtcacccacccaggctggagtgcagaggtacgatctcggctcactgcacccaccacctcccgagtccaagtgatcctcccgtctcagcctcccaagtagctgggattacaggcgcctgccacaacgcccagctaattnttttattattagtagagacagggtttcaccatgtgggtcaggctggcctagaac

SEQ ID NO: 963 - DNA, 464 bp, Homo sapiens
  Genbank Accession No. AI885491
attttttttttggcttaaaccagtaaaaatttattttctgacagttctggatgctggaactctgatatcaaggtgtgaaggctctagggaagggtccttctttgcctcttcctagcttaggtggttgcaggcaatattggtccttccttgacttgtagaccatcattcccatcttgcctcccttgccacgcggcactcttcccgtgtttccgcctctatgtccaaatcttatcttttttattttattttattttactttaagttctgggatacactgcagaacgtggtttgttacataggtaaacgtgtgccatggtggtttgctgcacctgtcaacccgtcacctaggtattaagccctgcattagccatttgtcctcatctgcatcccctactcttgagtatacccaaggttaaggcatttagaaaaaaaaaaactttcatgtgaaaaagtctgaagtttca

SEQ ID NO: 964 - DNA, 580 bp, Homo sapiens
  Genbank Accession No. AI885852
tttactgatgaacgctggactgagagtggccagcattaacaactcttttatttgaaaacgtgggtggctctgaaaagagccttttgagttcacaggtgccccttcgagacgcgggccgggctgggcccacttgggccggacgtcagcctcacttgccctttgccttgtggtgactctccgtcttcttagggagcagtacggcctggatgttaggcaagacgccgccctgggcgatggtgactttgcccagcagcttgttcagttcctcgtcgttgcggatggccagctggaggtgacgagggatgatgcgcgtcttcttgttgtcccgagccgcgttgcccgccagctccaggatctcggcggtcagatactcgaggaccgcagccatgtagacgggcgcgccggcccccactcgctccgcgtagttgcctttgcgcagcaagcgatgcactcgccctaccgggaactgaatgccagcgcgggacgagcgcgacttggccttggcgcgggccttgccttcttgcttgccacgaccagacatgacagcgatagtagtcaccgagagaaactcctgcctggc

SEQ ID NO: 965 - DNA, 749 bp, Homo sapiens
  Genbank Accession No. AI887986
  unsure (1)..(749): n = a or c or g or t
agcggccgcccttttgttggttttttgcattgttctcaaccatttaatttattgaaaggagatgctgcaacagttcttgatttagcagcagttattctcttgtttacatagttatgtttttttgttgttgttttgctctgtactggaaacaaaaataaagttttctacattattttcagccttgggttatggtatagtttctttgtgtttgtcgtaatatgcacattgtccttctaggacctgtcaccccaccatggagaaaagtcttttggttctttttaacataagtgattagtttaagagtatgctgaggagccactgggcttaaagaaggatgtaaataagacccaaatacatagggaccaggcgctgctttctcatgttcacaaaagcagtcctccaccactgaactccattctctcagggggctcaatgaaggctaaccaatccgatgcatgtgtaggtaacagtcccatggactggcacttgtaaacagccaatgccaaacccatcaggttcccaatgagatagaccaaaccctgaagaaacttctggcttgaactttctaacatcttgaaagtggctgaaatggccataagtgccctgatgggtcgccaggccatcatacacaccatcataggtaggaagatggagatagtattgcctgccatgtacatgatgaagagattcatggggatctgtttgaggggacccaaagcgatgtnccagcagcgctttttcaacaggat

SEQ ID NO: 966 - DNA, 395 bp, Homo sapiens
  Genbank Accession No. AI888428
agcggccgcccttttttttttttttttttagttcatttgcattatttatttcaaaaaggtcttaaaatgattgtatataaaattgtaaaaaggatttctggtaggtagatatgtaatatacatgaaaaatttttatcattttttaaggaactgagatcatgtttaagatgcatcttaacacgaacaacttgaagaaatctctgtaatcatcagagtaatacatttaaactatgctgacattttcatagcaatcgtttctgcatatttacatgggatcatacttttggcatattttcaaatggagaacggacatttaagtttttcaatgtgatagggaaaacatttaaaataagtaataatagagaattatggagaaggataaagcaccagagtat

SEQ ID NO: 967 - DNA, 678 bp, Homo sapiens
  Genbank Accession No. AI888563
tcgttgaaaaccaataatttatcaaaacgctgcgtgtgtatgtgggggggagggtgtcgcaacagacagggcagcggtgggcggacgcacaggcaggagacggtgcccggagagtgggggcggcagcttgccactggctggccatgcgggcgggcaggctagacattcttgccgcgcaggcgcagttcgtggcgtcgcaggtggttgtagagcgactgcacataggtgaagacacacttggggtcaggcttcttgcccatgatcatcatgtcgtccacctccaccaggggcacacagtccaccagcatccgtggggccccgagcaggggttaggactttttggtttttaccagccccttctggaccagacagcggtagaattcctggatgtacgtgtacacgcacttccagtcaggctctcgaagccgcaccatgtcctctgtatccaggagctgcgggcagtccgcatgggtctccgcagatgagaaggccacctcgaagttctggcgtcggttctgagggctaagctgcccatagtcgaaggcctcaggggaagaagtgtgcaccagggcacagaaggccatcccatcactccagctggaggagagttcctgatggtgacgtgctcgtagccgcgagtcttggctcgacaccagtccagcagcatctgctttgtgc

SEQ ID NO: 968 - DNA, 528 bp, Homo sapiens
  Genbank Accession No. AI888991
ttttttttttttaatataatctctttatcatgttccccctaataactgttcattactgcttcagttcattttgtttacacttggcacatacatctctacagtacacagacacagacttatattttctatacattttttagcattgagttgcctttggatcaatatagaattagtagggatcagtgcaggaaataatattacctttttctgaaagtagagtcttacttatgtatatagcacctttgatttaaggatctcaagggactttaacattcactgtagcatacttctaatatctctgggtagggaaactattataaattatcattattgcctttttatagaaggaaaaaataaaagcaaagaaaagcgaagtgctcagtgagatgacagtcacagcagaaactcgggttttcagctcagcattctactttgtgaactgtaactctgtaatatattccatatcaaaaggtataatggtttcctccatttgtataacatctctctgtggatgatgttaaataaaag

SEQ ID NO: 969 - DNA, 486 bp, Homo sapiens
  Genbank Accession No. AI889361
  unsure (1)..(486): n = a or c or g or t
tccatcagaatatgttttacgttttatttttatttatttactttttttagagatggagtctcactctgttgccaggctggagtgcagcggtgtgatcttggctcactgcaacttccgccccctgggttcaagtgattctcctgcctcagccttccaagtagctgggattacaggcatgcaccaccacacctggctaattnttgtatctttagtagagacggggtttcaccatgttggccaggatggtcttgatctcttgacctggtgatctgcctgcctcagcctcccaaagtgctgggatacaggtgtgagccaccgtgcctggcctatgtattttttttttttaaacacacacataaatctaaagcaaagggtatgccaagattcagctggggccaggtctgacccccactctgagcatctcattagcttcccatcagtggaatacaatggagacatattccacttggtctggcaatgtcctcc

SEQ ID NO: 970 - DNA, 479 bp, Homo sapiens
  Genbank Accession No. AI889959
ttttttttttttttttaagcacatagctacatatttattaaacaggaaaacatatatagagaaatttaccctcaataatcaaaaaatatacattcttttcaagtacaactggaagcattcactaaattaactatgtactaggccacaaagatgcaacaatatactccaaaaagttaatatcatgcaaatcatgttctctgacaataatccaatatagaaagaaagcaatgatacaattttaaaagaatataccagcaaactaaatatctaagaaaaccttcagttaaaaggaaatcatgaaagaagttaaaaaacacaaaattaaataacaatgaaaacagtaccagtcaaaacttatgagaaaagtctaataaagcatttagggaaaaaattatatctttaaatatcttattacagaataaacatcgaaagcaaatcaagcatttaagatgttgcttattttatagcaaacacaaatt

SEQ ID NO: 971 - DNA, 620 bp, Homo sapiens
  Genbank Accession No. AI890347
  unsure (1)..(620): n = a or c or g or t
agcggccgccctttttttttttttttttgcaaaaataatcaggcacactttttattttacatcttaatcaacattacaaatacaaaaggaaaaaagtcagaaacaactcatcacagaggaaaaaaacatcattcagaagagattaatctgaacttcaacattctttgtgctcattttaaaattattaaaacaggaattcaaaaggacaagcaaataaaaaccaagtattttattaattaaaattgagaccctaaaccaactaagactatacaacttaaaaataagctgtcttcatcctagaaaagtttgatttgccatcttataatgaatatgcaggaacttactaatgggtaagtaaacaaattttcttttacaaacaagttattttgagttatagggatcctcctggtgactagatttttttttaatgactaaaaatgcctatttagatagtcaacctatccgtaaagttggacactaaatgacatagtgaacatttaaagttgaaactctntgtctaccaaatattttcctaaaactgtttttaagcatatacattaacttaaaaggtcaactcttaattgtctatagccaaagagagctttggtaccaataaattc

SEQ ID NO: 972 - DNA, 235 bp, Homo sapiens
  Genbank Accession No. AI910824
ttttttttttttttttttttttttttcatcttttcccatattatcagtttttattaagcatttcccacaaacataacccgagcacaaggcccaaaccttgaaaagaaaacagacctgggatgcacagacctgtttgtaaataactgttaggtaatttttaaaaggttaaataaaataactggttttccaaaccctccaatcacatatgttttcataatttctaaagatgggaagg

SEQ ID NO: 973 - DNA, 454 bp, Homo sapiens
  Genbank Accession No. AI912393
ttttttttttttaggagaataataaatgttattatttattaatatggtaatgaatcatctcgcttttaaaattaaacattaaaccgctaacaaattaaatgtaaattattaggccccgagttgatggaaagagttccccggggaggggccgctgggctccttctttgcagaaatgagtgcgtcgccctttaactaggcgcggaggctgcgagcggtgcggggtgacctgaggacacccgaagacacgggcgactcgcggggacatcctgccccctgccggccgcgagcgggaccgcagcggcccgcgggtagcgtcccgccgcggaggtggtttttccttgtgatctttccagaagcagtgaagccctcttgggcacccgcgcccctcgcctggcagacagccacccgctcgcgcacgaactcgctgcacagagctgtcaggagtggggcgtgt

SEQ ID NO: 974 - DNA, 447 bp, Homo sapiens
  Genbank Accession No. AI914225
  unsure (1)..(447): n = a or c or g or t
aaggaatgtggagatttatttacatcaaattcagataaagaggtaacagcggactagaagaagcaagcagagcatgacttaaggagtctatctatgactgtatctgtggaactgcccttagccacaatgaaagaccagcaaaaccagccttcagcataaccctcctgcctggtaggagatgggaaggccagacttcacccctcaagatcgccctcccacgcgcattttccacctcgcagctaagaattcagtccagacttccgatcatggcgccacgcacgtcaccttctcccctcgccgccagcaaaatcccacccacgtcggctgaccccgcagcggngtgtaagggcgggagggatcccgtctcctatactggtcgcttgtacaaaccagatccaaaaaacgcactacacaaatccttggaactgcggtaccacggggatctct

SEQ ID NO: 975 - DNA, 543 bp, Homo sapiens
  Genbank Accession No. AI914323
  unsure (1)..(543): n = a or c or g or t
taggtgtctgccatgtgctgagacccttatattgacgggaatcctcactgcaacctgtaaggtatcagaactcgcattctaccactgaggaaactgaggttgagagaagtgaggtgacttactcaaactcactcaacaggaagtggcagagctggtgagtcttatttgcattctctgtcctggaacgtgggtctgcacaaagatcccagcccataggcagagccttctggagccttggctgcccccatatcccagccccttgaaaggcccatgagctngcacagttagtaggatctggctgcgggggggtgtntagtagggcatgctcgggcctggttagtgggtntagnttggttggcagaaggccaggcccctcgtcacacgcccaagcgtcccgctgagcctggttagttagggtaatcacaccatcaaacactgncccggccctccagctgcagcttcagaggcctcccgccccacacacnnggagtgggggctgacaggggagggggggctaactctaagccccactntcctcgtgcc

SEQ ID NO: 976 - DNA, 716 bp, Homo sapiens
  Genbank Accession No. AI915649
  unsure (1)..(716): n = a or c or g or t
tatctgtaatagtttattttaaagactttacatttacaagtagaaacaacatgtgttatctgtgggtaaggtagagcaggaactctaatccaagggtgggggagatcagttggttccttcacagaaaataagcctgttgtgtgggcatcttgcttgcctgtagatctttgttcccagttcaggaggtttttattcagtgcttgcttcatttactggaaaaagttcactgggcccacctgtcaactccttcccccacagcttccagctcagcacaaactgtaggaacagatttctncccagttcttactgtaaataatgctttaagaccagattcctttggacagntattgtcatagacccaattttaatctccncaagtcagatatctatannnagagtttagaaatgnnttggggnnnttgatcaaacttttcncttttcagtacacaattttatttacgccagaagacantcgaganactttttctcatagataatattgaaanntngagtgatagtaactaantnttnnaantggggtgtnggggggagtggctgaaacatgnaatgnnnnngngcagtnttttcagaattaaaatctctcttagtgggacactagnnnnaagatatgtataagcatagnagatggtggngcaaggnnttnttggngtttattacaaaacacaaaggagaagccccnggggaggggggngcct

SEQ ID NO: 977 - DNA, 507 bp, Homo sapiens
  Genbank Accession No. AI916225
gaattttaaattatttttattctctgaagattaaaaaatacttacaatatggttacattttcaaaacatatatctgtgattgttttatccacattcaccacatcagtatcaaacacattagctcccattttgaataaacaaaaaatggcatagcgtcgtgatcgttctttattgctgaagtgatcagagtctttccacattagtggtattcgaatatctgatatggcaatctttcctttacatgctgttcgttctttactttcaaatttcacatcacatcttccagtctgatttgcaatctgttcttctaatttctgtagctccgatgtataggccattagtcgagcattgcacaccatgagattcttaactgcatgtaaaacttgatctttctgagtgctcagagaaaggagtttccatattccttctcgcattcgaatttctaagtctattttttcttgaatgttgcagtcctgctgggtgggaagccccgccaggcggagcgca

SEQ ID NO: 978 - DNA, 842 bp, Homo sapiens
  Genbank Accession No. AI916261
  unsure (1)..(842): n = a or c or g or t
gggggttatggtattaattcattaaaggatcggcaaccaccattgtatccatttctggatcctttccaaaatatccaaatcctacacttacagaaacacaacagacctaaggaaatgaagcagcttcaggctgcgaggatgaagacaccattgctgaagcaaaggtctcctcctagagggatagccaggatccatcacagtaaacccttttacccccattttataaacatccaattattaactgttcctgctgggttggagtgtaagatgagaccaaatggagagatgtctagtagaagccccactggnggtaacctgcttaacattaaaaaaaagacaggctcagttctattccctggacccacatctgtaggaattatattatacagcaccagtcttaaatggtgttctgcttcagattcatgcatacctgaatgggttgaatgacaatactgtacaagtcaataaactgtatcacaatacaacttacacagttntgtaaggttgaataaatactttctgtgccagttaaaaccatcagcaganactgaagaaacanactgacattngctactacattaatcaatgannagtgcaccatctgaacttgatntgcccatgacgttgaaacacacagaataacactgcacatcactgaaacttctcttccatcactactctactacttgatataagtctgatactagtgttatgtcaagatgtcatatcgagctattaatagagcaaatcacatttaggcataaagagctattagcactataagtctatctagactgaagtgcttgacactatagaatttatataagaatctttatctacga

SEQ ID NO: 979 - DNA, 532 bp, Homo sapiens
  Genbank Accession No. AI916306
ttaccaatttaataaatgtactgtattaacatgaagactaatgacaaatgcactgcagtagtaagcacgtcatagatgcatagaatattctctatatagtctgaatatggatataaaataagttatactcattttgttttccatcacagtaggagcatagcatacaaagtgattggttcagtggccatgaagcaagccaggggagagaccacagaagagaatgtagggcattgagtacagtggggatttgccaaggacactgcagagtccctggggaccctctggggaacaaggccccaaacctctcaagttagccttctgagaatagtatgaggtcccacttgacaagagacagtggctgcatctgagctgggatgattcaggcaactgggtgggaggcagagcagggacaggcacgaacagcatccagcaggctagcccactctcctgctggtgctgttggatgtctatgatgctgggaatatggggcgcagagccagaaggcacggtttgcttctgtgacgtgacagat

SEQ ID NO: 980 - DNA, 475 bp, Homo sapiens
  Genbank Accession No. AI916544
ttagatttcttttttttttattttacaatttataaaacatcagccgcctgcccccgctcgcccccagctcagccccgagtggcccggcgcccgctcgttccctcctctcgcccctttgccgagtctttgtctggccccagccccgcggggccccgggtccctgtgccctcgggggtccctagaaggcgacaatggctcgagtccaggcgccgaggctggcgagcgcctgcttggcgcacagctgcccgttgagcggcggcggctgctccgaggagtccggctgtcggctcaccagccccgagaagccggagccaaagatggagatcaagtttgagatgttggacgcgtccggggacgagtccgggcagaagtcctcgaagcgggcgcgcttgcagggggcgaacggggcgcccccggggggctcggcccccagcccgcccgcatcctcctcgtcgtcttcctcctcctcctggcc

SEQ ID NO: 981 - DNA, 480 bp, Homo sapiens
  Genbank Accession No. AI916889
  unsure (1)..(480): n = a or c or g or t
tttttcttgagtccttcctttcttctcttttctttcttcccttttcttacgtataatgtgtcatattttaatgctcttaatgttttttaatccttggtttttagaagttttcttatgaggtggctgaggagttgttattaaatgtatcctgtttgaaattactgagattcttcaatttgtgaagatacgtttttctttaaatttgaaaactatttcagccactctttctccaaatattcttttctgcaccagtatttttctttttaccttctgagatggaatgccaataccaagaagtttcagccttttgacattgtcccacagtaccatgaaaggcttttcatttttctccaattttttttgtttcataatgtatatttaattgtgtatactttctaccganataattcagnnnancccccctcccctctccctctttattntgttattgggnccatataatnttttcaggtctaaaat

SEQ ID NO: 982 - DNA, 530 bp, Homo sapiens
  Genbank Accession No. AI917602
ttttttttttttttttaaaaggcaaagaaggtttttatttaagggacaacatttgagagctaaaaaccagctcacatcaaaatcaagacccagttgtaaaaatcttttaactccataatgctgtttttgtcttgttagaaatctgatatcttacattagcgtttctaacggattttgtacaaggcagccataaggaatataataaacctttttcaccacagaaccatctgtcacagataatactgaaagttacacacttaggaacagtcagaccacagacaaggtcagactggctgccaccaccaagtaaacaactagaaaaggacagcggggtccaagggtgggggtccctgtgcacgagtcgccctcctctggcctgccccccctcgggtcacctgcttctcctttgccccaaagagggtggagtcaaatgcagattttcctcccaactgcctgttagtgtctcaacaaggagagcagagcccaggtcaggcctcactgcttggacttaaccctaactatgattttta

SEQ ID NO: 983 - DNA, 174 bp, Homo sapiens
  Genbank Accession No. AI919146
tctttttggggaatttacatttaattctacaaataataacaggcactagggctctgtggaagacacagaggatcccagcatccaagcacggagcagcccctcccggacttccgcatctcagaggtcatcactgtccagaattttgtgttcaccgttccctttctctctgtacat

SEQ ID NO: 984 - DNA, 320 bp, Homo sapiens
  Genbank Accession No. AI919493
ttgaatgaaaagtttgatatattcatgtgaaatgtataaacaccacatacgaagaaaaacatatctaaagactagccaggtagagtaggaaaaaggaaagaagcacgtgtacatcttctaagatctggtgggttagttccaaagaaaaggtgtatgggccggctttatgtggaaaggaaaggtgaggatgacttcaggtcatcctggcaggatgccatgtgttcggtttcggtctaactaaagtcagctttagttagaaactgctgagactgctgaggcagacactgcgcatctccagcaaactgagccactaagctgcg

SEQ ID NO: 985 - DNA, 613 bp, Homo sapiens
  Genbank Accession No. AI921300
  unsure (1)..(613): n = a or c or g or t
tttttttttttttgcatccaggtggggttttattctaatgctgcttccctagcaccgagcacagccctgcagtgagctctgtcatgagaagaaagtgactggccctgccccatgcgcttacagtctaagtcaatcaacagatcaacagcaaaccaggcagggaacatggggagcaggaggtgaaaagtagagagagcaggatttgcttttcttcatttctccttagagatgtggggctgtcttcctgagtttcttcatcaggtgctgcctcagctgattcaacctaggaggagcctgggtagttctggcagcccccagctgtggagccccgggtccagtggccgttgaacaggaccaggttccatttgtgcacctcctcgctactcagagagtccggggacaggttgcagatctccaaccgagagaactgcctcacgaaatctgaaagtgacatccagaattctccatcctcaactttcttgtccagttcttccttccngccggggtctatgtgattccactctggtgcatcatcgctccaggctcccgaccacttcacttcaccccatggattcctgagtctgatcagcttctctggatgcccctggaaatc

SEQ ID NO: 986 - DNA, 504 bp, Homo sapiens
  Genbank Accession No. AI921465
cttattcagtctccgtagagactgtcaaaaattgccagcgctgattatatttcaagtcatcacggtggggtattgggaaaatttccaattagcaataatcgcgtctcggataaatctcattggctacggtactgccactgtgcaaagctagcttgacgtaggactttgatggtcatgtataacacctcacaggggcagaacctcctccatccccgactccaaagactcatgtaatcagtacgcaagaaagttcagagatgagacctctggttgtattccacctttgggacatgggggatgtctttagttcaaagtcacaaataaatgcaggttctacaattcagaggcttcatatccctgctggagtattacatgtttattcaggatggaccacttttcttagcaacagtttctaaacctttgccaggtctgggaagtctggcaggagagatttctaagaaccaatcattcctgcacacatttcttgaagataatatacattat

SEQ ID NO: 987 - DNA, 550 bp, Homo sapiens
  Genbank Accession No. AI921788
  unsure (1)..(550): n = a or c or g or t
aaactggcattaattttccacacttttaaggggtttgaccatgggagttttccagccaagtcttcaaaatcctttagaacttcttcctttgtttgtttgaactggtaatcttgaaactcctgaaccaccacaaataagttatcaactgatctcagacaatgaacctgtgccagactttccactgaaatgacaaaatatatcttgccacggtctctgctgattttgcatgatgacccaagtttctctctgacttcatctgcagctgtttgctcaaagccagtaggtacagtggctccaatagtgactagaagctcagattcacttccgaggtcgctttctgtcacttgtacagacttctggttctcatgaaggttcacatctaggagttggttagtggcttcttcaatgtcacacatgttggctgtgcttccaagatccctaacactgtctctttaaaagcagtactgtcagggcccgggaatcctagggagcgggtaaaggcctgngagagggagcaagatgggctccgccacgagatccggctgaagtc

SEQ ID NO: 988 - DNA, 582 bp, Homo sapiens
  Genbank Accession No. AI921883
tttggggcattagtagcatttttatttttcatgtatttgcctttatcaaactataagctgtggagttgccaatatactccattgtgattatacactgatttccatcacctgcctttttactatcaactcttattagattaaaaggaaatagacttaaattatagcaggaggtcagggctgctggatagatgttggctcagagaatgtatgtgaagacaccaaggcctctcctgtatggacacaaaatcatataaccactgtgtctgagctgggttgtggatagtcttatttggcagagggggatagccattatattctatgaaccttgccagctgtactggcctacacagttggaaagtttggaggcttttgtccgcatagacttgctatgatgaaaatgacagaagtttctagaatgaaagaggttgcaacttggcagcttgcaagctaaatccagctgcagacgtgtttgtttaaccagcaccatttaaacattttaaaatcacttcttgatatttaaaaatgagaatgtttctcatgaaaatttggatttcaaaaaatgtgaagaactggtaatcctgg

SEQ ID NO: 989 - DNA, 516 bp, Homo sapiens
  Genbank Accession No. AI921931
gagttttccagtcgtgtatttatttttgagcaggccattgatgcctatggtgcaacagaccacagggagaatacacagggaagctgctgtgccccccaccaagaggttcccagtcttcctgtccccaacccctccccagctcctcatccaggtcccttgccctctgctcagcacaaggcatgctggcggccacagacatatctactgacatgaacacacgccccccacctacactgcgctggctgggggataccacaggggcctaactagggaacatgtgaaaggtggcaagaatggacaagtggcctgtggcatgatggatgggctggcagacagatggatggatgggttggtagacagacagacagatggagctgctaggaggtgactacctggctggggaggcctgtctgagaaatgatggatgggatgcagagggggctgagaggggctgggccaaggtgggaaggaaggaagaaggaaggaaagaaggatggatggctggatggatggatg

SEQ ID NO: 990 - DNA, 483 bp, Homo sapiens
  Genbank Accession No. AI922323
ctgttcaaaaaaggttttatccaaaaaagttaatcaagacaagcaacagatactgcaaagcattatatacagcaccatagtccaggggccaaagaaatcaggaggggctgggcagtagaggaattccatatattaatgaatgtgagattaagtatagagtgaagacattaacacacaattctaatttctgttaggcagaatgctcccctaccctgatgccacagcctttcacgtttcctaaaccctagtaacctctgatctccatctgcctcatcaacacgtcaccaccctttgctcttcttccaattagtcacatgttggctgaatttatttcactccagtactttaggaccttgacagacaaatcgattacaaggtcaattcccaggatttcttcagggtgtgttcaggagtgcagatgttctttggatgacctttctactaaattagacctctgaaggagaaagctacttgccagaggct

SEQ ID NO: 991 - DNA, 537 bp, Homo sapiens
  Genbank Accession No. AI922821
catttattcaacaagtatttactgagtgccttctgtgtgccacgctactgttaagacagagtccaactccaactgcgggcaggtatgttttccatactctccccatccaggtactaaccaggcctgaccctgcttagcttacgagattaggcgcgttcagggtggtatggccgtagactattttggatacccttatctttaattttctcagcaacccttcaaaacaggtatcacaagcctcattttgcagataaggagactgaggcttttagaggctaaaattgacccaggtcacccggctgacagatggcaggcctagggttctgattcagtccattggattccaaggcctgtgcttgttccacccggccacactgcctgtcatcaaaacacatgtctttcttgcaggctggtctattgcatttccgtcccgccatctgtcaaaaatgggcctgggacggagaggcctctgcctattctgccctccttgtttcgagaccttaggtaaagccagcatctccctaccagctcctccct

SEQ ID NO: 992 - DNA, 548 bp, Homo sapiens
  Genbank Accession No. AI922828
  unsure (1)..(548): n = a or c or g or t
ttttttatgtttaaaattctttggtgtttaatatagtaccaactcattctgaaaactggtaaacaaaggaaacaaaaccccaagtaattgtcttctttcctgggcaaatggttgatgagggaaaggttttatcttgttttatcttgttttcaagacaaggtcttgctctatcacccagattggagtacagtggcaaggtcatagatcactgcaactttgacaccctgggctcaagcaatcctccttccttggcttcccagagtgctgggacagacgtgagccatcgtgcccagccaaagattattattttttttttattttgagaaggagtctcgctctgttgccaggctggagtgcagtggcgtgatcttggctcactgcagcctctgtctcctgggttcaagcgattctcctgcctcagcttcctgggtagctgggactacaggcgtgtgccaccatgcctggctaattnttgtacttttagtagagaaggggtttaaccatgttggccaggatagtctccatctcttgacctcgtgatctgcctg

SEQ ID NO: 993 - DNA, 498 bp, Homo sapiens
  Genbank Accession No. AI922968
tcttttcatgctaaatttttatttcaatgttatgcaactgcataagtataaatattttgttcaatatacaacaattatgacgtccataaggaatttcttagagaaaataagactgcaaacactttattgcacagatcctaacaaacttttaagctggtaaatctacagctgggagtactaccaaggagcacatcctacaatcacacagagactgaccaaatagaacacaatgaggagaatttctaccagctgattggagaggtttacaacaacaaacatgtaatacatgaatgcaaccttaagtactctttactcatttataatgaaaaacatatttggcaaaaatgatgatacactatacaaaatatacataaaaatatcatttgtaaacaaatagctagttgtgctttaaaggaaattggacagttaaaaagcataggcttgtaaaccatgaactacctccccgacagacttgtcccgatggctgaatgtaggatt

SEQ ID NO: 994 - DNA, 577 bp, Homo sapiens
  Genbank Accession No. AI923659
gcggccgcctgctgctgctcttcatacaccaggatatccagcatctgcttcagccgccagggaatgtctgtcttcttggcgggggtgctttcatctggggcctgaaggtctggagctggaagctgggggaagtgcagccacctcttccttgcagagtcaggccagtgagacccccaaccaggctactccttcctcacacagcctctttccaaaaggtcagagtgggaccggcagctaaatcatcaggagtggagtggcccagggctctgggtcttctgtctgtctggttctctgtctccgtgaactcggctccaattctgaacgactgggcaggttacctgtgctctcgatgtagtagtgcgtgatgcccttccagtgctccacgaaggcctgcagcaggtcaatgctgggctcgcgccttcgtggggacttggaccggcagggcctgcacttcccacgtcccggggtgacgggaagggcgtcctgcaccccaacaaggtcctggagttgtcgcccccacggcttcctgcagcagcgccccgagccggctcagcatgatggcgcccggcccccggct

SEQ ID NO: 995 - DNA, 440 bp, Homo sapiens
  Genbank Accession No. AI923984
ttttttttttttttttttttttttttttggagttaaaagttatttattgagggaaaactagggatggttcacttgatccctccccaaatccatcctcaaatgcacccgagcaacaagaaaactagctcagtcagtgagacgttcagccttatgcaaaggctcaggagccctccaaaatgagggtaagggacatctttttagaggtgcaaaggagcgattatgattcagggtgacagcatgctaactgcagggtcaataggcaaatgggattcataagcagaatggagtagggtgttcagtatccagtggccagctcctcaagggcatggctgtggaccacattacttctgcttggtcttctgctgggctggtgctggagtgaccgttgaagggcagggctcaggcaccttgggctggcagggctctggaatcttgggctg

SEQ ID NO: 996 - DNA, 490 bp, Homo sapiens
  Genbank Accession No. AI924317
tttttttttttttttttttctatcagtcttatcacctttctcttggtttccattcatttgtctctccaaaaagtgggaaggctgatcactggctgtggatacaaactctctccctgatcttgaactttcttctgtgtcttcttccaaggtctccatgccttcatcatcatcatctaccgcgggtttatcataaaatttgtcgatggcagctctgaagctctcattgcatcccctgcctctgattatccgcggccgtggacgatggaaaggaatatccccattcaaagtcacctcggcaactgcggtctgcaaactctccaatgagcttgacttcttcaaacccagggaaggacccacatctctgctgggagaacctgctttctggtcatccactgtattgagtttagtctcgtcagctatacctaaatccatgctttttgattttcgtgttttaacgaaatccaattgactggcatctgaaaattgcttt

SEQ ID NO: 997 - DNA, 525 bp, Homo sapiens
  Genbank Accession No. AI924323
ttaaatgaaattgtattttgcccacggctgcttctgtttgatccctggggacagaggggagcaagggaggggagtggcagggggaggcccaggtgtggggctggagggggtactggcggcagcgggaggcagtaggcttgggcaggggaggagtgcgctgcgcctcaggaggcaaaggtgccccagcctgggcaggccctggaccagcccaagctgagcagcgccgcccctgggctggctctcagagcctgggctaacgtggagcccgccacgtcgcttggcactcagaggcccctgcttcttgttggctcacgtaggccacgctcaacacgtagcctgtgccacacccttcgaggcccgggtaggagggcagaggggctggtctgggctcttggtggacccctgctggtgctgcctgcctcctcctcccccacgtgggactcaagccaagggtcagaggcgcttccgctgctgggagcaagggaggagagtaggggtggagcagcctcccctctgcgtgggaac

SEQ ID NO: 998 - DNA, 494 bp, Homo sapiens
  Genbank Accession No. AI925240
ttttttccttcgtatgccacctttattgtgtttccccaactcctgggccccatggtaaactggccacatggctactgggctcctggccttcctagggctagcagctggtgggcaaacactctgccctgctggagagctgccaggccatgcccgggcacaggctagtggggctcctggctcagtcctgatagcagtgccagggaggcgtaaagtgcacacatgcggccctgggcctgcggctcccagcacacatggggagtgtcctcccccatctctaggccacactcgtccagcaagacccaggccggtgctccttcgccccagctgttccccaggagcccggggggcagggacatggtgctgcgctcctgccacggggcactctgctccaagaggctgcccaccagctcgagcggccccaacagggtctgcgactccagcgcctccgccagcagcttgtgctgcgtttcactcagcatggtcagtgcccccag

SEQ ID NO: 999 - DNA, 554 bp, Homo sapiens
  Genbank Accession No. AI928203
ccgtccttcctcagccaccgctggcggccgcatgctctttttttttttttttttttctctttatattgaatcagaaactttcaatttgagggggggaaaaaagcttataagcaaccaaacaggctgcttttctcctttgtgtttgttacctatgagtttcatatggggcaaacattaattaggaagaatctgtaactatgaaatgctatgtaattcaggaagacatcttttccatattgttaatgaaagacaaatccttcccatatcatttaacactgacacaaaggtttataacaaacaaaactgaaatttgaatcggagtttatttgaacagaaaagcactggaagtctgttcatttttttttcttgaaaccaattataaaaagtggccccaatttcaacaattaaaaaaaattttcaataaatacgtaatgaagtacttcaatgggtcaatgtatcaacctatggatttttttttctttttcaaaggtatgctaaaaatgaatgaatgcaggatgtttttgaaaaaaagtaaatattatatcctatattat

SEQ ID NO: 1000 - DNA, 630 bp, Homo sapiens
  Genbank Accession No. AI928869
tttttttaccattttactgattttttattagggcaagtgcatgttctgtaacatatttcacttgcaagcatgaaagatgaggtctctctctttctacatgggccgctcccggggtctggtcacaatataccaccacagtgggggcaaatcaccttcctttcgggcagggggcaaagcttcagttaaaggaccaccaggtggcgtttcctcctgcagctgcttaacctctcgttcccagctttccctccgcagtttcttccactgttctctcttggcaaagtaatcaggatacattgccttctcagaaggatgccagtcatctaagcaccattctgggaccttgtagcaatcgtatctctcataggaggtgcccccaggagagtcagggaagatgtatggctgtggatgctgacggtaccagaattcttcctcggcctccttcagcagctgggtggccttcgccatatccttttcattcttatgttcttcaaaccgggctctcatcaaacaagcaaagtatcggtatttgtctctctggacgcaccacgactcgaggtggcgtagcgcccgcttataaagccgcaacaccttttgctgatgggtcaggtagggtcccgacgccaagaacgc

SEQ ID NO: 1001 - DNA, 724 bp, Homo sapiens
  Genbank Accession No. AI929144
ggtagggaggccgactgagcaggagtcgtccgcttatagtggaggctgctaggagccggtcagagggtgagtggggagcaggcgagcgagccacagcaggcaggagggagcgtcgcgcggcgcagaggagcgccggggcagggccgcggcggaaccacagccggagaggggcagcccgagccgggcgccgcagggtccccacccccaccccgccggacagtgcccggtgttcccccgtgcggggggcggcggcggcggctgacgggaccgccgggaccgcgggggtgttgccacctccaccgaggagccggcgcggccgcgggctcctcagagccggggccccgggcccgtgacagacgggccgaggaagggagagaggcggcggcgacaccatgtcatctcccagtccgggcaagaggcggatggacacggacgtggtcaagctcatcgagagtaaacatgaggttacgatcctgggaggacttaatgaatttgtagtgaagttttatggaccacaaggaacaccatatgaaggcggagtatggaaagttagagtggacctacctgataaataccctttcaaatcttcatctataggattcatgaataaaatttccatcccaacattgatgaagcgtcagggaactgtgtgtctagatgtattaatcaaacttggacagctctctatgatcttaccatatatttgagtccttttctgctcagt

SEQ ID NO: 1002 - DNA, 528 bp, Homo sapiens
  Genbank Accession No. AI932306
tttttttttgcaagaaagaaattgtttttattgcattgaggacttttccagaagcctggtggacccacgtctccctccagccccaaaggcagtgcaagcctctactgatcccccacttcaaggtgggtctcccctcctgcagggcccatggaggaggggtagggtgggctgtagggggcccaaaagggaggccctggggacagagggagttcactcctgtttaagctggagaccagggagggcccagcctcacctctggacaacacagcaagtcagaggctggggtgtggcaggggctcagctgtcacctctggggtgtggcttcttcccggaaccgcaccaaaggcccctggagcccagggagggaccacggagggcaggtgtaacccctggcctggagcacagctctcagagccctgaggctcccggggacagaaacaagtaacaaagtgagaccacgagagaaaaagaatccacagtttctacaaaaagccccaccctccccaagcaccctggtcagctggggac

SEQ ID NO: 1003 - DNA, 486 bp, Homo sapiens
  Genbank Accession No. AI932356
gttaaaatatataaacaagattaccattgaccagtttggaccaagttaacaactgacattaaagtaaaagcttggttagtctttttttcccccgttttttgagacagggttaaaccctgttgcccacaggagcacagtggcatgactacagctcactacagacttgaactcctgggcctaagtgatcctcctgcttcagcttcctgaaaacctaggattaacaggtgtgtgccaccacacccaaccaatttaaaagacgggtttcactaagttgcccaggctggtctcaaactccaggcctcaaatgatcctcctgcctttgcctcccaaaatgttgggattacatgcctgagtcaccattcctggccccttggctattcttaatggaatgaagtcacagaaaacatttagtggtaccgaggaaagcttgattgtaaaataggtgactgactctatactgatagctctacttactcacctgttccc

SEQ ID NO: 1004 - DNA, 588 bp, Homo sapiens
  Genbank Accession No. AI934965
ttttttttttttctgggcaacttgtttatttccattttatttttacacaaaggcaaagagaataggagtgaggaggcaggaataacgctgggtcactcccaggaagtggggaagaggctgcagccaagaagaatgagtcaggctgctcttccttggctttcttggtaacagcaatgaacaaaaggaagacgaggcatggactccaggcttaagttaacaaggtcagtctgttcaggccaagcaatggaaaggaagtgtcagatctgtccaatccatgttcataaagaggaaataaggcctaggtccgtctattgaggccttggctcaggattggctggggcccttctctttgaaggtcgaggccgctgtccccagggcgtataggggccacggggacgatacctgccaaaacccctatgtaccactggggcaggccgctgataacggggtgtggggaagaagggcataggcagctgaggaccaaccataaaattgtcttcgacgaagaaacctgcatgggctgatgaggggacatctgaatggcaatagaattgatccgactggaaagtatggtctgaggaaaaacag

SEQ ID NO: 1005 - DNA, 483 bp, Homo sapiens
  Genbank Accession No. AI935035
ggccagccccgagcttgcccagcggtgctccaggcagggaggggccaggcccgccagccaggcgaaggcgcaggcagcgcgcgcggggcgccgtaggcaccgggccaggcgggcagccgccctgggcccgggaccgcgtacgaagccgcagcggcacacgctgatgagcgcggcgaagaccaccgccgcataggtggacacgtagtaggtggccccggccgcgtggcaggcggcctccgggccaggcccaggtagtaggtgagccacagctgcagcgtgagcgtgaagaactcatcaaccagagccaggttgaacaggtagagaagcagggcctggcccaggcgcccgccgctgcggatgaacattgccagggccgccacgttggctggcagccccaggcccagtgccaaggcataggccgcgggcaccacgatgaagcgagcagggtcatcccagaggctgcagccgccaacacccaggtcc

SEQ ID NO: 1006 - DNA, 571 bp, Homo sapiens
  Genbank Accession No. AI935202
tttttttttttaaaaaaataatttatttatttaatttgaaacagcaagacttcagcttccacccagtcagggcttgcattacaattttgcaggtgcaaaaactcacacttttgatgccacaactagaagtttgtaaaaactatttttcttgtcgtggacacgtgaagagttctgtttgcaccctcagcctgggccaaataatcatctttatttaaaaacaaaacagaacaaacaaaccaaaaaaccctcaaaagcacaaagaggcagaaagcggctggtaaacctggttaaaagaccaaagttcagaaagtgcatgggagagggacgctgagctgcggacaccgttccggctgcagtacgtgttatggctgaggttacacttgggtgactcagggatgcaggcagatgaacattaaccacactaacagaggagaaagaagcccactggggctgtgcaaagtgtccaaggagcacagccccttttgccctgatcagatgtaacagcccctcgcttgagatctgactgggcaacatggcaaaaccttgtctctacaaaaagtcaaaatttagc

SEQ ID NO: 1007 - DNA, 562 bp, Homo sapiens
  Genbank Accession No. AI935271
  unsure (1)..(562): n = a or c or g or t
acagctttttttttttttttttttcccaattataaaaagcctttattcatacttaaatagcggcatacatgataatttgatgagtaaatcaaactatataattttaaaatttgcatattttaaagttttatcagttacttacagactgtttgcaaaatagagggaggatcactcataatcttacatagcactgtcagcagtctgctgtcctgtgcccagtcgaatggattgacactagatatgcatgtctcatgtcattcgtatatttccgtttccccaagtcttcacctgtccccatctacccagatcatttgggaaatgtaaatgtgcagtcctaagcgctgcccgcagggtcgcgatgtctgccaggtactgctggctggctctagacaccagcagcagtgataagaaacaaagcagaggagacagttaaatggtagagaagagaagggggagcagaggtggtaggccgggaacaggggaataagtatggttctccccgcacgtgcccatgtgcgcacacaccgaaggccatttanagggaagcggttaggtatgaggt

SEQ ID NO: 1008 - DNA, 573 bp, Homo sapiens
  Genbank Accession No. AI935292
tttttttttttggttggttttttgtttgaagcttctgttttttttgagcttcctctcttggtagctgagtctctccactcaggggggaaaggagtgagtatatggagatgtcgaaatatttgtagaaatgtcttaacctgcaatgataactgccatcacactatctgattccttagtggttcactcacacacactccagcaaagttgtttctctatgtgagttttaaggctctgcttatcagtggactcatctttgcctccctattaatttcagcatagaaaaagaagttttcccacaggtaacctttggaaacaaaggcagagcttgagcagtgatcgaggcaatgattaagcagtcagaaataaaacgtgagcttgcattcacctctgccggtggcggcctgagcttcttcctgtagactgttgacaaagaaacttgagaaggcaaaaaagccttttcaatagcaagaggacactgtgaagtgcagggaggaccatattatgttgatgatggatgagtggatccctctccactgaatgtgccaggctggagcccatccattagagagagct

SEQ ID NO: 1009 - DNA, 516 bp, Homo sapiens
  Genbank Accession No. AI935586
agagagtgagttttttttttattcctttattctttttccaacatggaatgcaaatgtaatgactgaagccacagcagccattatggactacaaagtgatcttgagaaggaaaccaaaatgattgaagcagcatgggtcattcatatgcgggtcattgatacgtgggtcattgatatgtgggtcattgatacacgggtcagtgatacattctctaccaccctggatcactaactccagacttcttttacataagaggtaaataagcctctatttgtataaaacactcgtcccatacaactgaacataatctcaactgatacacttaggaaatcattgaaggaataagcattctgaaatattaagtatttggtgtactaaatacaaaaggagacatacctctaatgcaattaacaatgccaagactttatctttttaagggctctgagtgaccctgtatatagaggtcacttgcgatggcttgtcattacagtaccaaacaaacccataggctcatta

SEQ ID NO: 1010 - DNA, 533 bp, Homo sapiens
  Genbank Accession No. AI935827
ttcagatttgaaccacacaatttattaacaagcatgatttgtggcctcgtttataaccagcccccaccccagcacttggtgcacattctccttaagcgcagaatttggcctcaaggtaatattttaggaataaataaaaagaggccgggcacggtggctcacacctgtaatcccagcactttgggaggccgaggtgggcggatcacgaggtcaggagttcgtgactagcctggccaacatagtgaatcaccgtctctaccaacaatacaaaaaaattacccgggcgtgatggcgggcgcctgtaatcccagctactcgggaggctgaggcaggagaatcgcttgaacccaggaggcagaggttgcagtgaaccgagatcgtgtcattgcactccagcctgggcaacaagagcaaaactctgtgtcaaaaaaaaaagaaagaaagaaagaaagagataaaatttccccttaggtctggaccttttgatacaagccgatgctcagcgggtgttgttgactgacaggtggatgaat

SEQ ID NO: 1011 - DNA, 428 bp, Homo sapiens
  Genbank Accession No. AI939503
aaggtacacaatacatgtttaatatttaaagaaggaagcttctgcacagatttaacatttaaacaataagacaataaataggttcaacattgacataaataaatgtaattatttaaatagtaaacaaaacagatgctttttttttttttctgttgccgaagctggagtgcagtggtgccatgctggctcactgcaacctccgcctcccaggcttaagcgattctcctgaaatacaaatttccattactaatacaagtaaaaaaaaaatttttttttttgagacagaggaaaagggacacgacactgtgttaagcagaagatggaggctatagaactatgtaaacatggcttgagcccaattttaatttaaaataattatatatgtgcatagagaaaaagactgaggtgatacttcagaacgtgaatgt

SEQ ID NO: 1012 - DNA, 547 bp, Homo sapiens
  Genbank Accession No. AI939511
cattcaaagcagaatttttactcagcaagggggggttagagtcaaccagttttggttgattcatttttcagaagcccaagggatagtatctctaatttggggtccttttatgtgctcaagaagtaaacaaaccaacaaaatgtaaatcagttctcaagagccattattagggaattcagaacatagtgctaacatgagatctgagaaataaaagaaggtaaagcataaaacagagaagagcaccaggccctcccctaaataaacaaacaacacaaggccttgcactcagaagacccttggaatgtaggtctgtctctctttctttgaatacttaaatctgaagggatggaaagaccacctaaaaatcctagttttttggcatgatgggggtctaattccttgttcactccaaagagctgatggcacatgttccctgtaaggatctccttgtgctaaaagtctgcagtggcctttagtttataggactgtgttcaggcttccccacttcgcagacagccatgaagtcagctgtcattcaactcaacgc

SEQ ID NO: 1013 - DNA, 617 bp, Homo sapiens
  Genbank Accession No. AI948490
ttttttttttttttttttacaaaataaatacatgccaaaggctttatttaactcattaattaatgagggaattggtagatattacaatgaattcaaaagcaaattgggagtgtcacacatttttagtcaaatatggaatgctgaaatgaatttacaaaaggatacaaaggtggtcactatctgctggaaaaaaaatcagtttcattccattagatccaatttgcatttccatggataataattatttgtattcctatcagttttctataacttcatttctatcgtatggggttgtaaaataacctagtcaaagatacggagagagctgggcacagtgatgtcctcctgtagccccagctactcaggaggctaaagcaggaaaactgcttgagcccaggagttcaagaccagcccaggcaaaagagcaagactgccatcttaaaagacaaaacacaagtcaaagagaggcagagataacctaggtagctgaatgaatcaggacagccgtcaagtgtcaacatttttcacaaatatcccttacagaccctttattgtaaaaatccaagatctagccaaaacagctttctgaattctggcttcattacttggctgggctc

SEQ ID NO: 1014 - DNA, 505 bp, Homo sapiens
  Genbank Accession No. AI948717
gcggccgcgctgctccgaggccgcctgctgctccagcagctcccgcagctgctcctcctcccggcgagcggccactcgctccccagccagctcaccccgcagcaaggccacctccacctccatttcgatcctcagctccttcctctggcgctgtagctccttcactcgctgctccatcagggccacacgagtcaatgcctccagctgctgtccttgcaggcgccgcgccgcccctcgcaccccttcccgcgaagaggtggatgcgggaggtgtggccgccatagctatcggaggcgtagcctcgggcgcgtcgcggctgctctcagtgctgctgccttctcccacttcttcttcctctgcctgctgctcagctcccccgcggctcgaaggttccgccaggacttcggatgcctcctgttcccgggactcctcgggatggccctggggctggacctccacgtcgcattccgggaccagcggcggcggggtcccctcctcggggctg

SEQ ID NO: 1015 - DNA, 684 bp, Homo sapiens
  Genbank Accession No. AI950400
  unsure (1)..(684): n = a or c or g or t
aatagngaaactaattacttaagtaatagagcactggagtgtcccatatatttgaggttgggtgtatgcatcgcaggcatggtggttgaacagctacacttttcagataaagcctcacaagtcctggaactacccctttcctagctacaagcccagcccaggtttagctaaatttctgcttgattcgagtgaggcttgggagtgcagacttccatacagtgggtccatggccaagcgaggtaaccgtccatggcttctccaaagagaggacgtgggtcagatgatgccacagaacatttaggagtggccatctgggccagcccagtgaggtagggctttttgtttttctgaagctccctctccattccccacccctagttagtccatgggccagggaagcagcagccatggaagggcagggcagagctggcttttcacttgagtgctccctgtcccccaggggagacggtagtacacgggcctggtgaggcaacagctgtggagtggnggccaaacacatggatggtggagtacggccggggcgtcatcccatccaccctggccttcgcgctggccgacactgtcttcagcaccccagactttctcaccctcttctatactcttcgctnctatgctacgggacctctgctagagctcaccacctacctcttttgccatgactct

SEQ ID NO: 1016 - DNA, 484 bp, Homo sapiens
  Genbank Accession No. AI950819
tttttttccagttgcaccaagggtatattttatttggcaaaagaaacatccactggcttttgtcaggatgagtcttgagttattcaagttttgaactgagaggtcttcagaaattcaccccacatattaactgtggccttctctacaccacaaattcccctccactcatcctcaaattgtttcctttctcaggacatctgtgacacaaagactgtgacacactcacaggtcgattaacatgaggacccaacacctattaaaacatccacactcctgagaacactaaaaaccaaccacctcgtcaggtcccacctccagtctagctgaatcaggaaacctcaggagaagcacctggaagcaggtttaacaagcgcaaaggtgactcttataattgggaaagtttggaaccaagacagggttcttgtcctggaggaagtattttcctgtggagaaggacctgtaaacagcctatgaagtgctcagc

SEQ ID NO: 1017 - DNA, 426 bp, Homo sapiens
  Genbank Accession No. AI950844
acctggcagcatattagaaaatagcttatgttacaacaaaaaccctataaaaacattcatcccagcaaaagcctccagggctggagggtgaggggaaaagtttcaaagcacgtggatagtccagatctgggatgccctgtcctcatccggctcccatagcaccacgtggtcccggtcgtagccccggcctcccttcacgtccaggatctggccttcgaacatctggctgcagatgtggcccgattcactgatgctccacgtctggcgcggcaggcggctctcggcccacagcaccaccttggagcctgggctagggggtccaatcacctgtaggctcatggtgggggccatctggttcttcagcagcccatcctcgtagtaccagatgcagctacctccagcttgggggtcggcgaccaccacacg

SEQ ID NO: 1018 - DNA, 451 bp, Homo sapiens
  Genbank Accession No. AI951161
tttttttttttttttttttgcacttatggtatttattgttggaagattgagtaccttaatgcacaccaatgctcaaatgacttgggggcacataggggactgctgtcaccatgcctcactcctgcagggaaggggctgccctactaaaaccccagcgggcccagtgctgtgtccagaacaggtccttatattactgcagcccacaatggaactactgagttggacccaaaagaggagggagcaggaagaggtggcatttggagaggggagaccgcacccacaggtctgccacagcgcgtcaacggtatggggtacttttacagtcaagttgacttcggtgtccgcccaccatctacctttgtaggaccactgaaacaagggacatccaccacggcccacagccggggcgccacggccccaggaggatatgctaagaaaaccattccacggc

SEQ ID NO: 1019 - DNA, 472 bp, Homo sapiens
  Genbank Accession No. AI952965
tcatttttctaaacttttgtttattttgatagcaatcgtcatgtttagagaagtaaataacacatttaaaaaccttctcagggccaaaggatgccagagtatttacaaacacatggaggaagggcggcaagacatgaggggctggggctctggggctaggactctacccaggaccccgccccaggccctgagccaagcatggacgctgatgtcagccaccaggactgtcccactggccacagtgtgggctcagggaacattctggcagccgtggggttctgttcagtgggcctggtggagaccctctagccgacctgtggccccgcctcccatccagggggcttcccgtgccccacaggccagctcagaggggtctctgggaagcaccgaaggacagggggcagtgtgggggacacagggtctgggacagagacacgcacacacatacacacatacacacatacacactgta

SEQ ID NO: 1020 - DNA, 679 bp, Homo sapiens
  Genbank Accession No. AI953998
  unsure (1)..(679): n = a or c or g or t
catttcagaaagtgtttattggccggagttgtcggagagccaaaagaagcagtccaggagggcttccttcaggaggcagccagcacagttgcacagggcagcttccactgccatctgccagcactgagtcctcctcatccagacacaggactgtccatgggcctctcaggggtctttggggccaggatgggacccctcagacctggcccaggtgggttttcaaagcctgcagctctcggctgttgatgttgttgcctccacacacgattaccacaactgaagtcagggaagggggcaggcagccctcggcctggagcctccgcaggaggcctgagtagatggctgctaaggctgccccacaggcaggctccaccagcatacgctcatcatccaggagctgctgcacagcgctcacagcctcggtgtcctccaccacttcagagtgaatcttgcacacctgcatgcactccagggcccgagcgggcaccgtcttggcacccaagctcttggccacactggtgatgtctggaagtgtgaccagcttgccggctgtgatggncgcattgaagcagtgtgccccatgggtctccatggcantgatggntacatgctngcatgccaccttcagcaggccagncaccaccccggccaggagacctnctaccccactgccagcnac

SEQ ID NO: 1021 - DNA, 534 bp, Homo sapiens
  Genbank Accession No. AI954159
tgtcagcagcatttcacgctatttattccccaaaaccttctgccatagaagacagccaccatacagattggaaaatgtggacgaggagaaaaggggtgtatggtaagcaaaataaattgtattttccatccttggggaggataaaggaactctttgcactgctataatgaacagcccccaaatgccagtggtttaattcagtggagttcagacctcattcctatatcattgcagtgtggatgctcctggatgaaggctcttgtaggtaactctcctccagtcggtgattcagggacccagcctccttctgccttgcggctttgccttttaaaggtcctcagggtgctctccatgtatcttgccaatggggaacgagtgtggaggactcacaagcgggtctcacatcacgtcctccggggctaatacacatcccttctccccacactctgttggtcagaagtcactgcttggcgccctgctacctttccttctcctccaccacaggaggaggcacagcagtcccaaaatgacagt

SEQ ID NO: 1022 - DNA, 545 bp, Homo sapiens
  Genbank Accession No. AI954620
ttttcaaaaaattgagctttatttacatatcatttgcataaactggtaatttaacagtatgaataaattctagggcagaagacagtttggagaccccagggcacaagtgctgagtttggaagatttggtactgtaccctttgaagccctcacctggtccccgcaccccttgcctgcctgttaagaagagcccgtaccagggagcaaatcaggggcaaatagcccagaagcccagtagtggacagacctccatgcctggaggaggaggccacctctgagagcaggaggagctgcccgaacccttcctcacagcctccttttcctgctctcaacacctccagcttgcagatagacagccccagcaccggcagaatgaaaaggtcctgaggcagcagggctgtggctctggtaaataaaagaggcctctctttagtaaggtagaggagctcagactgcacaccctggtctctgacaccaaggctcgctccatgcccaggactaggggcagcgtgggagctgctggctggggccatgctcgcaacctct

SEQ ID NO: 1023 - DNA, 467 bp, Homo sapiens
  Genbank Accession No. AI955239
ttttctgggacagtctttattggagcttggaatgtcatagcaattcgccctcatcagaggcagactgtgagaaagagcagcgatgtggtggacccccagcagggggaaggccgggctacatgagggagccctgcttgcctgcaagcagggcacaggcgcacacgcatacactctcctacatgaacttacactcacacctgcgcactcgctgccggtgggtcagaggacaggtgccttgagctgctcccctcctcatggagaggcctcctccactctgggggatccgctgagctgagacgggagggaaccgcttgaggatcagggacgaaggagctggaagctgcaggcattttgcagttagggagaagggatccaggacaggagggatggccagggactaaccaaagggagctggagaaggccctgcagggccagggaaggggaagaagatgctggagatgggcaga

SEQ ID NO: 1024 - DNA, 671 bp, Homo sapiens
  Genbank Accession No. AI955491
  unsure (1)..(671): n = a or c or g or t
ttttttttttttaaatgaaaaatttttaatactttccgaacaatctgggtaacaggaaatgaaatgtatttgaatgtctcttctaagtgctgaaggtattttcaaatccaagttcaactatgaggctggcatctggacatttgtttcccagagctggttttagattcttggttctgcaactgaacggttatgaaacttggagaaacaaagaaaatatgcctttcatcgctccggggctcgattttttccatgtgaagcatggtaaaatactctttctgaagcctgtttttgctctaacaccccccgatttgattagggctttagctctctgccttttgttttcctatttatataaaaagaattttatatcctttggcctcccaggatcnattagtcanttgatcaattaggtgaagaactttcacctttgagtgcttaatangntcctgttattggcttgtagagcagccctgatcttgccttcatgttggatgtaaaactgcttgcacttctaaaatcgtggctgggtcctttaaaagaacaggattactttttggataccaaaggccccctccttctcaacatctggcctcggggggttgaagaaaacacagtgtttaggggaaaattttgagcnnaccnccccttctccccaacaccacaccctcctc

SEQ ID NO: 1025 - DNA, 525 bp, Homo sapiens
  Genbank Accession No. AI955755
ttttttttttcttttctttcttttttaaagagacagagtttcaccatgttgcccaggctggtctcaaaccccttgcctcaagcaatcttcccaccttgggcctcccaaagtgctgggattgcaggtgtgagccaccacacctggcccagattttctttaatatttgtctaatatctttccatctccctatattcaagcttcatgtaattttattttctggtaattctctgagcatagagctggatttgctagtttttttattttatgactcaacatgagaggttctattttttatagaaaaggtgaatcggggcctgttccttaattttcttctttggctttttaaatttacattaggactatgaagttttaattgaacagccattaacatatatggttatatgttgcatgatgtttcaatcagtgatggactgcatgtacgatggtggtcccctaagattataatgccatgttttgtttattaaaatttatttaagatttattttattatttttatagatgagg

SEQ ID NO: 1026 - DNA, 835 bp, Homo sapiens
  Genbank Accession No. AI961177
caatctaacatttatttatttcaggtttttttttttttttggcaactataaattacattcactagtacacctggaattcttcatagtgggttcaactaaagaataagcaaacacagcatagatcagtttaaaagaaatcatggtacttcttagagcaatttgcaaaaggggaaaaaagtcttaggctcactccttggaaataaatatcaagtaaccataaaaatattcagccatttttcagttattcggggagttcaggcattggcccacgcagagcatcagagttcctctttgaaataacccagctttgccaatgacatctcttttctcaactgcataacctcccaaaacatctgatcaacatcctgctgtttcacgagtccctgctgaatgtatcgaatgtatgtaaaaaagttacatacagaagtgatcctgtatctgcaaaaaggagaaatataataatagttgcttgagtcccctaatttaattctgtgtttacaggacttactctggccagtgagagcacatattattggtcctccgcattcaactgcagaagctttcacgaccggataggttggaatcccactgggtcaatgctgagagtatagatgaccagagccttcagagcagctgaaggccactcactttttgagaatgtgaaacatgggaagatatcttgctgggggatctcgtctagaaaaggacacgtcctgtccatgggtggctcatccgtgccgtagtggaatccatgatacatagatagtcgacgctcgctgcagtgttgtacatgtggctgtttagcactgaggatctggagactggctctcataga

SEQ ID NO: 1027 - DNA, 510 bp, Homo sapiens
  Genbank Accession No. AI961220
tttttttttttttttttttttttggatattcaaatacatttattcaacaataaggccagtcaggcctcgcggtgacctgatgggatttcaaaaccttggttctcagcaaggcccaaatttttgaatgaggatagaagtctggcgtttccgattttcaaaacataacacgcattcattgggataagtatttccatcagtcccacagacagggtcatatattttggggcatccattaagttcattggaacatttggcctctcttcccagggagtcagctccagtgttacctaaaaataaatcagatatggtaagttgggtcctaaatgaaagaagtcagatctattcttcatcagaattctctgctttcattgcagactgggacttctttactaggctctttcattccccaccctttctgatttctctaatcttccaaaagtatctgactgattttcctgtaccccttccttggcaaaaccttaaaaagtttgagtaaaactttgattatga

SEQ ID NO: 1028 - DNA, 643 bp, Homo sapiens
  Genbank Accession No. AI961818
  unsure (1)..(643): n = a or c or g or t
nttttttttttttactttatatcaagtaaatttaatatagataaaatttaacacacagttaatatacatatatgaaactcttgatcttcttgaacaatactatacatgaaaagaaaccatttttaaataacctggctaactggttggagtgcagacatagggaagttgtgcattaaatctcctgtggggaaactgcatgaaagaaaactactccacgatcaaagattgacccataatcatacagctatcttataagtgcagcttattaaataaagaaaatttagcaagatccattaattctgctggaaaaaaaaaattcaatgcanagatcctattaccagtnggatgttaaagatacacatccagcagaaatggtgaagacacancttaacacataacaatctaagtaattgcagtaatttgtaccctgttcttcattagacggacctctctcttttctgctgcttctcagaagcctggnanggaagtgctgggggagggatgccataacaactccagggccatagggtaaattgggtgctggcgatactggaattgtttgnaccctctccagaggcagcttgaacacaacttggttgtgggcacttagatctgctgccaacaangggncttggcatctgta

SEQ ID NO: 1029 - DNA, 448 bp, Homo sapiens
  Genbank Accession No. AI961907
tttttttttttttttttttttttttctttgggaaaaccaaacatgctttatttcatttttttcacaatttatttaaacatctcacatatccaaaataggtccaatttaatttttctgcttgcccaagaaacaaagcttctgtggaaccatggaagaagatgaaaatgagactggcaaagaacaaatgctgaatctgaagaagatttgggcaaataatctgcatacttttaattgggaataagatggaaaatatgaatgctaaatcaaattttttaaaaaatcccccacacgatacaactcaatacaggagtattttttctcaaattcttctagcaccatcaacattcttcaagtatctgaaatactattaattagcacctttgtattatgaacaaaacaaaacaaggaccctcagttcattttctgtttaggccagcacctaccaatg

SEQ ID NO: 1030 - DNA, 433 bp, Homo sapiens
  Genbank Accession No. AI961994
  unsure (1)..(433): n = a or c or g or t
ttactaaaagaaccaaatttacttcagtttaaggcaaattccacacagagactgtctcagagacgggcacagaaccagacaccgtagaaacaccaccaccatgcatgacggggaagcagaggcaggcggaagacgggggcctggcctgcaccaggcacggagaggtcagtgggctgaggagctccatgcggcaacagggattggcatgcatgatctgctccccgagtgggcaaaggctgggcagctgggtgggcccgggagggagatcaccttcttccccacctttcccacagcaggggcaggagctcgggctcagaagccagagccccaggctgaaggactagggtatgtttggggtgatngggttgagaacagggtgacccaaaagccaaggcggcctcaagtagggtcacatctgttaggagtaggatgg

SEQ ID NO: 1031 - DNA, 617 bp, Homo sapiens
  Genbank Accession No. AI962905
  unsure (1)..(617): n = a or c or g or t
ttttttttttttttttttttttagagaaatgtttttattaagcaacatagtttacaaatggaggtaatttcccactgcatagataccatgtgttttttaagttgaggttcttcatgtgtattttcccactttcattaatctcttctttttatcttacatactttttttcttagattttcccagccaataacttcttgttttaaatgtttcataaaaagtatttggggagtattcatatgaaaattatggttgttttcataattgggtccttctttgtaggatccaaatctgggattaaaatgaattttctcagaaacttctctgtggtctatgaccactttctggttgtctctataattagtggggtcatcagggatcctaaattttgccatctgaatttctgaatcactcagttcagcatgggagattcttgcataacccaacctgatcagccctcgatacataatgtattcacaccatctgtcatgatcagtgctgtcgatatccttcacattgccatgttcagtgagctgtagataatctctggagccaggtgctgaagtgatatatcccagaaatatcacttgattagagctactttncagtagttttgaaac

SEQ ID NO: 1032 - DNA, 660 bp, Homo sapiens
  Genbank Accession No. AI963304
aatgaagtaaatatctgtttaatttacaaacatcagcagtgtaaccgatattaatctggagaaagacaaagcacactgaattatacatgtacatctaattttctttgtaaaaaaagaagttttcaggaagaaacatctgcatctttacagggcaccctgggattttaatgagggaagagcacagttcactataaaccattatcaattctacattgtaatttagcagcaaacatgttaacatgggagcattaagataaataagggagttttattgtttgagggaaagaaaagtcacagttcttgatatgacagtctttttatccccacctcacccccagaaaagggcaaaaaaggtcaaggacatattaatttgcaaaaggtctactttctagtgttgattgctacacaccatttcgtttctgtgaggacatgttgcagaggggccacttctttctgtacaatgaccatctcacatacagatttctgttttcctttctcggactttgcatactctctgcagtgtcctgaatgaggccagtaggtcattgacatcagtgatcatctggcccttctggtccccctggttcttgctggaaagaagggcttcgtgttcctcgtgtgaccaaggtcagttggccgaacttgagaagaaggtgcagt

SEQ ID NO: 1033 - DNA, 577 bp, Homo sapiens
  Genbank Accession No. AI963642
tttttttttttttttttttttttttttttcaaatcctccatgaagttttatttttaaaaaatggtttaccctgtccatgtttttattgaatcctaagtccaaatgcccaaggagataaagcaggggcagttaagtttgcatgggaaagctaaaaggggtttgtccataaaatcggcaaaggaaaccaagttctgtaaaatgagttctccctcccctccagggtagctgattatgaggaaaataaaaaagagctttgcttttctccttagtagaaagagggggtcccctttcaaaccccaaaaaaaaataagctgacacacacatccctatcacacctttttctaaaaaaaaaaaaaaaatgcggggagatgtgtcctgcccaggttaaactacacacaggctatcttcaggtgaagggaaacagtcacactggcttgaagttcactggttcaggtaagcagaccatcttttttctgtcattgacaggcaaaggggcagtgcagaacttcccattaatggtagtccggtcttttttccaaactggggttgaagactgaaacctgaatttcacttgttt

SEQ ID NO: 1034 - DNA, 541 bp, Homo sapiens
  Genbank Accession No. AI968197
tgcagctcattctgtttattcaggtgggcccttgcatgggcccagcctttaggatgggttttttctgccccaagtaggggtcatgggtaggatggaagctgccagaagcctcttaggcctggccctgggtgggggtcactgctgcgggggtggcagatggggtcctggctgttcctcagggaggggcaggtaattggggtcttctgcaggggcatccaggagcagctttctgtggggaggggcccgtgttgagcacaggccagcacaggtccccatcggtggggatccttctgagggtggggagagggagggagggctctcaacactcacaggaagccaggggtctgcaggagcctcttgcctccaggctggttggggaagacgtcctccaggaagtagtagatatggcccaccgcaatccctgtgagacagccacggactgtggggtcaccctccacagcccagagtcctagaccagcagagcctgccccaggcccccatccacagcctggtggccctgcaggccccacagcatgagtgc

SEQ ID NO: 1035 - DNA, 301 bp, Homo sapiens
  Genbank Accession No. AI968388
gtgtgagcaatatggctgtttatttcacctgggtgcaggcgggctaagtccgaaaagagagtcagcgaagggagataagggtaaggccgttttataggatttgggtaggtaaaggaaaattacagtcaaagggggttacctaaagctcggcatccgtgatggtctacggggcttccgaggcgatcaggcagcatcagtcttcagccgctaagccaagaaggagtcagtcagagagccttgggccagagttccagggggctttgggagtggctgccaggtgagttgaacagtccgatttcca

SEQ ID NO: 1036 - DNA, 514 bp, Homo sapiens
  Genbank Accession No. AI970185
  unsure (1)..(514): n = a or c or g or t
tgaagattataaatcatttatttgaaaaagatacattttattaaaatccattttccactttaatggtagttcaatccacatcgtttttccagtcttaaaatgtttctttatcgactactataaccctttactgtaattaaagccacattttgtaaaactacataaactggggtttgactatgaactatgtcctaaatcccactgccaaatgtagctagcgtcactaaaatcaatcaatggttttaggtctgagtgatagtggacgagtgagcttggccataaggtgaaggccacccttgcttttactggatatccaaaaacgaagtccagtgagcagcaaacgtctccacgttaaccacacagcccactagctccagttccagccctggacagctttctggcccctcgccgggcccacttcctctgcagccccaggtcccgacgcgcagggaaggccgtctggggccgaggtcggngcgagccgctgcccgggccagaggaaaggcgcggcgct

SEQ ID NO: 1037 - DNA, 605 bp, Homo sapiens
  Genbank Accession No. AI970292
tttttccatctcattattttaatcattttgtcaaaaaatctgaacatgtgtacataaaacttgatttgttaaaagaatgtgtagcatagaaatccctgagacacattcaaaaatgacttgacatcttgacatgtattcaatgcaagtattcaccaaactaaataccaaggacttggctcctttccctgatatttgaggcatataaagctttaaaaatatatataatatactatatatataatttacatctttaaagttaaaataatatttcttttctctgattcctggttttctgccagtttactgctcctgcatattgtcagttccagactgtaaggaagccacattggaaagcagataagcactttcaaccttagggtgccagttagtagaatgatagcacgtggaactaggaggtcccaacagatgattttgtctaacccactcattttgcagttcaggtgacagaggctcaaagaggttgtgatttgcagaagcatggctggttctgccactgctattgtaatgttatgcaagtccttcagtgggcctggaccttggctccttcctcggtaaaatggactgatggtaatcacagcgaatat

SEQ ID NO: 1038 - DNA, 590 bp, Homo sapiens
  Genbank Accession No. AI970855
tttttttttttttcccaaagccagtgtttattagcaggggggaacccaaaggcggctgtggcctgggcagcaaaaggccaccaggagcccccacccatctacccaactgccccccagagctaattacatccacacccatcccctgaagtggtggacataagggagccctggggagcctctaccggccccaggcctttaccacggaccccctcccctcagagctggggcctcccgtaagctctgcctgggcctggcccctctgctatgctcccagcctctgagtcaaagtggcacagggaaagctaaggaggtagagtggggtggccctgccctggccaggcggggaggggagaaggggctgaaggggctgtcccacccaggcaggatgcctcttctcctatccccaataaatagagaataaatacccaggaaggggctggtcgtggctgagtgcccccaacccaggcaggggctggcatcctgtgatggccccttcttcccttctctgtgtgctcttgaggccaccccagtctccaaagtggtcctcgcatccatgtctatgccacagcacaggctgacaacacacatca

SEQ ID NO: 1039 - DNA, 514 bp, Homo sapiens
  Genbank Accession No. AI970896
tttttttttttttttattaaaatgtctgggattacttatgtctcagcattcatctggtaacttaagcagcatgaagcaagagttgcactttaaaaaatgacaagaaaatagctattcatttagtcgacagagtaaggcccatctcatttccaggatcactagtttctgcttatgacggggtgagcatccgccagcgcggtgattgggaggcgcccctgtgtctttaggctgaggcagtgcccatagctgcagtgcctcgaggttccggaaccaaccggggggctctttcttgaggagtcttgggaggggcggtggcctgcctccccatcctagatcagcgaggtcccaagagtgcgtattgctgcggggtagctgtggagtgtagacacgttccggaggtggcttgacatcctgaggctggggtggtgtgaagggaaagaaagaggggcaggtcccgggctttgctggctctgcttctcagggtcaggccaatgggtctgcagagcagtgcagc

SEQ ID NO: 1040 - DNA, 524 bp, Homo sapiens
  Genbank Accession No. AI971000
  unsure (1)..(524): n = a or c or g or t
tttttttttttctttaataatgatttaatttattatttgttaacagttgaacaatacagtttacatatacacagcaaagattctctaaaacatgtagtagtttctaaaaatgcatgtgctaactgtagtaaaaagcaccattctctatgatcttgacacaggatttacattggcgtcatatttacataaagaaacatctggaaacagaatagcataccctttcatctgctgctcccctgtcaggctgtgtgtagcattaggaagatggccccccaaaaatgatggtaacagcaatattccaagagcaccaattctagggatggggtaaaggcaagtttggttgtcaggtaaaagctaaaatgaagaatgctccctcaacttgccaccccacagagagaagaaatcaaaatgtaaaaatctggataaatcttaacattgggtgccttatgaattctcactttatgattntgagagaaggtcaaatactcaatctcttcagccattcaatagctgaatctagcagt

SEQ ID NO: 1041 - DNA, 587 bp, Homo sapiens
  Genbank Accession No. AI971202
ttttttttttagttaatgtactttccttttattaaaaatacaattacacacaattagtctgggttttgttaagctaccactgatttagataaacctgagaaagctcaaaatatcaagtaacactgtttccatactgctcattcaatggcactatcactcaaaaagaaatctagttcaatcatctatattaaaatcacagataatataaaaataaacattttttgcaatagcactaaaacatactataattcaaattcacaaattttgatatgtaacatatattcaccttcatattaatttgtgattatgtgtataatacaatgtacaacagaataaaaaactctaacagaattcagcagccaaataatatacaattatcactatgaaacttggaatttaagttatcaactaaacaaaaaaaaacagattaaaatcaatagcagtgttgaactcgctggtagtgtgttactttaaaattccatctcaaaacagttaagattatgctatctcaccttaagaagaagcaacacaaaaaattaagtagaactaagcagcagtaaccgattataccagctgcctttttctct

SEQ ID NO: 1042 - DNA, 545 bp, Homo sapiens
  Genbank Accession No. AI971227
  unsure (1)..(545): n = a or c or g or t
aaaagacacaataaatttaatcccttgggttaaaaatgcgggttctttgatacaattaaaaataacccgcaaaacaaaatcaacttcataaaaaatacaaaagttatatgacccatatcccatatcttatcttaaaaaaccagcaatttagttcccatacttcattagaatactttaacctaagactgtaactaccagtccatttacacgaatgacctagtctagttccctgaacctaaagatacccgtgactttgttataaattacatattttaggatttttatatacttaaatgtgtacaaaatgttcccctgccatagtaacatatttttgtgaattcatgaatgttttctagaattgttaacatacaagataatcaaagcacgaaggctctgatgcgtgataaaataatcatttctcaaaacaggaagatgagaactgcatttcgagttgtatcacttggtacgcaatacttgcaatctgtgtgctgtaattacagtgtttcttcactctaagtgcatctgactgatactagcataacana

SEQ ID NO: 1043 - DNA, 453 bp, Homo sapiens
  Genbank Accession No. AI971242
ttttttttttttttaactgaagaatgaccaatttattttgaatagaaaacatgcagacagaaaaactatcatgaaaatttaaacatgtgaacagagggtaggaattttaaaacggtaatttttcttagaactttaaagttcaagaaaaataccttaaaaccaacataaagaatagcaggcactgtactaagcagttcacccacagtatcatgttttaatctcaccacagccataaggcggtaatagcatgcatagatatcattccaatttttcctgttgcaagtaacagaaaaccagaccccatctggctgaagccagtaagagaaaagactaacaggagggccagcctcaggactcaaatacgtcaccaggacatgggttgcgtcccagtctcagctctgccagttcctgtagaaccctccttccaaggttcacagggtggctaccatagct

SEQ ID NO: 1044 - DNA, 624 bp, Homo sapiens
  Genbank Accession No. AI971396
  unsure (1)..(624): n = a or c or g or t
tagagtaaagttgnttatcatcaaagccatgttgcttaccacacggagttgggggttggggagtgagcttggaggggtgagggggtgagcgtgggctcccagcatgggcaggggacggaggcaaactcattcctcagaaaaggggtatcttccccaagaaaagcctggagggcacttgtggggggaggtggcaggcggggggagaggggtgggtcattgccgctccagcaccgacaggaacttgcggatgtcctgggccagcaaccctcagcttcctcacaggccgcaaagtggcccccaccaaccatgtacgaataggagatgaactttgggtacttgaacctcacccacttttcatgcgtgtgcaatacctcaaacgggaaggcatagaagccagtgggcacatacaccttcatccgctcatgcttctgggtcatccagccctgtcccaggtcctccttgtagaagcgctgcgaggagatgatggcgcctcgtcgccagctaaccatgacgttgttcagcacgtacgtcagggagaacttcctctccagacctacatccctcaggtatcacaatctcgtattggtcctgctggaatactctcctgactataagcacccagac

SEQ ID NO: 1045 - DNA, 513 bp, Homo sapiens
  Genbank Accession No. AI971458
ggtatcaacattttttaatatataagatccttttatttctgtttgaattcaattgattgtttaaacaaggggtcagcaagctatagcttcatgggtggactgcctgtttatgtgaacaaatttttactgagatacattcatgctcatttgtttatgtattatcaatgggtgctatagaattacaaaagcagaattaagtagttgtaacagagcctaatggcacacaagcctaaaatatttagcttttaaggaaagcatgtccggttctggtggctcatgcctgtaatcccagcattttgtacgattttgatggagggaaaaatgggaaaacccctcagattcatttcatggcaggttggtgccatcttcagagatcaccaagcctgtatttgtaagaggaggagatagagacccagagaggcaaagagactcatactgagcgagggtctgggatctaggaccctgactctgggttctctgttcctcttcctacaccccaggcagtgtcaacat

SEQ ID NO: 1046 - DNA, 501 bp, Homo sapiens
  Genbank Accession No. AI971594
aaaagatgaaatcatacagaatagaaaatagtgtgcacctcctgcaggaaggccactggtttgtgctacacccgcacgtgagcctgtggcagacaccatcagctgctcccaactttccttttccttttgttcctgagcacaaggactacacttcccagcctccttcacggttgggcgtggccacgagactgaggactgaccaggagtggtgagtgcaaggcaagtgcaccatttgcaggctcgacccgcaaaccctcctgtactcacttcccatgcccttgaccctttggctggctggacacatatgcaggaaaagcccctggggagattatagagccacaagagtgaaggaccctgggtccctgaataaagaaaattgcctgccaacctgtaaaccaccattccgctgttggccattcgtgaccatgtgtatttgtcatggcagtctaacctatgctaaattaacaaatgagatacaaatcatgacataaaatgtattga

SEQ ID NO: 1047 - DNA, 841 bp, Homo sapiens
  Genbank Accession No. AI971748
gcggccgctcgcaccgcggctcctgccagctcactctgagagattgggccccagggcagagaacaccaggcgggtgggcgtgtcgggcacaccagcagtcaggcgagagtcgtgggaggagacggaggtgagggtggagtagtccctgggcagtgtggtcgagtgtgagtgttctgagcgggtcagtgagttgtagtcccgtgtgagggtggaggatgtgcttagcacgcggaggggcacgtgtgggctcaggtgggtgccataggcagcagcactggtcgtggtcatcctcaggccggataaagaggggcacccgtacgtccaccagctccacgccctcctggaactccaccatgccccgggcgtcctggtctgcagtgagggtgtagtagccgggggccaccttgaggtcgtggaaggccctctgttccacctgcttctctgtaagcttcagcagggccggcttggccgagcggggcgccatcagcactgtgtccacaatggtgtggtcttgctttttcccggcattgggctgctgacggaacttggtctgctggagcttgtgtacaccggagatctgtctgtagacctaggtccagatgctctccagcttctggcgcagctgtgcgcactccagagtgtcatgcttcagcaggttctcggcgcataggcgggccaggcgcatggacagcccgtagggcaccagctctgtggggtcgatgctggctgcatgagtcgcagaggcaggccggtgcatgttgttggggacctttcagcgtaccagtcatcggccttgacattccggtgcgcagcattgactagtcctagtggtacgaggcca

SEQ ID NO: 1048 - DNA, 546 bp, Homo sapiens
  Genbank Accession No. AI972498
aaaaaaaaggaattatttttatttgcattgggcatttttggcgattcagactgagaaatgatgagcccttttctgttgttgttttttagtagctcacatgggtgctctttagttctaataaaactccccatttttgttgaaatgaggagatttgtgaaccagaaacccaaaaaccaaaaaaacacccacacagctgtcttatacttctgtaaccatttctgaacttaaaactctcttgttcggtacacctcatttatttgcatcttaagttttagcttgtcaaagatcttttagtagctctaacatagcccactagctaagtcttgtaaatgtgtataagctggacatttggtaatattatttttaaaaaaggaaaaggaggaataggtatacttatttaatacttattgtgcaccagaggctaagtgcttgacttttattctctcatttgatcttcatgaccattctatgaagtgggtgttatcatcattcccattgtgcagataaagtggagggtaggaaagaaggagaagggtatggagcctt

SEQ ID NO: 1049 - DNA, 594 bp, Homo sapiens
  Genbank Accession No. AI972895
tagttttgggcaacactcattttttacatttattttgacatatttgagcttattccatattaacaattatttatcatgcttttgtaacacatgacagcatttttcctttaccaaactttttgtgtacatattttaatgcctgcataatcttccattacacggatatgccacaaatattatgctagtgtacattttttattttgcaaattatgcactgtcataaatatttcagtgatcatcctcatacatatttctgtcttcattacaagttagacccttaaggtgttaacaatagtaatattattaatggcacctactatgtgccaggcactcttttatgtgattcatacatatcatctcaatccacatgacaacgctttgaggtagatactagtagtaacctcattatacagttgaggaaattgagccacaggttattagcaatgttaagagccccagttaagtgactattctactcccttaatgaaaaccatttctgataggtatgttgtatgtgggcatggtgtgtacacagtgagaagagcagcaggaaacatgaaacccaggacctagttctgagtctgacttcactga

SEQ ID NO: 1050 - DNA, 475 bp, Homo sapiens
  Genbank Accession No. AI978581
  unsure (1)..(475): n = a or c or g or t
ggcaggtgcaaaaaggaaaacaaatttgcttgttttgtttctcagatgtcttttctgtcagagtgcatgttctaaaattagctgtggttgcttcttttcacttctttcacgcctttgttgctcttcctctgaagccactggtaaggctttttctgctctcaatgtctgtacattctttctttgtactgctcctttcacagcaggatcttccatttcagtgctaggcttcaaggaaggatgttttgcaggaggtccttctccttttccattgactattctgtttccttttccatgggaaggtccacgtaaaggctctgacactttcttggggacacactgctgtgctgcttgtccagggcgtccaggtctccgctcctgcgcgccagacagcgctccatctccgcggcgtcgcccttgacagctgccttgntggatcttctgcagttccgagtaccggatttcggtacccggaacc

SEQ ID NO: 1051 - DNA, 585 bp, Homo sapiens
  Genbank Accession No. AI978606
gcggccgccctttttttttttttttcacagtttttaaaaatcttttttaatggatgtcctaattgtacacagaacacaaacctatcttcacttctcaatgtgtaaatgtgtatctactaagtatacattaatgtgcattaaagacattcagaaaacataaaaaccaaagaaacatattaactgcataaaaatttaaagttgctaaatggtaaagcagctagaaattataaagtagggaaatgttgaatagctgacataaagattcttagtaagaacattttacattccaatattacaaatgagtacaatatgcaatgcatgaaaaataagccaattctgagatgttgaagcacctatcagacgtacaaatgacgagctacctggtctagatggaatgaagtgttagctttaaaatttgagttaatttaataacttacatcttcacccaggaagcatcagagctgaggaaataaacctcagcagtcaagtgttactaaacctcatagtttgaagatattactccgtgatgtgtggagcacagagtagctaaatagtacttataataaattggctatagttctaaga

SEQ ID NO: 1052 - DNA, 588 bp, Homo sapiens
  Genbank Accession No. AI978918
  unsure (1)..(588): n = a or c or g or t
gtttgacttatcttttaatatttagataagagatgatacttaacattcacaagttactgtaaatgctggggaccataagcatggggcaggccacggtaaagatcattttgaatgggcaagtctttcaatttcccttacatcacaccaagcaggcaaagcctaaatacagggcaggacttgcctatgtgatgtaccattccagccctccttttcaaagaaaacttgagcagggaccctgggataccaccagcgatggtgggactcccttttgcaatccaaataagcacgatctaaatgagtccaggttggagcagataaggaatggggttgaaaaggagatgtgttcttgaaatcggccaatttcatagcctggaggagacatttgtggttagctgagtcacactgccttgggattagccagctcttgctttctgttcaacaatanaaagtcttgcaaagctgctggcatgtgagacagaggtatccagaaaattttgcatcttttccagcggcataatgagtctttaggaagagacttgttagagcgtggtccatgcactctaccaccggagaaaggtcatgttcaca

SEQ ID NO: 1053 - DNA, 490 bp, Homo sapiens
  Genbank Accession No. AI979079
ttttttttttttgtcgtatattcaaatttatttagatgaatgtccagccacagtcctctgtggatttgtgtacattcactttttaaaaaaatggtttccataaaaggatttttggtaattgcctaatttttaatacagtatttatatacaaaacccacttcaaactacttactgtacaagagaaaagagaagcatcagattgcatgattttagcaaataatggaaatgtacgacacctatgaactttgaccacagttggcagattaaagggaatgtaacatcacatcaatgagatcttcaagacaaatttatttctatttttcctcctggcctttgctaaaatgatgtttctcttggtgcttgagaaatttcagagagttgtttagtatcattgctgcaaatttagatcactcatatcatttatgagacttggttttatacacttttaaaataattgtccaacagtgacattcctgtgagtaaaaatata

SEQ ID NO: 1054 - DNA, 494 bp, Homo sapiens
  Genbank Accession No. AI979134
ttttttttttttttgtaaagacagggtctcactttgtttcccaggctggtcttgaattcctggcctcaagcaatcctcctgccttggccttccaaagtgctgggattacaggcatgagacactgcacccaacctataaagggcagattatatagggtttattctcagatttgaaactatttctaacttaaagtagaaaacatttggaaaagtgtttagaaatatttttgcattttcttaacagtgcttatcaatatacatagttatctactagttccttttatcagcattcaacttatgtagaggtagaagttaaacatacagtgttatttagccaacttcaggtaaactcagtaaattgttagattaaagccattttgcctcaaatacttattagcctgactagtttggggctgtcagggatcatccaaattaaaaatccaactaaaattctgcagctctacacaactatgcagacatagattgaaaactgtg

SEQ ID NO: 1055 - DNA, 226 bp, Homo sapiens
  Genbank Accession No. AI979240
aggacttgagctgcagagcactgagctttatttacaaacttccacagaatccctcaccctccaccccagggtcctccctctctggaactcaggcagcagacaagcttgggtccacccacctgcccaacctaggacagctgggcctgagctgggcgggcaggggattccatctcctgggtgcgcctgccagaggggagaggctggaggcggcgggaatgctgttctc

SEQ ID NO: 1056 - DNA, 809 bp, Homo sapiens
  Genbank Accession No. AI979261
  unsure (1)..(809): n = a or c or g or t
tttaatgcatttgaatctttattctacaacacaagcaacataaatacaatatcttttaaaatattttctctttagaattttcatttccacctcagataaaatgtacacaaaatacacttgcaagcttgcttacagagacctgttaaacaaagaacagacagattctataaaatcagttatatcaacatataaaggagtgtgattttcagtttgtttttttaagtaaatatgaccaaactgactaaataagaaggcaaaacaaaaaattatgcttccttgacaaggcctttggagtaaacaaaatgcttcaaggctcctggtgaatggggttgcaaggatgaattttgcattttataggtaaaatggtatactgactcaaatcattatggctataacaagcttcatttatttataatcttcaatgaaaataagttgattctttggcataatactataaggaataaaaggacccataccacccactggctntatctagagtgggagatagtagtagggggactgtntataatgtaatttggctaagttattcctcctagaaaagcgggaaaagcatattgggatatagtctcttagcatgattaggggcataaacatcttattcttatctgtcccattcccacaacacaacactaagaaacanaaataactttttcctttaaggcacctctccttgcccatcatggcacaaccctgatattctatcacatggttcaaactgagtgaaacccaactatcaaaagcatccaactttggtaggtttggcccatttggggggaaacaattttatt

SEQ ID NO: 1057 - DNA, 292 bp, Homo sapiens
  Genbank Accession No. AI982768
ttttttttttcaagaacccaaaggcttttatttttattttttcaaaatagaagtaccttttttccttttattatacaagtaacatacttacggtcaagtcagtcaaatattacataaatttatcatgcggaaagggaaaatcacctataacccaattcctcagagataactgctatcagaatattatttcagagttctgctatacacaaatacgcaggtttcaatgggtacttccagggaccgcatggagatcccttaagttgaaactggacaaacagaacaggggatggtt

SEQ ID NO: 1058 - DNA, 497 bp, Homo sapiens
  Genbank Accession No. AI982832
ttttttttttgcagtttctaagtcattaccttatgtgtattattcatactagtaatattggtaaacattagtgatacaattttcactaccaaaattttattatatttttcttagccaatacatggagcaaatttttataaagtatttcttgtcaaatcattgaattcctcctccccaacctttaaattccctagtcgccaagaatcttgggttccacaccaccactctttgcttctgttttaaaggttgtggccctttgagcagggggacacttcatggtcatttatgttatctagtatcttgtgggatgattttagtattcattcaagcattgacaacttttcatgttgattcagattttataagatttgattacagtgagtttataaaatatttcagttatatatgcaatagaaacgaagtatcctattttggaagataagtctaaggcattcacagcaataaaaaagaagtgctttagtatttctggacttcag

SEQ ID NO: 1059 - DNA, 456 bp, Homo sapiens
  Genbank Accession No. AI983033
tttaaccaacagtacacttttaattaaggacctgtagctgtgcaggatgcaaacagctgggcatcagtgactttcctcctgcccccggtttgtccctgatggtggcagaagatcccagctgaccacggcccctttctctggggtcagagggagaagacaggcgcagtcagcaggggcagctgttgcaggtgggagggatattttcccacaggaacaaaggtctccatgatgataccggggtctctatagtcatgttgagagcctaatggcccttggcataattgctggtgtcggggtagaaggtgtcttggagtttgctcaagtggttgagagggagggaggtgccatagacttggaggaactggcacgaagccaaggatacaaatccaggcagggctatggggcaggatagagagcagggccttctactgaaggagtgactcaggaaggaggagg

SEQ ID NO: 1060 - DNA, 504 bp, Homo sapiens
  Genbank Accession No. AI983437
tttttacatgtatacactttgtgtttaattttctatggcataagtaagcagtttttatgaattgctggtattgcttatgagcaattattacaaacattgagagaagggaacccctgtgaacctttaacatttctcaggagttagtggtaaacccatgaacatgtatttttaaaccaaattacccacctcttggagttcaatctctgttaattctttattaaagtagtgaagtatcagttgttccaatgatataatgatcaagcaaccctggaaattaaatcccaaagcagtgcacctttagtttgttcagtgatagtaggacatcccacgagccatcatatattttcaagtttttatactcaatctactttttcagcaatcttttgggaactatcccaagataatttactgcataagtgcatctatcttctaaaagacatttggaatatttcttagtctgacctctgcaccctgagacactctataaaggaaacaatcagaaaa

SEQ ID NO: 1061 - DNA, 482 bp, Homo sapiens
  Genbank Accession No. AI983615
tttttgctgccaaaagcctttaatatgccctggtcccaggctgtgttcatgaaagcggacacagcagtgcttccagcttcatggttcccaggttcaggttcctcccagcggaggtgggagggcagccctcacacctggcacccctgagtgccatactcctggaggaagtcgttgagctgggcacaggctgcccgctggcgggtgctccggcacaggcgttcagagggcatctcctcgatccagctattcgagtccagcaggtactgggggtgtccctcgaggtcataggtggccccatccagacccatgatcaaatattctttcccaggttccaagcgaaggcggcaggaggctcgaaccaggaagttgcgcatctgattagcagcggccttgacatccttggtgaagtgcaggacttgggtgatcttggtctcaaagaggcggaaagcagctctgctgtcttctcggagaaccttaacctg

SEQ ID NO: 1062 - DNA, 610 bp, Homo sapiens
  Genbank Accession No. AI983633
  unsure (1)..(610): n = a or c or g or t
aaaccaaacctgctttatttcatttttttcccaatttatttaaacatctcacatttccaaaatagggcccatttaatttttttgcttgcccaaaaaacaaagcttttggggaaccctggaaaaaaatgaaaatgaaactggcaaaaaacaaatgctgaatttgaaaaagatttggggcaaataatctgcttccttttaattgggaataagatggaaaatatgaatgctaaatcaaattttttaaaaaataccccccccgatacaactcaatacaggagtttttcttctcaaattcttctagccccctcaacattcttcaagtttctgaaatactattaattagcccctttgttttatgaacaaaacaaaacaagggcctcagttcatttttgtctagggcagcccctaacaatggggatcacactcatgggaaagtgttttgagggantttaaacctttggaagtttgggttttaaacttccctctggggaaaatatttcaaagcccccaggggggcaaatgtttatgggtgtttattttcaatttttattttggggtcctaccaagggtgacctttctcctaacgggtggacaagggtgaaaaaacaat

SEQ ID NO: 1063 - DNA, 498 bp, Homo sapiens
  Genbank Accession No. AI983929
gttaaatacacagaaaattcaagtaatttatttaaaaactgctttagtttcatcttgaaatatatatacgtgtatatatatatttgctctagaatgatcatattgcagcatgattctcatgcatttcaaagtactttatttaaaaaacaacttgaggcagcaaaagtattaattacaattgtctgactttatctgtgtgatgtgcggggcctccctgtctcctgatctcagtaggcctacaccgaccgtttcaaataggcttagttctaaagagactgtggtttggaaaacatttccaaatagctgcagtacttgcccgagttttgcttattcgttgaaaccagaacgactgtgcggagccctccggtgacacgggccttagctgtcccagacgtctgcgtccctttgcacctgtcccgattccagcgtcgagcaggtgagcaggcgaggaaggcatgaagttccgacaggttccagcacgcatgtccccttcgcaag

SEQ ID NO: 1064 - DNA, 614 bp, Homo sapiens
  Genbank Accession No. AI984074
ttcaatttgagagcaggtactgtttattaaccaaccagcttagaaaaataatcatggtagacacctgaaaggaaaaaagaaaaccattagaaaacactttaggcagctaacaattaacataaactaggcagttataaagtaatgattgagtttacatttttaagaccacccaatttccatctttaaagactccccaaaacaggcttttcctttcctccagaaaggtcctcaaaagcacgtaaacaaacccacctgtaatcattaagatagttgacccccactccccacaaaagcactgattaaaattcaaacccccatcaatatttaatgggaaaagtattcaagattaccaccacttatactctaacattaactcaacctttctcaggatgaggtctctcaccttagttcattcttctaataagcctgttgatctggtcctccctgttgccagcatctccaccttctacaaaatgggtggtctttttcttcattccacctcgtggagaagacaatttgaagggccacaggaagttatttgcctcttttgagcgttttccaacagtatagatctcatgaatcaaatcctccatgcagatgatgccgtattaacc

SEQ ID NO: 1065 - DNA, 436 bp, Homo sapiens
  Genbank Accession No. AI984156
ttttttttttttgaggctctgagggtttattgtctgccccagtgaggctcctgggcttcctgggaggaactgggggaggaactgggggctggtcacacaggtctataggtcccattgtagctaaaagggggaggcatcgagcagtccctgtcctcagggatccagcgctggacgtagttggggccgttgtcccgaggccacacgatcacagtgtctctggatgccagggaggggtcctctgggaagaagttgaatggccggagcaggaagcccacggagttcccaggtgtggctgtgttgggaatgtcctctgagtgggggatgtgcaggaagcccaccgtcacccaggccaccaggtcctgcaggagacagggtgggcttcagtgggcagggctgagtactgaccactggaggccactctagcctttggtcattt

SEQ ID NO: 1066 - DNA, 486 bp, Homo sapiens
  Genbank Accession No. AI984261
  unsure (1)..(486): n = a or c or g or t
gaactctgaactttttattggcctcctgctccccaaagggtaccctgcttctgctggcttaatgcctcagaactttggtgtcattggtctcagacaccactttgccatccactatccggcgggtggtggtcttttggatggtttgcatggagttgctgctgtccaaggcatcaccaagactgtaacagaagaccaagcccaagttataaacagccccgtggagtagaagggagacaagaaaggtagagggaaaaagcctcctgacctctacctttatctccaaatcaccctcagcctcttcctccagaaaagggaaactcaaggccaaacttcatttgcatactaagtacagctagggacaatacttagtttgctttcttcaagggggagacctctgtaactgttactcccttgaagacacaggagcacccacggagcaacggcccagtgctcagtggataccagtgaacagacacatggngtgct

SEQ ID NO: 1067 - DNA, 814 bp, Homo sapiens
  Genbank Accession No. AI984786
  unsure (1)..(814): n = a or c or g or t
agcttgaaacaataaatttattcccatagttctggaggccaggaagtccaatatcagttttatcggtatctgtagggccatgctcctgctggaagaggctctggggaagaatctgttctttgcctcctccagcttctggtggctgtcagcattcctttgctgcggctccatcactccaatctctgcctctgtggtcactgtgctttctcctcttctgtgtggtaatatctccctttgcttctgaagttcagagtgttctttcaggagttgatcatattctttcgaaaggttctctttacgtgattctcatttccatcacatcantttgtgccttagaaagggcatctgaagtcttccttaattcagttttcagtttctcctggtcttctactagttttttattttctgcttccaaaacacattcttcatctttaccatggcttttcaaaatcctttttagtttttcgttttcttccataaattttttggcagccttgttagtattttctgcttgagttttaagtacacctttgtttgacagttcttttgccagttgagtaataagcgtaaccagacgtctcaaaactagccaaaaaaatagggaaaatccagaaatgtnaagatttctttgagacctaaaaagtttcatctgtgtgtgttcataggcatcaagtctgctgtggagctcttctcatggtatgaactgaggatatttncttactgctctcacgcatctagaatagaacatcaatacgatgataatggtaggaaagcctgttccaaaagtgcaatntacccagacattaatganaaa

SEQ ID NO: 1068 - DNA, 486 bp, Homo sapiens
  Genbank Accession No. AI985612
ttcaacctatacaatttattttatttttcctataccttggctaaacaaaatatatttggtgatactgtaaaatactaagcattttcagtaaaactggcaatcaaatacagcttaaccttcttctgcgtgacaactgaggattttaattggaaaagtattatagtctataaacaggaatacccaaaacatatttaaaccactcgagcactttgatttttccatgttctttacatctagattgaaaccacttacaggaaatttcaaagaccaacggctgaatatttttcatttcaacatttccagtggcatcctacaagagaactagcactcacaatgagtcatctgaattttctttaaatcgtaactcatttttaatttctaaacaggttttacctccttatcttcagaatctcctccttccaatagccagtacagtagctccattatgaattgcagactttgcagaccagccttgggatgaatttc

SEQ ID NO: 1069 - DNA, 645 bp, Homo sapiens
  Genbank Accession No. AI985619
tttttttttttttctcatttaacttttttaatgggtctcaaaattctgtgacaaatttttggtcaagttgtttccattaaaaagtactgattttaaaaactaataacttaaaactgccacacgcaaaaaagaaaaccaaagtggtccacaaaacattctcctttccttctgaaggttttacgatgcattgttatcattaaccagtcttttactactaaacttaaatggccaattgaaacaaaccaggtctgaaacccgttttccaccactgattaaaagtggggtggcaggtattagggataatattcatttagccttctgagctttctgggcagacttggtgaccttgccagctccagcagccttcttgtccactgctttgatgacacccaccgcaactgtctgtctcatatcacgaacagcaaagcgacccaaaggtggatagtctgagaagctctcaacacacatgggctgtccaggaaccatattcacaatggcagcatcaccagacttcaagaatttagggccatcttcccagctgttaccagaacggcgatcaatctttttcttcactcaacaaactggcatgccatgtgagccgtggtgccatccattacggggcatagccggcccttatttgggctg

SEQ ID NO: 1070 - DNA, 539 bp, Homo sapiens
  Genbank Accession No. AI985652
taacgtaaacacaaagtctcatttatttttgtctgaagcacacaggagctcactcagcacaataacagtaagcgaatcatacaaatattgagaaaaaatgttcctatgaatacatacatgtatattcttaagagtagcgatcaggagtttaacaacaaatgtaaagtggttttctctaaagaatgctttctgacaggcttttgggttggaaatggacaggtaaatcactgtcacataacaggtaagctaaaaataacttctgttacccaagtcattgaacccctgtgactgtgaaagccctcttgaatttacatttaattccatcattggtctggttgacttccacatttcactaaatttggacaagatccacaaagtaactcctcaactctcagtctttcacactcaggtctgtgggaaggaaaggcagtgagaccaggtgtgaacacatgcacggagaccaatgttaggattttctaacagtatccttctgtttctgcacttgcaaagtcatacctaaactggctagtatatctgaa

SEQ ID NO: 1071 - DNA, 407 bp, Homo sapiens
  Genbank Accession No. AI989468
  unsure (1)..(407): n = a or c or g or t
ccgggccccacccgaccctctttagaaaaaataaccttctagtgaagatgcggtgatgcttagcacactcagggatttttttcaggacccattggatcctcaaaactccccgaattttgatactttcccagccgggcgctgattcgtcacggcgaagagggccgaggaggcccgacctaacacagaataggcctgggtttagcggctgtgaggagccggagccgccgcagcgaccgaggaagtggcgggaggtgccgagccttgcggaggggcggtgggggccgcggtgggagacggcggatggcgctcancgcgaggccgcggaaccactgtggcagcaagcagttcggccagactcccgctgagcccgctcctggaggggccctccccgactccggtcttgcttt

SEQ ID NO: 1072 - DNA, 380 bp, Homo sapiens
  Genbank Accession No. AI989698
tttgagagtggcgaagctgccgggaaggaaggcaagcgtgttttcctggagccaggcgctgggtggcaggacaccgtgttggggggtgcccagtgggaggtggtgtggtctacacccagagaactaaaggggtgaccgcagtcactgctccctaaagccctctgctctgcacctcccgccacagctgggtgggcagtcagtgtggcctctgtccaggtggtgggggcatccggggaccaggtgggggcgcacgcaggagcggtgcgtttcaggctgcaggtgccgtctgcccgtctcacttccggcctctccactgtgctggacaccctctctgagcagctttgctggaaagagcggagagcctgctgcaaaccaggcac

SEQ ID NO: 1073 - DNA, 554 bp, Homo sapiens
  Genbank Accession No. AI990027
tttaaacattagatctctaattttaatagttgagaggaaggttataaaataaaacagacaacacagagcttcatgacggcctcggattggcagtcaacccagggatacagaaatgtaaacaaaaacagagcttccagataacattactgtgtgctatgtgactttcagaatacagcagcgtcccagacactctaaagtcaagtgaaacaagagattttagaatcaatctatacacatttcagagggcagtccaggaaggagccttcctctcaggtcagcccagggctgggcctgagcctgagcccggggacgtgtagacactacccattttgggcaggggaggccaaagtggttctgcttcaggtggggtttggctttaaggggctgcccagctggctgtgttctggggacctcttttgcatttgcctctggcaggctggctctgacccctgcctgtttttccctttggcccacaagacgcacacctctttacacccagaacccctttcccagctgcagcaagggagcaagggagccagccagccagccaggac

SEQ ID NO: 1074 - DNA, 445 bp, Homo sapiens
  Genbank Accession No. AI990292
tttttttttttttttttttttgagctcacgcacttttctatttctgccaccctggccgatgacattgcccctaaccccccagggggtgacagagactggtactgtcagtggccgtccaaagatgccgtcccaagaggcggtggactggcccgctccatttgcagagtcggtcggagccacgggaagatcttgagatgagctttaggtttggcgggcgcagtgctgaccgctgtagcccccttctgggagggtctcgtactttctggaaggagacaggggtcccagaaaggggcactccccagctctcctctgcatccagggtaggctcctggctcaccttccaatgggtgggtgtcctcttagaatttgcaaggaggatgagaacccttctcgggcaaagcctgtgcaggttgcccttcctccgtccttcccaggcagagtggct

SEQ ID NO: 1075 - DNA, 481 bp, Homo sapiens
  Genbank Accession No. AI990405
ttttttttttttttaactgctgccaccaccatgaaagagtggccaccacatctttattgcatactcaggtgaataacttattatacaatgaacactcctccattaggagaccatgcccacttacagaatgcagccgtaaatgcggtaaatctatttacagaggttggggtgcaagatgagagaagtatcagccccaggaatttgaagtgagaatgatctacaaattctcctgacaaggagcaaccgggcttgtgctagtgaggtctgaaagaattcctggcagagcgtagggggagattagatctcggaattgacagaatcaaagaagcaacctcatcaccagtctccccattactactcctatggcagatgttatcgatctacagtctggtcctgtggcctaatactaccgggcctgaagataatactggaatgcttcctgaagcaaccacagctggcaaagtttaaacctgcctgcctc

SEQ ID NO: 1076 - DNA, 497 bp, Homo sapiens
  Genbank Accession No. AI990471
catttccaggctgtttggcacacagagacatcaaaaaacagacagccaatacatttagaacaagcctttctccgagggcggcccatggatggactggcctcccagacctcccaggtggctcatcagtggggggattgcggggcagcgaccccatcaccgcacccctcagcagtgcctgggctcacctttccacccacctccccacacagccagaggcaggccctcagccgcaatcagtaacattcagtgaggacatgtgtttatcatgtgttgtgggtgggtgcagtgagttctctattcaggtaggagtggaagctggctcagggctcatccagtccaatgtcccacaggtatagaagtgccctgataaaatctcagagctggctgtccagtcaagatttgcatacctccagaaatggggctcttactacccctcacagtagcccattctactgttgggcacctccaatggtcagcattttctttccggcagcctc

SEQ ID NO: 1077 - DNA, 445 bp, Homo sapiens
  Genbank Accession No. AI990633
atgaaaaaaatattttattccaaaacactgtttacacaaatgtgtggtctttgtacaaagtacaaaaaaacccctcttctcatccccacctcccttcagagaagtttaaaccttgggctctcaatcttccatggtcagctgcccctgactgcgagtcctacagcctcagagggaggagcgtgtggggttgggagcaaggcctcaccagaacacagccagttacgcaacagcgcaaaggcctgctccaggccccacctccagcggagtcaaaccagatcagcttttacccctcactccagattccacaggcacgcagcacatggctgatttgcagcttgtctttcactgcagttttttgtttttgttttttccaggaggcaagaggaccaaccctccaagtcccggggcccctgtccacccaccatatcctagacccaatcttttc

SEQ ID NO: 1078 - DNA, 549 bp, Homo sapiens
  Genbank Accession No. AI990825
tttttttttttaaaggttcttttttatttgaaatctcatccagaagcacgggttattaataaatatatcatagttatcaagaatatataaaaaataaagacaggtatcgtctttgaggccctaacaaaatatttcaagcaaatgttcaggaaaataaaaacggcacccctcccaaaaccaggataagttttcaaagctgataatagagagagccaacccccgcatgcagaataactgagcgagggggggtggcgcaagctactagagggagcccaggcttttacaatagcggccccagaacagcaaaggaaggttccgaataaagtttgaagggggtgggggtgggagaagaagcgtatgcgtgagtgtgggtctttgcactctgccccttttttcatttcatacaaccacagacagatatatggagtacttgggataattcactaataaatccttgttacaaggaaaacggcaccacagcctgcacgacatattcagacaagattcatttagaagcgtgcatgcattcttttgacctacactgcgtcg

SEQ ID NO: 1079 - DNA, 534 bp, Homo sapiens
  Genbank Accession No. AI991041
ttttttactgaccccccaatcctttattagagatgagtgaaataacaagtctgagatgaatgaaaccagacactgggggctcaaaagacaaccctgttcctgtgggaaccacagaccagtcaggtctccaggggaaacagcacagcctccccagccaggcagctgtgttggccattggtgctctctagtctcccctgcttggcttggcccattcctgccagggcccagcacccagcaactggcaagttgagatgttagtggttgatgatggcttaagtggttctgctttctcatgggggctagcaatgatagaatttctaggctgggaagcagaacccttaagtctctgccctcccaattctattactctcccttctttctttgcctctccattccctcagactaaaaggctcctgagttgaccaagagaaagagaagagaagtgggcatccatcaaccccgactattcctttccttcctgctaaatcaaggacacaggcaaatgtgggtgcatctgactctacaatttggctg

SEQ ID NO: 1080 - DNA, 429 bp, Homo sapiens
  Genbank Accession No. AI991048
  unsure (1)..(429): n = a or c or g or t
tttttggtataaaacaaacaggtgctttatttcatcatcagaaacctggtgcatagtttaaaaaacaaacagaagccctgacagccttggagtgctgcagctcggagtcactgaaggagtaagtaagtctggaggagctgcctgagcttcctgcttaggggccggcccccacccacagggtctccctggactggcggggggtgggggtcaggcantgggcaggggcctgacctaggctcccactctgcctggtgcccacagcctgggcacagaggctcaacttactaagcctttgagcggttgtgcggggtaacttagcttctgcaggaggaagaaggggaacaaaaagagccctgaccacgtggtgaaacaggcctgtgccccggccagccagtacactgaagcggccaccaggggccctgcggtcct

SEQ ID NO: 1081 - DNA, 832 bp, Homo sapiens
  Genbank Accession No. AI991109
cgaagtaacaaaataatttttttaatcgactgtagtgtttcttcttcccgttagaagtagtttcttgttcccctcatggtacataaatatcagagaaaagtagtctttgaaatatttacgtccaggagttctttgtttctgattatttggtgtgtgttttggtttgtgtccaaagtattggcagcttcagttttcattttctctccatcctcgggcattcttcccaaatttatataccagtcttcgtccatccacacgctccagtatttctcttttgtagtaatatctcatagctcggctgagcttttcataggtcatgctgctgttgttcttctttttaccccatagctgagccactgcctctgatttcaagaacctgaagacgccctcagatcggtcttcccattttattaatcctgggttcttgtctgggttcaagaggatgtcgcggatgaattcccataagtgagtccctctcgggttgtgctttttggtgtggcacttggcaggggggtcttgctcctttttcatatcaggtgactctgcaacaggaaggtgactggtggttgtcatggagatctgagcccggcagaaaggtgtgctgtccaacaaatctactgtgctaccgatagttgtgtcatatgaatagatcgcgtctttcaggtgttcatgatggaaggctcattgtgttcagcttcgaaatgacattgagtgttgactggaaacagtcgatacgtgcactggccgggcacttgatatgctggatgttggtgtagagtagtgtcccgctatgactgccgccggctgaaatcttcacatacgtgtgcagagt

SEQ ID NO: 1082 - DNA, 300 bp, Homo sapiens
  Genbank Accession No. AI991395
ttttttaaccagcagacagtttttgcttttattggtcaagaattctttacaaaacccacacacacacatccacacacacacacacacgatgcctgccctgctgtggtcactctggccctggtgtctcctgggatcaggccctcctggcctctcccaggggaaaccatcctgcagcccctctgggtcagcagtgaaggagcagagagagggaacctccttttctgcttctctgctcaggaacagaggtctgtgccccacctgtcggggagcaagtggaggtgacagagaaacagcatcctc

SEQ ID NO: 1083 - DNA, 290 bp, Homo sapiens
  Genbank Accession No. AI991501
ttttttttttttttacttttttaatatatatttttataaacaggtcacgtgataaaatagcacaagaaacacttaccaaatataaggttatatcttccgcatatacaggagaatgaggtcgttatgtacaataagaaaatgattttaggggttggttggttttgttttcctctctccccttaatttttcctcctacagtcgttggaaatatcacagcttcagttgcattaatactttgggcaaatggacagctgcccctccccactaggggttgtggggaggaggggctg

SEQ ID NO: 1084 - DNA, 388 bp, Homo sapiens
  Genbank Accession No. AI991817
tttttctgaaacatttctctaaaactttatttcaaagttattcacctcaccgttaataaggggtatgattaatgctctgtgccagtatttgcaggcctgcccattgccggcaatggactttgaaaaaacccatttcctggcacccaaaagttaaattactcttttcaaaacataccgatctccccaacacttgcaaaagtattacatgcaccattttgccaccattctttaaatcagaacttacattattaatctacatcagggaatgttaaatgaagtcattttaacaaattatgactgtacaaatcaaaatactactagttaatattagacaagagtatcttacaaacactactattacatattaccttgcaatctgaaacattat

SEQ ID NO: 1085 - DNA, 762 bp, Homo sapiens
  Genbank Accession No. AI992172
  unsure (1)..(762): n = a or c or g or t
gtaaaaacttgtttttaattttgtataaaataaaggtggtccatgcccacgggggctgtaggaaatccaagcagaccagctggggtggggggatgtagcctacctcgggggactgtctgtcctcaaaacgggctgagaaggcccgtcaggggcccaggtcccacagagaggcctgggatactcccccaacccgaggggcagactgggcagttggggagcccncatcgtgccccagaggtggccacaggctgaaggaggggcctgaggcaccgcagcctgcaacccccagggctgcagtccactaactttttacagaataaaaggaacatggggatggggaaaaaagcaccaggtcaggcagggcccgagggccccagatcccaggagggccaggactcaggatgccagcaccaccctagcagctcccacagctcctggcacaggaggccgccacggattggcacaggccgctgctggccatcacgccacatttggagaacttgtcccgacagaggtcagctcggaggagctcctcgtgggcacacactgtacgaacacagatctccttgttaatgacgtacacacggcggaggctgtagaacagacctcgttgagacactgtttgcaaggcctgtgtatggaatagaagcgggttgcacggtactgttncttacggcagacaagaagtccaagcttttgggctccaactatacatttactgattctgggtaggggcttggatgcttcctgttgcacttgttc

SEQ ID NO: 1086 - DNA, 2001 bp, Homo sapiens
  Genbank Accession No. AJ000414
ggccgcggtggtggctgcggcggcggcggcgggagcagcatggattggggcactgagctgtgggatcagttcgaggtgctcgagcgccacacgcagtgggggctggacctgttggacagatatgtaaagttcgtgaaagaacgcaccgaagtggaacaggcttacgccaaacaactgcggagcctggtgaaaaaatatctgcccaagagacctgccaaggatgatcctgagtccaaattcagccagcaacagtccttcgtacagattctccaggaggtgaatgactttgcaggccagcgggagctggtggctgagaacctcagtgtccgtgtatgtcttgagctgaccaagtactcacaagagatgaaacaggagaggaagatgcacttccaagaagggcggcgggcccagcagcagctggaaaatggctttaaacagctggagaatagtaagcgtaaatttgagcgggactgccgggaggcagagaaggcagcccagactgctgaacggctagaccaggatatcaacgccaccaaggctgatgtggagaaggccaagcagcaagcccaccttcggagtcacatggccgaagaaagcaaaaacgaatatgcggctcaactgcagcgcttcaaccgagaccaagcccacttctatttttcacagatgccccagatattcgataagctccaagacatggatgaacgcagggccacccgcctgggtgccgggtatgggctcctgtcggaggccgagctggaggtggtgcccataatagccaagtgcttggagggcatgaaggtggctgcaaatgctgtggatcccaagaacgactcccacgtccttatagagctgcacaagtcaggttttgcccgcccgggcgacgtggaattcgaggacttcagccagcccatgaaccgtgcaccctccgacagcagtctgggcaccccctcggatggacggcctgaactccgaggcccgggtcgcagccgcaccaagcgctggccttttggcaagaagaacaagacagtggtgaccgaggattttagccacttgcccccagagcagcagcgaaaacggcttcaacagcagttggaagaacgcagtcgtgaacttcagaaggaggttgaccagagggaagccctaaagaaaatgaaggatgtctatgagaagacacctcagatgggggaccccgccagcttggagccccagatcgctgaaaccctgagcaacattgaacggctgaaattggaagtgcagaagtatgaggcgtggctggcagaagctgaaagtcgagtccttagcaaccggggagacagcctgagccggcacgcccggcctcccgacccccccgctagcgccccgccagacagcagcagcaacagcgcatcacaggacaccaaggagagctctgaagagcctccctcagaagagagccaggacacccccatttacacggagtttgatgaggatttcgaggaggaacccacatcccccataggtcactgtgtggccatctaccactttgaagggtccagcgagggcactatctctatggccgagggtgaagacctcagtcttatggaagaagacaaaggggacggctggacccgggtcaggcggaaagagggaggcgagggctacgtgcccacctcctacctccgagtcacgctcaattgaaccctgccagagacgggaagaggggggctgtcggctgctgcttctgggccacggggagccccaggacctatgcactttatttctgaccccgtggcttcggctgagacctgtgtaacctgctgccccctccacccccaacccagtcctacctgtcacaccggacggacccgctgtgccttctaccatcgttccaccattgatgtacatactcatgttttacatcttttctttctgcgctcggctccggccattttgttttatacaaaaatgggttttttttttttctttaatatatttcaagagatttttttttttttttttttt

SEQ ID NO: 1087 - DNA, 171 bp, Homo sapiens
  Genbank Accession No. AJ005835
ggggattataaaactaatcatcaaagccaagaaggcaagagcaagcatgtaccgctgaaaacacaagataactgcataagtaatgactttcagtgcagattcatagctaacccataaactgctggggcaaaaatcatcttggaaggctctgaacctcagaaaggattcaca

SEQ ID NO: 1088 - DNA, 1772 bp, Homo sapiens
  Genbank Accession No. AJ009985
cgctgagaggctgagtggagttcactcacatggattgaggcccagttcctgggagaagagatgctgggcaggaaggtgtctgcatgtgggactctgtacagcccggtcctctcccacatctgggaggggccagagtcagacaactgctgggttcgtccctaagagaggtcatctgactggctgttcagcctaggctgcacacacccccactttcctctaccaggccacaccggagcagtgctcacacaggcaatctaccaggccacaacaacgacacccacctcacctctggcacctctgagcatccacgtacttgcaagaactcttgctcacatcagctaagagattgcacctgctgacctagagattccggcctgtgctcctgtgctgctgagcagggcaaccagtagcaccatgtctgtgactggcggggaagatggcaccgtccctcacccaggagatcctcagccacctgggcctggccagcaagactgcagcgtgggggaccctgggcaccctcaggaccttcttgaacttcagcgtggacaaggatgcgcagaggctactgagggccattactggccaaggcgtggaccgcagtgccattgtggacgtgctgaccaaccggagcagagagcaaaggcagctcatctcacgaaacttccaggagcgcacccaacaggacctgatgaagtctctacaggcagcactttccggcaacctggagaggattgtgatggctctgctgcagcccacagcccagtttgacgcccaggaattgaggacagctctgaaggcctcagattctgctgtggacgtggccattgaaattcttgccactcgaaccccaccccagctgcaggagtgcctggcagtctacaaacacaatttccaggtggaggctgtggatggcatcacatctgagaccagtggcatcttgcaggacctgctgttggccctggccaaggggggccgtgacagctactctggaatcattgactataatctggcagaacaagatgtccaggcactgcagcgggcagaaggacctagcagagaggaaacatgggtcccagtcttcacccagcgaaatcctgaacacctcatccgagtgtttgatcagtaccagcggagcactgggcaagagctggaggaggctgtccagaaccgtttccatggagatgctcaggtggctctgctcggcctagcttcggtgatcaagaacacaccgctgtactttgctgacaaacttcatcaagccctccaggaaactgagcccaattaccaagtcctgattcgcatccttatctctcgatgtgagactgaccttctgagtatcagagctgagttcaggaagaaatttgggaagtccctctactcttctctccaggatgcagtgaaaggggattgccagtcagccctcctggccttgtgcagggctgaagacatgtgagacttccctgccccaccccacatgacatccgaggatctgagatttccgtgtttggctgaacctgggagaccagctgggcctccaagtaggataacccctcactgagcaccacattctctagcttcttgttgaggctggaactgtttctttaaaatcccttaattttcccatctcaaaattatatctgtacctgggtcatccagctccttcttgggtgtggggaaatgagttttctttgatagtttctgcctcactcatccctcctgtaccctggccagaacatctcactgatactcgaattcttttggcaaaaaaaaaa

SEQ ID NO: 1089 - DNA, 2727 bp, Homo sapiens
  Genbank Accession No. AJ011896
agtgagccgaggagccttcatagggacagccgcccctggtgcacacaccctcgtattctcctgcccttccccagccaggcgggcaccacggcaggggctgagctaccctcatggaagggagaggaccgtaccggatctacgaccctgggggcagcgtgccctcaggagaggcatccgcagcttttgagcgcctagtgaaggagaattcccggctgaaggaaaaaatgcaagggataaagatgttaggggagcttttggaagagtcccagatggaagcgaccaggctccggcagaaggcagaggagctagtgaaggacaacgagctgctcccaccaccttctccctccttgggctccttcgaccccctggctgagctcacaggaaaggactcaaatgtcacagcatctcccacagcccctgcatgccccagtgacaagccagcaccagtccagaagcctccatccagtggcacctcctctgaatttgaagtggtcactcctgaggagcagaattcaccagagagcagcagccatgccaatgcgatggcgctgggccccctgccccgtgaggacggcaacctgatgctgcacctgcagcgcctggagaccacgctgagtgtgtgtgccgaggagccggaccacggccagctcttcacccacctgggccgcatggccctggagttcaaccgactggcatccaaggtgcacaagaatgagcagcgcacctccattctgcagaccctgtgtgagcagcttcggaaggagaacgaggctctgaaggccaagttggataagggcctggaacagcgggatcaggctgccgagaggctgcgggaggaaaatttggagctcaagaagttgttgatgagcaatggcaacaaagagggtgcgtctgggcggccaggctcaccgaagatggaagggacaggcaagaaggcagtggctggacagcagcaggctagtgtgacggcaggtaaggtcccagaggtggtggccttgggcgcagccgagaagaaggtgaagatgctggagcagcagcgcagtgagctgctggaagtgaacaagcagtgggaccagcatttccggtccatgaagcagcagtatgagcagaagatcactgagctgcgtcagaagctggctgatttgcagaagcaggtgactgacctggaggccgagcgggagcagaagcagcgtgactttgaccgcaagctcctcctggccaagtccaagattgaaatggaggagaccgacaaggagcagctgacagcagaggccaaggagctgcgccaaaaggtcaagtacctgcaggatcagctgagcccactcacccgacagcgtgagtaccaggaaaaggagatccagcggctcaacaaggccctggaggaagcactgagcatccaaaccccgccatcatctccaccaacagcatttgggagcccagaaggagcaggggccctcctaaggaaacaggagctggtcacgcagaatgagttgctgaaacagcaggtgaagatcttcgaggaggacttccagagggagcgcagtgatcgtgagcgcatgaatgaggagaaggaagagctgaagaagcaagtggagaagctgcaggcccaggtcaccctgtcaaatgcccagctaaaagcattcaaagatgaggagaaggcaagagaagccctcagacagcagaagaggaaagcaaaggcctcaggagagcgttaccatgtggagccccacccagaacatctctgcggggcctacccctacgcctacccgcccatgccagccatggtgccacaccatggcttcgaggactggtcccagatccgctacccccctccccccatggccatggagcacccgcccccactccccaactcgcgcctcttccatctgccggaatacacctggcgtctaccctgtggaggggttcgaaatccaaatcagagctcccaagtgatggaccctcccacagccaggcctacagaaccagagccagctgatctcagattgccaagaaactagaagccacttgcacggtgtggccagagcctcagctggatgagaggctgagatgggtggccagcttgtataccagtccctgaactgagctgtttacaggactggggaggctccacccagaaggctttcatttgtactctgctgggagtgactgggaaaaactccttccctgctgctgagtggagagaggcctcatccggctttgacccaccatccgttgcagaagcctccaggagcagcaatcctaagagtgggaggcagccaagacccccttccttcaaaacctcccggaagtggtttcaggccctctagttgccatgaccaatttgtgtgtgtgtttaatttttgcttcaagctctgtagcaggacctgccccacgcacacccctacccctctgtgaggagctgtgggaagtgtgggtttgtctccagaacagaagagaatgatggatattctggctctggggccctctccaccaccactcacagtagccttgctgaagccatcacagatgggagaaggccatgccagccacgtccgccgaggggcgccagcctgaagctgccaggccctgaggttcagaccctggaccccatagctggaggcctgtggtgccagaagcccagattagggtggctgtccatccctggatagctatttgcacgaatcatggacataaatccaagttgaagaagaaaaaaaaaaaaaaaaa

SEQ ID NO: 1090 - DNA, 8868 bp, Homo sapiens
  Genbank Accession No. AJ012737
cccccagcccgcgccagcatgatgaacaacagcggctactcagacgccggcctcggcctgggcgatgagacagacgagatgccgtccacggagaaggacctggcggaggacgcgccgtggaagaagatccagcagaacacattcacgcgctggtgcaatgagcacctcaagtgcgtgggcaagcgcctgaccgacctgcagcgcgacctcagcgacgggctccggctcatcgcgctgctcgaggtgctcagccagaagcgcatgtaccgcaagttccatccgcgccccaacttccgccaaatgaagctggagaacgtgtccgtggccctcgagttcctcgagcgcgagcacatcaagctcgtgtccatagacagcaaggccatcgtggatgggaacctgaagctgatcctgggcctgatctggacgctgaccctgcactactccatctccatgcccatgtgggaggatgaagatgatgaggatgcccgcaaacagacgcccaagcagcggctgcttggctggatccagaacaaggtgccccagctgcccatcaccaacttcaaccgtgactggcaggacggcgaagctctgggcgcccaggtggacaactgcgcccccggtctctgccccgactgggaggcctgggaccccaaccagcccgtggagaacgcccgggaggccatgcagcaggccgacgactggcttggggtgcccctggtcattgcccctgaggagattgtggaccccaacgtggatgagcattctgttatgacctacctgtcccagttccccaaggccaagctcaaacctggtgcccctgttcgatccaagcagctgaaccccaagaaagccatcgcctatgggcctggcatcgagccacagggcaacaccgtgctgcagcctgcccacttcaccgtgcagacggtggacgcgggcgtgggcgaggtgctggtctacatcgaggaccctgaaggccacaccgaggaggctaaggtggttcccaacaatgacaaggatcgcacctatgctgtctcctatgtgcccaaggtcgctgggttacacaaggtgaccgtgctctttgctggccagaacattgaacgcagtccctttgaggtgaacgtgggcatggccctgggagatgccaacaaggtgtcagcccgtggccctggcctggaacctgtgggcaatgtggccaacaaacccacctactttgacatctacactgcgggggccggcactggcgatgttgctgtggtgatcgtggacccacagggccggcgggacacagtggaggtggccctggaggacaagggtgacagcacgttccgctgcacatacagacctgccatggaggggccacataccgtgcatgtggcctttgcgggtgcccccatcacccgcagtcccttccctgtccatgtgtcggaagcctgtaaccccaacgcctgccgcgcctctgggcgaggcccgcagcccaagggtgttcgcgtgaaagaggtggctgacttcaaggtgtttaccaagggtgccggcagcggggagctcaaggtcacggtcaaggggccaaagggcacagaggagccagtgaaggtgcgggaggctggggatggtgtgttcgagtgcgagtactacccggtggtgcctgggaagtatgtggtgaccatcacgtggggcggctacgccatccctcgcagcccctttgaggtacaggtgagcccagaggcaggagtgcaaaaggtccgggcctggggtcctggtttggagactggccaggtgggcaagtcagccgattttgtggtggaagccattggcaccgaggtggggacactgggcttctccatcgaggggccctcacaagccaagatcgaatgtgacgacaagggggatggctcctgcgatgtgcggtactggcccacggagcctggggagtacgctgtgcacgtcatctgtgacgatgaggacatccgagactcacccttcattgcccacatcctgcccgccccacctgactgcttcccagataaggtgaaggcctttgggcctggcctggagcctaccggctgcatcgtggacaagcccgctgagttcaccattgatgctcgtgcagctggcaagggagacctgaagctctatgcccaggacgccgacggctgtcccatcgacatcaaggtgatccccaacggcgacggcaccttccgctgctcctacgtgcccaccaagcccattaagcacaccatcatcatctcctggggaggcgtaaacgtgcccaagagccccttccgggtgaacgtgggcgagggcagccaccccgagcgggtaaaggtgtacggccccggagtggagaagacaggcctcaaggccaatgagcccacctacttcacggtggactgcagcgaggcggggcaaggcgacgtgagcatcggcatcaagtgcgccccaggcgtggtgggccctgcagaggctgacattgacttcgacatcatcaagaatgacaacgacaccttcaccgtcaagtacacgccaccaggggcgggccgctacaccatcatggtgctgtttgccaaccaggagatccccgccagccccttccacatcaaggtggacccatcccacgatgccagcaaagtcaaggccgagggccctgggctgaatcgcacaggtgtggaagtcgggaagcccacccacttcacggtgctgaccaagggagccggcaaggccaagctggatgtgcagtttgcagggacagccaagggcgaggttgtgcgggactttgagatcatagacaaccatgactactcctacactgtcaagtacaccgctgtccagcagggcaacatggcagtgacagtgacttatggcggggaccctgtccccaagagcccctttgtggtgaatgtggcacccccgctggacctcagcaaaatcaaagttcagggccttaatagcaaggtggctgtgggacaggaacaagcattctctgtgaacacacgaggggctggcggtcagggccaactggatgtgcggatgacttcgccctctcgccggcccatcccctgcaagctggagccaggcggtggagcggaagcccaggctgtgcgctacatgcccccggaggaggggccctacaaggtggatatcacctacgatggtcacccggtgcctggcagcccgtttgctgtggagggtgtcctgccccctgatccctccaaggtctgtgcttatggcccgggtctcaagggtggactggtaggcacccccgcgccattctccatcgacaccaagggggctgacacaggtggcctggggctgaccgtagagggcccctgcgaggccaagatcgagtgccaggacaatggtgatggctcatgtgctgtcagctacctgcccacggagcctggcgagtacaccatcaacatcctgtttgctgaggcccacatccctggctcgcccttcaaagccaccattcggcctgtgtttgacccgagcaaggtgcgggccagtggaccgggcctggagcgcggcaaggtcggtgaggcagccaccttcactgtggactgctcagaggcaggcgaggcggagctgaccattgagatcctgtcggatgccggggtcaaggccgaggtgctgatccacaacaacgcggatggcacctaccacatcacctacagccctgccttccctggcacctacaccattaccatcaagtatggcgggcatcccgtgcccaaattccccacccgtgtccatgtgcagcctgcggtcgataccagtggcgtcaaggtctcagggcctggtgttgagccacacggtgtcctgcgggaggtgaccactgagttcactgtggatgcaagatccctaacagccacaggcggcaaccacgtgacggctcgtgtgctcaacccctcgggggccaagacagacacctatgtgacagacaatggggacggcacctaccgagtgcagtacaccgcctacgaggagggcgtgcatctggtggaggtcctgtatgatgaggtcgctgtgcccaagagccccttccgagtgggcgtgaccgagggctgtgatcccacccgcgtccgagccttcgggccaggcctggagggtggcttggtcaacaaggccaaccgattcactgtggagaccaggggagcgggcaccgggggccttggcctagccatcgagggtccctcggaagccaagatgtcctgcaaggacaacaaggatggtagctgcaccgtggagtacatccccttcactcctggagactatgacgtcaacatcaccttcggggggcggcccatcccagggagcccgttccgcgtgccagtgaaggatgtggtggaccctgggaaggtgaagtgctcagggccagggctgggggctggtgtcagggcccgggttcctcagaccttcacagtggactgcagtcaagctggccgggcgcccctgcaggtggctgtgctgggccccacaggtgtggccgagcctgtggaggtgcgggacaatggagatggcacccacactgtccactacaccccagccactgacgggccctacacggtagccgtcaagtatgctgaccaggaggtgccacgcagccccttcaagatcaaggtcctcccagctcatgatgccagcaaggtgcgggccagcggcccaggcctcaacgcctctggcatccctgccagcctgcctgtggagttcaccatcgacgcacgggacgcgggcgaggggttgctcactgtccagatcttggaccccgagggtaagcccaagaaggccaacatccgggacaatggggatggcacgtacactgtgtcctacctgccggacatgagcggccggtacaccatcaccatcaagtatggcggtgatgagatcccctactcgcccttccgcatccatgctctgcccactggggatgccagcaagtgcctcgtcacagtgtccattggaggccatggcctgggtgcctgcctgggccctcgaatccagattgggcaggagacggtgatcacgatggatgccaaggcagccggtgaggggaaggtgacatgcacggtgtccacgccggatggggcagagctcgatgtggatgtggttgagaaccatgacggtacctttgacatctactacacagcgcccgagccgggcaagtacgtcatcaccatccgcttcgggggtgagcacatccccaacagccccttccacgtgctggccacagaggagccagtggtgcctgtggagccaatggagtccatgctgaggcccttcaacctggtcatccccttcgcggtgcagaaaggggagctcacaggagaggtgcggatgccctcggggaagacggcacggcccaacatcaccgacaacaaggacggcaccatcacggtgaggtatgcacccactgagaaaggcctgcaccagatggggatcaagtatgacggcaaccacatccctgggagccccttacagttctatgtggatgccatcaacagccgccatgtcagtgcctatgggccaggcctgagccatggcatggtcaacaagccagccaccttcactattgtcaccaaagatgctggagaagggggtctgtcactggccgtggagggcccatccaaggcagagatcacctgtaaggacaacaaggatggcacctgcaccgtgtcctatctgccgactgcgcctggagactacagcatcatcgtgcgcttcgatgacaagcacatcccggggagccccttcacagccaagatcacaggtgatgactccatgaggacctcacagctgaatgtgggcacctccacggacgtgtcactgaagatcaccgagagtgatctgagccagctgaccgccagcatccgtgccccctcgggcaacgaggagccctgcctgctgaagcgcctgcccaaccggcacattgggatctccttcacccccaaggaggtcggggagcacgtggtgagcgtgcgcaagagtggcaagcatgtcaccaacagccccttcaagatcctggtggggccatctgagatcggggacgccagcaaggtgcgggtctggggcaaggggctttccgagggacacacattccaggtggcagagttcatcgtggacactcgcaatgcaggttatgggggcttggggctgagtattgaaggcccaagcaaggtggacatcaactgtgaggacatggaggacgggacatgcaaagtcacctactcccccaccgagcccggcacctacatcatcaacatcaagtttgctgacaagcacgtgcctggaagccccttcactgtgaaggtgaccggcgagggccgcatgagggagagcatcacccggcggagacaggcaccttccatcgccaccatcggcagcacctgtgacctcaacctcaagatcccaggaaactggttccagatggtgtctgcccaggagcgcctgacacgcaccttcacacgcagcagccacacctacacccgcacggagcgcacggagatcagcaagacgcggggcggggagacaaagcgcgaggtgcgggtggaggagtccacccaggtcggcggggaccccttccctgctgtgtttggggacttcctgggccgggagcgcctgggatccttcggcagcatcacccggcagcaggagggtgaggccagctctcaggacatgactgcacaggtgaccagcccatcgggcaaggtggaagccgcagagatcgtcgagggcgaggacagcgcctacagcgtgcgctttgtgccccaggaaatggggccccatacggtcgctgtcaagtaccgtggccagcacgtgcccggcagcccctttcagttcactgtggggccgctgggtgaaggtggtgcccacaaggtgcgggccggaggcacagggctggagcgaggtgtggccggcgtgccagccgagttcagcatctggacccgggaggctggcgctgggggcctgtccattgctgtggagggtcctagcaaagcggagattgcatttgaggatcgcaaagatggctcctgcggcgtctcctatgtcgtccaggaaccaggtgactatgaggtctccatcaagttcaatgatgagcacatcccagacagcccctttgtggtgcctgtggcctccctctcggatgacgctcgccgtctcactgtcaccagcctccaggagacggggctcaaggtgaaccagccagcgtcctttgccgtgcagctgaacggtgcccggggcgtgattgatgcccgggtgcacacaccctcgggggctgtggaggagtgctacgtctctgagctggacagtgacaagcacaccatccgcttcatcccccacgagaatggcgtccactccatcgatgtcaagttcaacggtgcccacatccctggaagtcccttcaagatccgcgttggggagcagagccaggctggggacccaggcttggtgtcagcctacggtcctgggctcgagggaggcactaccggtgtgtcatcagagttcatcgtgaacaccctgaatgccggctcgggggccttgtctgtcaccattgatggcccctccaaggtgcagctggactgtcgggagtgtcctgagggccatgtggtcacttatactcccatggcccctggcaactacctcattgccatcaagtacggtggcccccagcacatcgtgggcagccccttcaaggccaaggtcactggtccgaggctgtccggaggccacagccttcacgaaacatccacggttctggtggagactgtgaccaagtcctcctcaagccggggctccagctacagctccatccccaagttctcctcagatgccagcaaggtggtgactcggggccctgggctgtcccaggccttcgtgggccagaagaactccttcaccgtggactgcagcaaagcaggcaccaacatgatgatggtgggcgtgcacggccccaagaccccctgtgaggaggtgtacgtgaagcacatggggaaccgggtgtacaatgtcacctacactgtcaaggagaaaggggactacatcctcattgtcaagtggggtgacgaaagtgtccctggaagccccttcaaagtcaaggtcccttgaatcccaaaagtgcctccccagcctcagcccccacctccagccacacacacattacacacacacacacacacacacaaatgtgccacacccagacacgcacagaatcagacactacaaacacctgccttgggggtgaagtgaaggcccagcctccccaccccaccgcgccccaggggttggaggaccttgtctgtgtcagacagtgtccctccctggaatgtgacatgaggccgactggggccaggctcaggggcagaggctgggacacaaggggctggcgagggctgcgaggccagggaagccctgagtttctggcggggctgagcagtgggggagcattgtgttgtgggtgtctgtgtgtgaggtcaccctcaaactgcaccgccggccagataccctcctgaccccgaggacttggtctggtctctctggtggctacaaccccagagttttaaggacttggaaaggaagcacaatcagagaagaaaacagcccccaaccagcaggagcggcctggcacatggaccggcctgagcgatgtgcactccacccaagccaggctcccagggggcctgatttctctctcactgtctctttttttaaaatggttgcacggctctgccccatggggggccttttttacacactgcgaggcccagctttctaggggacttttgcacatgtcatgcagctcagctgggagctgcttaggtggaaaactccaaataaagtgcgcctgtcgcagaaaaaaaaaaaaaaaaaaaaaaaaaa

SEQ ID NO: 1091 - DNA, 2237 bp, Homo sapiens
  Genbank Accession No. AJ130718
cacgaggagctgttgcagcatgagcgatacgcttggttctcctaactagcaccttcccctctcccctgactcagctggtagcccctcctccccgcacctgcccaaaggtcactggacaggcatttgtctggccttcccttttactgctggctgggaaggaggagcatcagaccacagatcctggaaggcacttctctccctgactgccgctcacactgccgtgagaacctgcttatatccaggaccaaggaggcaatgccaggaagctggtgaagggtttcctctcctccaccatggttgacagcactgagtatgaagtggcctcccagcctgaggtggaaacctcccctttgggtgatggggccagcccagggccggagcaggtgaagctgaagaaggagatctcactgcttaacggcgtgtgcctgattgtggggaacatgatcggctcaggcatctttgtttcccccaagggtgtgctcatatacagtgcctcctttggtctctctctggtcatctgggctgtcgggggcctcttctccgtctttggggccctttgttatgcggaactgggcaccaccattaagaaatctggggccagctatgcctatatcctggaggcctttggaggattccttgctttcatcagactctggacctccctgctcatcattgagcccaccagccaggccatcattgccatcacctttgccaactacatggtacagcctctcttcccgagctgcttcgccccttatgctgccagccgcctgctggctgctgcctgcatctgtctcttaaccttcattaactgtgcctatgtcaaatggggaaccctggtacaagatattttcacctatgctaaagtattggcactgatcgcggtcatcgttgcaggcattgttagacttggccagggagcctctactcattttgagaattcctttgagggttcatcatttgcagtgggtgacattgccctggcactgtactcagctctgttctcctactcaggctgggacaccctcaactatgtcactgaagagatcaagaatcctgagaggaacctgcccctctccattggcatctccatgcccattgtcaccatcatctatatcttgaccaatgtggcctattatactgtgctagacatgagagacatcttggccagtgatgctgttgctgtgacttttgcagatcagatatttggaatatttaactggataattccactgtcagttgcattatcctgttttggtggcctcaatgcctccattgtggctgcttctaggcttttctttgtgggctcaagagaaggccatctccctgatgccatctgcatgatccatgttgagcggttcacaccagtgccttctctgctcttcaatggtatcatggcattgatctacttgtgcgtggaagacatcttccagctcattaactactacagcttcagctactggttctttgtggggctttctattgtgggtcagctttatctgcgctggaaggagcctgatcgacctcgtcccctcaagctcagcgttttcttcccgattgtcttctgcctctgcaccatcttcctggtggctgttccactttacagtgatactatcaactccctcatcggcattgccattgccctctcaggcctgcccttttacttcctcatcatcagagtgccagaacataagcgaccgctttacctccgaaggatcgtggggtctgccacaaggtacctccaggtcctgtgtatgtcagttgctgcagaaatggatttggaagatggaggagagatgcccaagcaacgggatcccaagtctaactaaacaccatctggaatcctgatgtggaaagcaggggtttctggtctactggctagagctaaggaagttgaaaaggaaagctcacttctttggaggcacctgtccagaagcctggcctaggcagcttcaacctttgaacttactttttgaaatgaaaagtaatttatttgttttgctacatactgttccagacttttaaaggggacaatgaaggtgactgtggggaggagcatgtcaggtttgggcttggttgttttagaagcacctgggtgtgcctacctactcctcttttcttttaaaagggcccacaatgctccaatttcctgtctcctttagagagacatgaaactatcacaggtgctggatgacaataaaagtttatgttcctaaaaaaaaaaaaaaaaaaaaaaa

SEQ ID NO: 1092 - DNA, 1648 bp, Homo sapiens
  Genbank Accession No. AJ223603
cacccaggggggacgccaagggagcaggacggagccatggaccccgccaggaaagcaggtgcccaggccatgatctggactgcaggctggctgctgctgctgctgcttcgcggaggagcgcaggccctggagtgctacagctgcgtgcagaaagcagatgacggatgctccccgaacaagatgaagacagtgaagtgcgcgccgggcgtggacgtctgcaccgaggccgtgggggcggtggagaccatccacggacaattctcgctggcagtgcggggttgcggttcgggactccccggcaagaatgaccgcggcctggatcttcacgggcttctggcgttcatccagctgcagcaatgcgctcaggatcgctgcaacgccaagctcaacctcacctcgcgggcgctcgacccggcaggtaatgagagtgcatacccgcccaacggcgtggagtgctacagctgtgtgggcctgagccgggaggcgtgccagggtacatcgccgccggtcgtgagctgctacaacgccagcgatcatgtctacaagggctgcttcgacggcaacgtcaccttgacggcagctaatgtgactgtgtccttgcctgtccggggctgtgtccaggatgaattctgcactcgggatggagtaacaggcccagggttcacgctcagtggctcctgttgccaggggtcccgctgtaactctgacctccgcaacaagacctacttctcccctcgaatcccaccccttgtccggctgccccctccagagcccacgactgtggcctcaaccacatctgtcaccacttctacctcggccccagtgagacccacatccaccaccaaacccatgccagcgccaaccagtcagactccgagacagggagtagaacacgaggcctcccgggatgaggagcccaggttgactggaggcgccgctggccaccaggaccgcagcaattcagggcagtatcctgcaaaaggggggccccagcagccccataataaaggctgtgtggctcccacagctggattggcagcccttctgttggccgtggctgctggtgtcctactgtgagcttctccacctggaaatttccctctcacctacttctctggccctgggtacccctcttctcatcacttcctgttcccaccactggactgggctggcccagcccctgtttttccaacattccccagtatccccagcttctgctgcgctggtttgcggctttgggaaataaaataccgttgtatatattctgccaggggtgttctagctttttgaggacagctcctgtatccttctcatccttgtctctccgcttgtcctcttgtgatgttaggacagagtgagagaagtcagctgtcacggggaaggtgagagagaggatgctaagcttcctactcactttctcctagccagcctggactttggagcgtggggtgggtgggacaatggctccccactctaagcactgcctcccctactccccgcatctttggggaatcggttccccatatgtcttccttactagactgtgagctcctcgagggcagggaccgtgccttatgtctgtgtgtgatcagtttctggcacataaatgcctcaataaagatttaattactttgaaaaaaaaaaaaaa

SEQ ID NO: 1093 - DNA, 276 bp, Homo sapiens
  Genbank Accession No. AJ223693
ggacagggggcctccatctccagcaggtcttgtcaaagcctcgtatacagtgatggaaacacctacttgaattggtttcagcagaggccacgccaatctccaaggcgcctaatttataaggtttctaactgggactctggggtcccaaacagattcagcggcagtgggtcaggcactgattacacactgaaaatcagcagggtggaggctgaggatgtcggggtttattactgcatgcaaagtacacactggcctccaacttttggccaggggacc

SEQ ID NO: 1094 - DNA, 3528 bp, Homo sapiens
  Genbank Accession No. AJ228139
tatgcatggagtggacctgtaggcgacttgcatcgtcttcaacatgaagatagccacagtgtcagtgcttctgcccttggctctttgcctcatacaagatgctgccagtaagaatgaagatcaggaaatgtgccatgaatttcaggcatttatgaaaaatggaaaactgttctgtccccaggataagaaattttttcaaagtcttgatggaataatgttcatcaataaatgtgccacgtgcaaaatgatactggaaaaagaagcaaaatcacagaagagggccaggcatttagcaagagctcccaaggctactgccccaacagagctgaattgtgatgattttaaaaaaggagaaagagatggggattttatctgtcctgattattatgaagctgtttgtggcacagatgggaaaacatatgacaacagatgtgcactgtgtgctgagaatgcgaaaaccgggtcccaaattggtgtaaaaagtgaaggggaatgtaagagcagtaatccagagcaggatgtatgcagtgcttttcggccctttgttagagatggaagacttggatgcacaagggaaaatgatcctgttcttggtcctgatgggaagacgcatggcaataagtgtgcaatgtgtgctgagctgtttttaaaagaagctgaaaatgccaagcgagagggtgaaactagaattcgacgaaatgctgaaaaggatttttgcaaggaatatgaaaaacaagtgagaaatggaaggcttttttgtacacgggagagtgatccagtccgtggccctgacggcaggatgcatggcaacaaatgtgccctgtgtgctgaaattttcaagcggcgtttttcagaggaaaacagtaaaacagatcaaaatttgggaaaagctgaagaaaaaactaaagttaaaagagaaattgtgaaactctgcagtcaatatcaaaatcaggcaaagaatggaatacttttctgtaccagagaaaatgaccctattcgtggtccagatgggaaaatgcatggcaacttgtgttccatgtgtcaagtctacttccaagcagaaaatgaagaaaagaaaaaggctgaagcacgagctagaaacaaaagagaatctggaaaagcaacctcatatgcagagctttgcaatgaatatcgaaagcttgtgaggaacggaaaacttgcttgcaccagagagaacgatcctatccagggcccagatgggaaagtgcacggcaacacctgctccatgtgtgaggtcttcttccaagcagaagaagaagaaaagaaaaagaaggaaggcgaatcaagaaacaaaagacaatctaagagtacagcttcctttgaggagttgtgtagtgaataccgcaaatccaggaaaaacggacggcttttttgcaccagagagaatgaccccatccagggcccagatgggaaaatgcatggcaacacctgctccatgtgtgaggccttctttcaacaagaagaaagagcaagagcaaaggctaaaagagaagctgcaaaggaaatctgcagtgaatttcgggaccaagtgaggaatggaacacttatatgcaccagggagcataatcctgtccgtggaccagatggcaaaatgcatggaaacaagtgtgccatgtgtgccagtgtgttcaaacttgaagaagaagagaagaaaaatgataaagaagaaaaagggaaagttgaggctgaaaaagttaagagagaagcagttcaggagctgtgcagtgaatatcgtcattatgtgaggaatggacgactcccctgtaccagagagaatgatcctattgagggtctagatgggaaaatccacggcaacacctgctccatgtgtgaagccttcttccagcaagaagcaaaagaaaaagaaagagctgaacccagagcaaaagtcaaaagagaagctgaaaaggagacatgcgatgaatttcggagacttttgcaaaatggaaaacttttctgcacaagagaaaatgatcctgtgcgtggcccagatggcaagacccatggcaacaagtgtgccatgtgtaaggcagtcttccagaaagaaaatgaggaaagaaagaggaaagaagaggaagatcagagaaatgctgcaggacatggttccagtggtggtggaggaggaaacactcaggacgaatgtgctgagtatcaggaacaaatgaaaaatggaagactcagctgtactcgggagagtgatcctgtacgtgatgctgatggcaaatcgtacaacaatcagtgtaccatgtgtaaagcaaaattggaaagagaagcagagagaaaaaatgagtattctcgctccagatcaaatgggactggatcagaatcagggaaggatacatgtgatgagtttagaagccaaatgaaaaatggaaaacttatctgcactcgagaaagtgaccctgtccggggtccagatggcaagacacatggtaataagtgtactatgtgtaaggaaaaactggaaagggaagcagctgaaaaaaaaaagaaagaggatgaagacaggagcaatacaggagaaaggagcaatacaggagaaaggagcaatgacaaagaggatctgtgtcgtgaatttcgaagcatgcagagaaatggaaagcttatctgcaccagagaaaataaccctgttcgaggcccatatggcaagatgcacatcaataaatgtgctatgtgtcagagcatctttgatcgagaagctaatgaaagaaaaaagaaagatgaagagaaatcaagtagcaagccctcaaataatgcaaaggatgagtgcagtgaatttcgaaactatataaggaacaatgaactcatctgccctagagagaatgacccagtgcacggtgctgatggaaagttctatacaaacaagtgctacatgtgcagagctgtctttctaacagaagctttggaaagggcaaagcttcaagaaaagccatcccatgttagagcttctcaagaggaagacagcccagactctttcagttctctggattctgagatgtgcaaagactaccgagtattgcccaggataggctatctttgtccaaaggatttaaagcctgtctgtggtgacgatggccaaacctacaacaatccttgcatgctctgtcatgaaaacctgatacgccaaacaaatacacacatccgcagtacagggaagtgtgaggagagcagcaccccaggaaccaccgcagccagcatgcccccgtctgacgaatgacaggaagattgttgaaagccatgagggaaaaaataaaccccagttctgaatcacctaccttcaccatctgtatatacaaagaattcttcggagcttgtcttatttgctatagaaaacaatacagagcttttgggaatggaatcactgattttcagtcttttccatttctttcctcctagaatctgtgatctgagggtataaagacatttccaccaagtttgagccctcaaaatgtcctgattacaatgctgtctgtccaactgcctgttcaataaaagtaaactcagcag

SEQ ID NO: 1095 - DNA, 1840 bp, Homo sapiens
  Genbank Accession No. AJ238381
cccaggtggggagctagcctgaaagagacagcggaaggagtttcctggactgcgctgtcgctcaccgacccgcaccaatcaccatgcagcttgccctcggacccgccccttttagggcgtgtccccagtgagtgatagacggagccgccctgccctgctcagcccagcccacgttgctgcttagattgaaatgcagaactcaagcctctttcatcggggcacagacttccttttacttcttccttttgccctctcgcctcctcctcctgggaagaagcggaggcgccggccggtcggccgggatagcaacaggccgggccactgaggcggtgcggaaagtttctgtctgggagtgcggaactggggccgggttggtgtactgctcggagcaatgggtgagtggcggcgggggactctgtcagagccgggaagggagggagggagcgagcgggcaagggagggagggagggagggagcgcgagggcgcgcgccactaggcgctcacattctctattgactttgctcgtgttcctacaagttgtaggaacacgctaagggtcagcggcgcacagcagttcaatgtgaacgctggctactgggtggctgttgatgccattttctgattttaagagaagggagctgtggcatcagcgagcccctcagcccgagtagcaaaccaagttttgtttcacacgcgcgcacacatgcaaacaaaacaggaaaagaaaagaaaagaaaacaaacaacaacaaataaaacaccctctagcttcccctagactttgtttaactggccgggtctccagaaggaacgctggggatgggatgggtggagagagggagcggctcaaggactttagtgaggagcaggcgagaagaagcacgttcaggcgtcaagaccgatttctccccctgcttcgggagacttttgaacgctcggagaggcccggcatctcaccactttacttggccgtaggggcctccggcacggcaggaatgagggagggggtccgattggacagtgacggtttggggccgttcggctatgttcagggaccatatggtttggggacagccccagtagttagtacgggacgggtgcgttcgcccagtccccggatgcgtagggaggcccagtggcaggcagctgtcccaagcagcgggtgcgcgtccctgcgcgctgtgtgttcattttgcagagccagccttcggggaggtgaaccagctgggaggagtgttcgtgaacgggaggccgctgcccaacgccatccggcttcgcatcgtggaactggcccaactgggcatccgaccgtgtgacatcagccgccagctacgggtctcgcacggctgcgtcagcaagatcctggcgcgatacaacgagacgggctcgatcttgccaggagccatcgggggcagcaagccccgggtcactacccccaccgtggtgaaacacatccggacctacaagcagagagaccccggcatcttcgcctgggagatccgggaccgcctgctggcggacggcgtgtgcgacaagtacaatgtgccctccgtgagctccatcagccgcattctgcgcaacaagatcggcaacttggcccagcagggtcattacgactcatacaagcagcaccagccgacgccgcagccagcgctgccctacaaccacatctactcgtaccccagccctatcacggcggcggccgccaaggtgcccacgccacccggggtgcctgccatccccggttcggtggccatgccgcgcacctggccctcctcgcactccgtcaccgacatcctgggcatccgctccatcaccgaccaaggtaggggctccagag

SEQ ID NO: 1096 - DNA, 1408 bp, Homo sapiens
  Genbank Accession No. AJ238979
tgaacatatttacatttgatttaacagtgaaccttaattctttctggcttcacagtgaaacaagtttatgcaatcgatcaaatattttcatccctgaggttaacaattaccatcaaaatgttttgtggagactatgtgcaaggaaccatcttcccagctcccaatttcaatcccataatggatgcccaaatgctaggaggagcactccaaggatttgactgtgacaaagacatgctgatcaacattctgactcagcgctgcaatgcacaaaggatgatgattgcagaggcataccagagcatgtatggccgggacctgattggggatctgagggagcagctttcggatcacttcaaagatgtgatggctggcctcatgtacccaccaccactgtatgatgctcatgagctctggcatgccatgaagggagtaggcactgatgagaattgcctcattgaaatactagcttcaagaacaaatggagaaattttccagatgcgagaagcctactgcttgcaatacagcaataacctccaagaggacatttattcagagacctcgggacacttcagagatactctcatgaacttggtccaggggaccagagaggaaggatattcagaccctgcgatggctgctcaggatgcaatggtcctatgggaagcctgtcagcagaagacggggggacacaaaaccatgctgcaaatgatcctctgcaacaagagctaccagcagctgcggctggttttccaggaatttcaaaatatttctgggcaggatatggtagatgccattaatgaatgttatgatggatactttcaggagctgctggttgcaattgttctctgtgttcgagacaaaccagcctattttgcttatagattatatagtgcaattcatgactttggtttccataataaaactgtaatcaggattctcattgccagaagtgaaatagacctgctgaccataaggaaacgatacaaagagcgatatggaaaatccctatttcatgatatcagaaattttgcttcagggcattataagaaagcactgcttgccatctgtgctggtgatgctgaggactactaaaatgaagaggacttggagtactgtgcactcctctttctagacacttccaaatagagattttctcacaaatttgtactgttcatggcactattaacaaaactatacaatcatattttctcttctatctttgaaattattctaagccaaagaaaactatgaatgaaagtatatgatactgaatttgcctactatcctgaatttgcctactatctaatcagcaattaaataaattgtgcatgatggaataataggaaaaattggcattgggaataggattttattttaaatgtggaaccatccaacaacctaccaacca

SEQ ID NO: 1097 - DNA, 3066 bp, Homo sapiens
  Genbank Accession No. AJ242015
ccatctgagcgagaagagcagacaccgtgctcctggaatcacccagcatgttgcaaggtctcctgccagtcagtctcctcctctctgttgcagtaagtgctataaaagaactccctggggtgaagaagtatgaagtggtttatcctataagacttcatccactgcataaaagagaggccaaagagccagagcaacaggaacaatttgaaactgaattaaagtataaaatgacaattaatggaaaaattgcagtgctttatttgaaaaaaaacaagaacctccttgcaccaggctacacggaaacatattataattccactggaaaggagatcaccacaagcccacaaattatggatgattgttattatcaaggacatattcttaatgaaaaggtttctgacgctagcatcagcacatgtaggggtctaaggggctacttcagtcagggggatcaaagatactttattgaacctttaagccccatacatcgggatggacaggagcatgcactcttcaagtataaccctgatgaaaagaattatgacagcacctgtgggatggatggtgtgttgtgggcccacgatttgcagcagaacattgccctacctgccaccaaactagtaaaattgaaagacaggaaggttcaggaacatgagaaatacatagaatattatttggtcctggataatggtgagtttaaaaggtacaatgagaatcaagatgagatcagaaagagggtatttgagatggctaattatgtcaacatgctttataaaaagctcaatactcatgtggccttagttggtatggaaatctggactgacaaggataagataaagataaccccaaatgcaagcttcaccttggagaatttttctaaatggagggggagtgttctctcaagaagaaagcgtcatgatattgctcagttaatcacagcaacagaacttgctggaacgactgtgggtcttgcatttatgtctacaatgtgttctccttattctgttggcgttgttcaggaccacagcgataatcttcttagagttgcagggacaatggcacatgaaatgggccacaactttggaatgtttcatgacgactattcttgcaagtgtccttctacaatatgtgtgatggacaaagcactgagcttctatatacccacagacttcagttcctgcagccgtctcagctatgacaagttttttgaagataaattatcaaattgcctctttaatgctccattgcctacagatatcatatccactccaatttgtgggaaccagttggtggaaatgggagaggactgtgattgtgggacatctgaggaatgtaccaatatttgctgtgatgctaagacatgtaaaatcaaagcaacttttcaatgtgcattaggagaatgttgtgaaaaatgccaatttaaaaaggctgggatggtgtgcagaccagcaaaagatgagtgcgacctgcctgaaatgtgtaatggtaaatctggtaattgtcctgatgatagattccaagtcaatggcttcccttgccatcacgggaagggccactgcttgatggggacatgccccacactgcaggagcagtgcacagagctgtggggaccaggaactgaggttgcagataagtcatgttacaacaggaatgaaggtgggtcaaagtacgggtactgtcgcagagtggatgacacactcattccctgcaaagcaaatgataccatgtgtgggaagttgttctgtcaaggtgggtcggataatttgccctggaaaggacggatagtgactttcctgacatgtaaaacatttgatcctgaagacacaagtcaagaaataggcatggtggccaatggaactaagtgtggcgataacaaggtttgcattaatgcagaatgtgtggatattgagaaagcctacaaatcaaccaattgctcatctaagtgcaaaggacatgctgtgtgtgaccatgagctccagtgtcaatgtgaggaaggatggatccctcccgactgcgatgactcctcagtggtcttccacttctccattgtggttggggtgctgttcccaatggcggtcatttttgtggtggttgctatggtaatccggcaccagagctccagagaaaagcagaagaaagatcagaggccactatctaccactggcaccaggccacacaaacagaagaggaaaccccagatggtaaaggctgttcaaccccaagagatgagtcagatgaagccccatgtgtatgatctgccagtagaaggcaatgagcccccagcctcttttcataaagacacaaacgcacttccccctactgttttcaaggataatccaatgtctacacctaaggactcaaatccaaaagcatgaagcaacagctaagcaagaactaatggctaaattatcaacttggaaaactggaaaatctggatggcagagaaatatactatctcaccagtatttgctctcgactcaagaaggttaacattttctgattcatgttagactttgaagagactaaagaaaattttcaagaggaacatatgcctgagaacctttgcatgaatttaaaatttcaattatccattcttataagaaggaagatgattgtaaagaaatatctccgaagttaaaatctgtaataggaattgattcattctctaatgaaaacaaaacataaaaacatcacactaatcttggaggaataagaaaaattgtacatccattaaatgtacaattgattgcaacatcttgattgttttaaccattaacttgtcaaattacaatcacagttaagaaaatgatgtaaaattctgttttgtggatctctttcctagattagcttctgaaatcattattagctatatcatttgaggttttctacaatttggtataactaagaatttaaaaatgttttatcatatatatttgtataattaattactggcatggttaaagtggttttcactttttaaatggagaaaatttcagttaaattaataggataaaccaggttgcgaactggtgacctgtaggccatgttagcactgcaaaaaaaaaa

SEQ ID NO: 1098 - DNA, 1374 bp, Homo sapiens
  Genbank Accession No. AJ243512
cgagtgccggctcaccatgcactgccacgccgagctgaggctgagctcgcccggccagctcaaagcagccaggcggcgctacaagactttcatgatcgacgagatcctctccaaggagacctgcgattactttgagaaactttccctctactccgtgtgcccgtcgctggtcgtgcgacccaagcccctgcattcctgtacgggctccccttccctgcgggcatatccgctcctctcggtgatcacccgccagcccactgtcatctcccacctggtccctgccaccccgggaatcgcccaggcactgtcctgccaccaggtcaccgaggcggtctctgctgaggccccagggggcgaggccctagccagcagcgagtcagagacggaacagcccacgccccgacagaagaagccccgccggagtcgcaccatcttcaccgagctgcagctcatgggcctggagaagaaattccagaagcagaagtatttgtcaaccccagacaggttggacttggctcagtctctgggactcactcagctgcaggtgaagacctggtatcagaatcgcaggatgaaatggaagaaaatggttcttaaaggtggacaggaagcacccacaaaacccaaaggtcgccccaagaagaactccatccccacatcagaagagattgaagctgaagagaagatgaacagccaggcccagggtcaggagcagctggagccctctcaggggcaggaggagctctgtgaagcacaggaaccgaaagcacgtgatgtccccttagagatggcagagccaccagacccgccccaggagttgccaataccctcttcggaacccccaccattaagctaaagtaaaacccttttgagggaagagggagactggggagaagggaaaagagagaaggcagggagagtagggagagaaaaccttccagcagcccagtaaactgcgggcgaagagatctacccgtctccctccctcccacagttaccattggccttgtcatcgcaagcatttgacaaagacttgcttgtcttgggcctgtcacctcctgaaaggctgctttagctgtggatgcccttgattaagggagagagcgcctaggagctgcctgccccagctggggtgacggctgtagggctgggtctatgttgcaagccctatatcctagcatgcagtggaaagtgcttagctctctccctcctgacctctgggcagccagtcatcaaagcagagagacgtggcggcatgtgggcagcatgcccaggttccttgctgactcagcacttatttctgtagttttaaaaaagaatttaatgtttttggttgtatttttttgggggggtgagggtgggcaaaaacatggg

SEQ ID NO: 1099 - DNA, 201143 bp, Homo sapiens
  Genbank Accession No. AL022318
aagcttgctgataggagatcggctgtgaggttcctgttcctgtcgtaacacagcagttctgggattgttttaggagagaaactttgagaggttaaatgagaaaggagccttctggtgggttcattgagttctgcctccaaagcacacacccagcagagaagccccgagaaagtgctgggcccagctaagcaccccagatcttgtgcccagggacacacctggacctcccagacaatcctgggagggattttccaggggtgtggagttcgtggtgaggcagagccagccaacagaagaacgcatcagtctgattatgtagttagtttagaacccaacccaatttcgggagtccctagctctgggagattgctcccacctttgtcaccaccaaaatgcatcatctttcttccgtttctctagtgttgtgtgtatgactccgatttgtgatgtatcccccgccacctggagaggcaaggaggtctgtcatccacctgggaggtccggctgtccagggcgggcgtcacctgttgggggtgccaataaagatgccgcctaagggaaccacatcctgataatcatgttctgagccatgggggaaccctgctgcactccagcctcagactctgggacaggttggagccccagtgactctcacatggagataggacatccctctgggggacattgtgagccacaacctcaaccccatttgggctggggattctctgttcccagggtcctgtgtgaaccgcagctgctgaatggtgtgcagaattggaagagttatgatcaaaagccagttcctgtgtgaatttaagggtgctgggtggttagtccaggggcctactgagaacttgtcctattcttttttatttttatttttgacagagtgtcgctctgttgccaggctggagtgcagtggagtgatcttggcttactgcaatctctgcctcccaggttcaagcgattcccctgcctcagcctcccgagtagctgggactacaggtgcacaccaacacgcctggctaattttttgtattttagtagagacagcatttcaccatgttagccaggatggtctcaatttcccaacctcgtgatctgcctgcctgggcctcccaaagtgctgggattacaggcgtgagccaccgtgcccggcccgaacttgtcctattcttgaccccacatgaacagaaataagaggtaacaggactgtctcaaataacctcaacctcatatgcacattaatgtgaatttttggatgccctgaaaggcagattttatgtgcagaaaagattatccaggggttttcttaagttttaaaaattaatattcaatttattaaagttataaataaaaggaaaaacctagtttgtccttacacttttaatttcagcttaaataacttattattttaattatagatctagcaaatttagcaatcacttctaagaaggctctgattaattttggtctcatttacgaacttaaactcctttaaacttttcatattgcattattcatcacatataatatatttgcttaacttcctaagtataattggctgacaaaccttcttaagtgctgaagcaattcttataaattgaatgcatttagcatataaatatgagcttgaagtctgactggctgttccagtactacgtgtaaaagagcaaatcccaagtccagatcatttactcagttacacatttaaaattgtaatcttgaggcaatctattattttaatagactgagttctcttaaatattataagaatataaaatagaaaaaacaccttaatataaaagatggccaggcgcggtggctcacgcctgtaattccagcacttgagacgccaaggtgggtggatcacctgaggtcaggagttcgagaccagcctggccaacatggtgaaaccccatctctactaaaaatacaaaaattagccaggtgtggtggcgcatacctgtaatcccagctacctgggaggccgaggcaggagaatcacttgaacctgggaggcggaggttgcagtgagccaagattgcaccactgcactccagtctcagcaacagagcgagactccatctcaaataagtaaatacataaataattaggattttgttctttttacatttctgtacgtaattcaagtcttcctgggggtaaaaactacttactcactaagggaataattcagtcatttcaaaccatttttgagggtctctactcagcagtttgatgttgtgtaatgattcaggattcttctctgtgaccctgatgggccattccgattcctatttatagatgcttatctcaagaccttctgtgtgggtagtctcagagcccttgggactgccttcgtccacaaccttgggtttgagtcatatcactaccgaattcttccctctgttcatggaaatctggtaactacatcaacgaggtattttctacagaactgattgggttttttgtttctttgcctcataagatataaaaatgtctaaaggccctggaatgtcacagtattaatagctgatgtgtatggaaggcctactatgtactgggcataattctatgtgttcttcatttgttaattcactcaatcctttttttttctttttttttttttttgagatggagtctcactctgtcgccaggctggagtgcagtggcgcgattatattcacctagaagtttgtgaacactgttcctctttcagtaaaatccatgttatagatgctgctggattttaggcatccagaaaggcctgagattggcagctatttgttgacaattcaatgggtataaaaggtaagcacttaagataaccaactattagaagactgagaatgacggtggtggggagtatttgggggacaggggagcaatacattctggtgatgtcattttggttcattactcagcaaattttttttttttgacagagttttgctctgtcgcctatgccaactcagcttgctgcaaactccgcctccagggttcaagcgattctcctgcctcagcctcctgagtagctgggattacaggtgcctgccaccatgcctggctaatttttgtatttttagtagagatggggtttcaccatgttggccaggctggtctcgaactcctgacctcaggtgatctgccagtctcagcctccaaaagtgctgggattacaggcatgagccaccatgcctggcctgaattaatattgttaaaatgtccatactacccaaagcaatctatagattcaatgcaatctctatcaaaatttcaattgctcctctttaagtggaggcctcaggcaaaaataaataaatacataaatacatacatacatacatacaggaaaaaagaaaaaaatccaatagaattcttcacagaaatataaaagaaaaatcctaaaatttgcatggaatcaaaaaaggccttgaatacccaagcaatcttgagaaagaataacaaagctggaggcatcacactcctgctttcaaactacatcacaaaacaacagtaatcaaagcagcatggtactggtataaaaagacacatagacaaatgaaacagaatagagagccctgaaatcaacccatgcttatactgttaactaatcttttacaaaggtgccaagaatacacaatgggggaagagtagtctcttcaataaatgtgttgggaaaactggatatccacatggaaaacaatgaaattggacccgtatcatacaccacacacaaaaattaactcaaaattgattaaagacttaaatgtaagaactgaaactgtaaaactcttagaagaaaacaaagggaaaaagctccttgacattggtgttggtaatgattttttgtgtaggacaccaaaagcataggcaacaaaagtaaaataaacaagtaggattacatcaagctaaaaagcttctgcacagcaaacaatcagtaaaatgaaaagataacttatgaaataggagaaaatatttgcaaatcatatatctgataaggggctaacatccaaaatatataaggaactcatacaagtcaatagccaaaaaataaataacctgattttaaaatgagcaaagaaataataatagacattttttccaaagaacacagcaagtatatgaaaatgtgctcagcatcactaatcatcaggcaattgcaaatcaacactacatgagctagcaactcacacctgttagaatggttcttttgaaaaagacggagatatcaagtgttggctaagatgtggaggaagacaagggaaccctggacactgttggtgggagtataaattggtacagccattataggtaacagtatgaagtttcctcaaacaattaagaatagtgctaccatttcatccaagaatcccacttctggatgtatagccagataaaatgaagtcagtatcttaaagagaaatctgctccatcatgttcattgcagcattattcacaatagccaagatatgggagcaacataaatgtccactgacagatgaatggctaaagaaaatgggaaatatatacacattggaatattattcagccataaaaaaggaaatcttgccatttgtgacaacatggatgaacccacagaacacaatgctaagagaaataagccagacacacaaagaaatactgtatgtctcacttatatgtggaatctaaagcacacacacacatacaggtaactatgtgaggtgatggatatgttaatttgcttggttatgataatcatttcaccatgtatacacgtatcagtgtgtcatatatcaaatcatcgtgttgtatacctttaatatgttcatttttttgtcaattatactaccagttttctcaataaaactgggaaaaaacgaaacaacatatagtaacaatggcaaaaaagaagccagtaaaatatatcctatcattcaatccaaataatcaatggtggagctgactgtaaattttaagaaagaggaaagtagaaacatttattgagtgcttgctttttttttttttgagatgaagttttgctctgtcgcccaggctggagtgcagtggcgcgatcttggctcactgcaagctctgcctcccgggttcacgccattctcctgcctcagcctccggagtagctgggactacaggcacctgccaccacacccggctaattttttgtatttttagtggagatgcggtttcaccgtgttagccaggatgatctcgatctcatgacctcgtgatccacccacctcggcctcccaaagtgctgggattacaggcgtgagccactgcacccggcctgagtgcttgctttaagtcaggcattgttctaagttctttctgtacctgtatcatctcatttaatcctcagagtagccatgtgaggttttgtagtactatcagctcaaattagtcttttaaacgtttatttatttatttttgagacagggtcttactctgtcacacaagctggtggaatcttagctcactgtaacctcgaactcctgtatcatcccaaatttaaacgagtcaaacggcagttaaaggacctatccaggatcacagaactaatgaataacacaatccagatccagacctgagcccaggctgtctggttccagcacctggttctcaacctttgcagtgtagtgcaatttttaccaaagagttcctgaaatgaacgcaacataattaaaaaaaaaaaaaaaggccaggtatggtggctcacacctataatcctagcactttgggaggccaaggtgggtggtcaggatttcgagcctgaccaacatggtgaaactccttctctactaaaaaaatacaaaattagccgggcatggtggcatccacctgtaatccgagctacttgggaagcggaggcaggagacttgcttgaacctaggaggcggaggttgcagtgagcagagatcgcgccactgtactccagcttgggcaacaagaggaaactccatctcaaaaataaaaaataaaaaaattttaaaaatcacagatggaagctcgagctgattttaatgaaacctctgtgaagcagtgagggaaaaagttgtgctaaaattatatcatttttagagcagagaattttatacatattgacaaattctttttaaacttttcaaaaatgctaacagctaattttatttatcccaaaatgggaatcactttgtttctcttgattataaaaatgatacatagtcatggtaaaaaaaattaaacactccataaagtccaaagaaggtaaatgtcattctaattcccactacccattgataacctgcggtgcagtgtggtgaatgacctagacatctttttttttttttcaaatatgtacacaaatgactctgtgtatatcagatcggcatgtgggtgtgtgtataggtgtatccacctatctccatgtcaagaaatatagatcttgccaggcagtggctcatgcctgtaaccccagcactttgagaggccgaggagggggtggatcacctgaggtcaggagttcaagaccagcctggtcaacatgatgaaaccccatctctattaaaaatacaaaaattagctgggcatgggcgcgcctgtagtcccagctactcaggaggctgagacaggagaatcgcttgaacctgggaggtggaggttgcagtgagccttgattgcaccactgcactccagcctgggtgacagagcaagactccatctcaaaaaagaaaaaaaaaaagaaatatagatctccattatccctttaacagtgcagagtaatccactgtatggatgtgacattattcatgtatataatcagaagttaatggatctaaatgtactgttttcagttttttgaaattacagacaggctgcgatgaatatccttaaacacatgtcttcatgcacttgcccagttatcttcttgggataccgttggtgggatttagagaaaaatcactcacattagggagggtatatactgctgactttgacccatcaaatccagccatggattctctgcaaactgaggggccacccagctccctgaacagtggtcttattctgctgggtccttgtgagggcgtagcatagcctcacatcctaaattaaagtcagttcaccggctgctgctcgggtaactggcgagagaaaagagcctttgcctctccgcagccggggaatttccaaatcctgaaattgtcctgtccagacacagtaaatagtttggccacaacaatctctgcatccacctccctcccatctgtctgggctgggcatgcccgtaatgtttttcattctgtgacaggcttgagcatccttttcttaaaggagacaaaggagataaaagggcctgggctcagaattttgcaagcagaacacacggaggttgtgccaagacagagatggtggctcgatggccagctaattcttgtttatccaacaagccatgctagttgctggggagacccagagaaatgagacacagtccctgttcatgggggttagctgtgtagtagagttgatagacccatggggccatggagcgggtgttggggatggggcagaggctactccattatcacagacttcagagtgtctttccagcaagactagccacacagtctgcctttaaagtcccctggtaagtcactcaaaatgatattttcaagtgcctagcatttacatcttctgggtgttggggattgacatctgttatcacaggcaatggcgcttttattatcattggaacaggtggatggggatgtcagccctcctctggcaggaccaaagcactggccatctgcaaagggaggacatttgggtgtcctcggacttgggcaaaggtgcaccctaggctttagagagcccaaaccaattttcctccaaatgtcctctatacctggtttttctaggttagggttcaggacccaatctgcttacatccacaaatctcttttaatttagaacagcctctattttcataccgtgaattgaaggaattaagctactgtccgatagaatattctgccttctagatttcactgattggtttcttactgtgagtttggatagttctgtcttgtctaacatacctcactgagtaattcagaaggagaaagcagaaaaaaacaaaagtcagtgagcatagaaaagatgagagatgagaattatggaattacaaattttacttaatgggaatttccagaacatttcaccaagtaactgcagacattacattactttcaagcacgtctggaatatttatgaaaattgaccatttatcttgccaaaaagcaatcttttgttaatgccaaaaggatggattgaacaaacaatattttctgaccaccatgtacttcaataagaaataaataacaaaaaagcatagaaataggaaaaacctttaaataattcatgggtaaaaaaagaaagcataacaggttttagaatatgcttagaagcgaacaataatgaaaattccacgtatcagaacatatgagaggcttatgatataggagaaaaaggctgaaaatcaataagccaaacatttaacatgagaagttaccaagagaacagctgagtaaatcctaaacagtagaaaaaagaaaatttacaggtaagagcagaaataaatgaaacagagagcaatcataaaattgacatgacgaacaaagccaaattttgtttttttgaaaaaactaataaaactggcaaacctttggcaagactaattaggaaatagagatgggacccataaagtatagcagaattgaaaggaaattggctgggcgccgtggctcacgcccgtaatcccgacactttgggaggccgaggcaggcagatcacctgaggtcgagagttcaagaccagcctgaccaacatggagaaaccctgtctctcctaaaaatacaaaattagccgggcgtggtggtgcatgcctgtaatcccaggtacttgggaggctgaggcaggagaatcgcttgaacctgggagacggaggttgcagtgagccgagattgcaccattgtactccagccagggcaacaagagcaaaactccgtctcaaaaaaattaaataaaaataaagaaaggaaacatgacttcgatgaagaatcaattttaaaaatgtaaaaatatgatgcaactttatgccaataattttgaaaatgtaaatcaagttgcacaaattttacatttaagacattttaaatgtaaacgatgttttaaccatttaaaaaattgaattggtgactaaaaatcttcatatcaaagaaacagcaggactagacttttttttttaaacagaagggttttaccaaacatttaaggaatgaatactttcaaatacaaactattccagcaagtagaaaaattaccaatacttgctaataatttttacaaagttggcttaatctgcttgttatcccaaccaaagactgtttgaggaaggaaaatatagaacaatcttttccataaacaaaacatcagtaaactgaatccaagataatacatcatgaccaaattggattagagtacactagaatagattagaaaagtaagtacgtaatttttcacattaacagatagaaggagaaaaaccataggatcatttcaataaatgcagaacaggtgtttgctgaaattcaacctctatttatgattaaaaaactaaacaaattaagaatataaagaaacgcttttaaactaatacaggatgtctttttgttatttatttgtttattttatgagatggagtctcgctctgtcacccaggctggagtgcagtggtgcaatcttggctcactgcaacctctgcctcctgagttcaagcgattctcctgcctcaacctcctgagtagctgggaattacaggcgtgcgcccctacgcccagctaacttttgtatttttaatagagacagcgtttcaccatgttgcctaggctggtcttgaactcctgacctctggtgatccgcctgcttgtcctcccagagtgctgcgattacaggcatgagctaccacgctcagccataaaagatgtatttttttaaaaattccccacagtgaagactttagtaaatattaaaatgttaagatcagtaacaagccaaggaaacttactctcaccattctattaaacattaaagtatagtagggccaggaaaaatgaatgaaggatacaacattgggacagaagacacaaaactgccataacttccagataatatgattactctctctcattgtggaactgcctggaacagtgcctggtgtgcagtaggcactcgaaaaatatttgttgatcattatgttgtgacttactttatctcaagttattttatttatttattttttgccttgaagccttctgtttcttcccccctctgaatactgaaagatgtatatgtgcttttttttcttctttttttggagacgaagtttctctcttgtcgcccaggctggagtgcaagatcactgcaacttctgcctcccgggttcaagcaattctcctgcctcagccacccgagtagctgggactacaggcatgcaccaccacgcccaggtattttttgtatttttagttgagacggggtttcactacgttggccgggttggtctcaaactcctgacctcaggcaatctgcccaacttggcctcccaaagtgctgggattacaggcatgagccactgtgcccggctgatcctggacttttgttgttgggaagcattttagtacaggtgcaatctctttacttgtaagatttatgtgcagattttttatttcttttcaaaccagttttggtaatttgtgtgtttctaggaatttgtacatttcatctcggttacctaatttgttggtgtactattctcccataatcctttttatttccgtaaggttggtagtagtgtccccgctttcatttgcggttttagtttttggcattttttcttttttccttagtctagctaaagctttgttaattttgttgattttttttttcaaatatcaacttttgattttgttgattttctctgttgtttttctactctctgtctcatttttctccatgttaatcttttatttttattatttccttctttctgctagctttctgtttaatttgctcttctttttctaattccttaaggtataaaattaggttattgatttgaaatctttcttttttgatgtaggcatttagtgttagaaatttccctttgagcatcacatttgcagcatgccattaaatccttgccttttaacaggaaagtttaattaattcaaatttattatgattacctatatatgaatttatgactacatcttattgtctcatttattttttttcctgttgtttataacttgctcttttttggactgttttgaatagatgaagatttttctcttatttctgtttttccactttgttggtttggaagttttatattctgtttttattctctcaatgactaccctgcaatttatcatatacattgcagccttgaactcctgggctcaagtgatcctcctgccttggcctcccaaagtgttgggactaaaggcatgagccactgcatctggactatcatatacattctaatgttaaccaatctcttttctctattttatcttacctgtaacagaaattttacgtttattttgcttcctttgcaaactttatattatggaaaatttcacatctatacacaagtaaaaaacaatatagtgatatgggtgcagtggctcacacctgtaatctcagcactttggaaggccaaggtgggtggatcacaaggtccagagatggagaccatcctggcaaacatggtgaaaccctgtctctactaaaaatttaaaaaattagctgggtgtggtggcgcgtgcctgtaatcccagctactcgggaggctgaggcagtagaattgcttgaacccagggggcggaggttgcagtgagccaagatcataccactgcactccagcctggtgacagagtgagactttgtctcaaaaaaacatatgtgtgtatatatataatatatgatatatattatatatataattatatgtaatattatatataatacatatatataatacatatataatatatatagtgaacacccatgtaccaattatgtctccaacaattatcaatattttgccaattttgtttcatctatttccttatttttctttttttgttttctatattattttaaagtagatctcagatatcatgtcatttcacctgtaaatacttcattatgcatctttaactcagacattttgtttttatataaccactgtctaataattacattgtttctatcattcaatattcagttcatatacaaatttttctgtttcaaaagcatcttttcaggtttttttttcagatcaggattcaaacaaaggccacatattgcattttattgctgttccttgtctcttttattctatagggaaccttgttttatttccatgccaccaatttattaaaaatctggtcattttggagaggcatgtcctacattctggatttagctgattgcttccttgtggtgccttcttcttctatcccctgtatttcctattaaccagtatgtatgtctagctagctaaattaggttcagatttatttacttaggaaggaacattcacaagtgatgctcttacttcctgtttcatcacatcataaagcatgtaaggtctggttgtctccattttttaaatgataattttcataaatggtttcaggtgctatcagcctaatctcttccttatgaagttccctattcatctttcacttaacggattggttgttcattggtgatcattggctacatccatggtttcattagggattgtaaaatagtgatttcctaacatttttctgcatttagtagctgaaattcttctataaagaaatttccctcatgcactatttggttactgttaaatcgacccatcttagtaaaaagaaaaaacccaaacaacaaagaacccttcaagttggcttctgtgtcctttgacgtgatcccagcagtctgtgatagcttcctttttgtctaacacaacgtattctaggcaatttttacaattcctgccccagacctggaaccagctgttatgttaagaaacgctagttcctttaggggaaaatgatacttagagaccacaatctggggactgaggagtgatcattactagtgtgttttcatgccttccaggattttcagtgcacatattaggaaatgagtgcattctaaaagaaaagagttatgagttcatactgatatttccaattcaaatttatgattacaagagtttaactcaaaatatttggtttaatacttgtatatttttttctttcactgaaaatcttggtttttgttttgttttgtttttagagatggggtctatgttgcccaggctagggtgcaatggctgtttacaggcacaattgtagcacactacagcctcaaactcctgggctcaagcgatcctcctgcctcagcctcccagtctataggtgtgcaccaatgcactcaactgaaacttttgtttttttaatgagcaaacgtatgtattatttggcttatcctataatatacctataggtattccaaaattaaaaatttcaaaattgctactaacaataagaccctgaatatagttcaacatttctatgtagttcttattgtctttagaatattttccactaggaatgtacacttaaaatactgtgttttaaagtaacatgaaataattttttaatgtgtctatgctactaacttgatgtattttagtttagcttgtttaaatttgttttcaatttttagggatttttttctattttgatttcattttattttgtatttatgtaaaatttgttttattttaaagtgaaaactgtaaaacaaggtgtcttcacagaagtctcctttccatcctactttaccctgtttactgccttcctcttcacattgtatagatttttggtttggtttgtcctcaccttgcattgctccctttctggagacacatatttttctttttaatcacatataacacttctttatcaacttgatatatcagattttgtatgataacatcagggttttaggctataaatccaaattattctcccaagtagtattattaaatccaaaaccatcttgaatctttacctaaccccctccacatacacttagaagttttttttttttgtttttttgtttttttgttttgagacagaatttccctctcttgcccaggctggagcacagtggcaccatcttggctcactgcaacctccacttcccaggttcaagtgactctcgtgcctcaggctcctgagtagctgggattacaagtgtgcaccaccacacctggctaattttttttgtatttttagtagagatggggtttcaccacgttggccagattagtctcgaactcctggcccacttagaggaattttattttaaaattatttatttgttttttgagatgtagtttcactcttgttgcccaggctggagtgcaatggcgcgatctctgctcaccgcaacctccgcctccagggttcaagcaattcttctgcctcagcctcccaagtagctgggattacaggcatgcgccaccatgcccagataatttttgtattttagtagagatagggtttcatcatgttgcaggctaggttttagggagaggttattattattattattattttcttttttgagatggagtctcactctgtcgcccaggctggagtgcggtggtgtgatctcagctcactgcaacctctgccttccaggttcaagcgattctcttgcctcagcttctcaagtagctgggattacaggtgcccaccaccaagcccggctattttttgtatttttagtagagatgatgtttcaccatgttggctaggttggtctcgaactcctgacctcaagtgattctcccacctcagcctcctaaagtgctgggattacaggcatgaaccaccccatcgggcccacttagaggaattttaaaaagactgcttaaaattttggagtgccatatggttaatatgtgaaaatatttaggtttgccctaaaatcttctaatttatgggtgaaaatgcatgcttcactccatatgtgtttgtgtttatattttaattgcaggtaatcctaatgtaaaacttctaatttattaaggagcttttgataaaaccaaatgcctactgattcatgtttaaaattcaaatttctcaaagcaattatgaaatatgcccatattatacttatttaaaaaactaaaaataataaataattattgaaagaagctattgtacctttggttctttaccccaaaagttcaagtggaattttttttatagatttacataattttcttttcttttatttatttatttatttatttatttatttatttatttttttgagatagagtctcgctctgttgcccaggctggagtgcagtggcttgaccttggctcactgcaatctctgcgtcccaggtttaagcatcctcccagctcagactcccgagtagctaggactacagatgtgtgcaccaccacacatgactaatttttttttatttttattttttgtggagacggagttttgccatgttgtctaggctggtcttgaactaccggagtcaagcaggagtcttgcctcagcctcccaaagtgctagaattacaggtgtgagccactgtacctggcctagatttacataatttccgctacaaccgatttctaaaagacagtaggctttataattgtatcacatttccattgtagtatacttcaattgtggttctatgatcatatatttgcagaaggttttgcctatttagttttagtgcaaaaattcaggtttttgcatggaagcaggctgtgctatacctccaattcccaattttgtattttgtagtaattgcacttaaccttacggaaactaacaaaattactaagctttaaaattcagattaaatttaaaatgttggctttcattatacattccctataactgtaatttagaacacataccatctctcaaatttgaaaaaaatttagaaaaacaacaaaatttatacatgctttacagagtcatacctgagatcttgagattatcttttaaatttaatacaccaagctctttccttgaggaaaagttttctatccataaaataatctgaaatcagagttgcttctaagcaaacacacttaaatttcagctatctatttagtgtcatctagtagagtaggattctttattggaaatatgaacaatttacctctatttttggctgcaatattctgagtttaacccgaggaaaaaaaatgttcattttgattaatttttgatttttcagatattccacttttagtagacaagtgaaatgctgtcgtttcagaccttttattttttaaatgtgatattctctttattaaatgtataaactcaaaatcctagttatttttgagatttcaagttcattttacactttgtattattctaagaagagcacatgcttggttccatttacaaccactttaatctttaagttgcatttataaatttagcatctttaatttccttcactactattttaatggcctgaccacaatagtggcatgtgacctgagaccacaaacttctctcttcctttcctgtatctctgaggtaaaccgatcatcccagctgcagtatcagccaaggagtagtgtaaccgagtatcccagcctcgaaatgcattttaaaacttttttttcctttcttgctttcagccttgaaacatactttgaaattctttctctttttcccaccaggtgctcccgtgcacagtgctgacttatccgattatgtgcttgcttagaaatttcagggggcagttttgcaacaagccaggcagagagacccagctgttgaatcctcccgctcaagggaagttaggaagttagtccaccaccactgggctgaagacaggatgacacaaaccagacctccagatgggtgattacttgagatagctatagaacaagacatgcagacctgcattctcctgcaccatgcccgcatattttctacacctttttccttcttaaatcccttcactcagcccagaaggcagagacgtttccctttgaagcttgagcccagccatggtcccatctgctagcatttgaccaatagaagctgctttcctttcaccacataccaagcttctcatgctttgactgctgagcggtgagcagctgaacttgagctggttacagacttggtgcctgagtgaggaggtgtgtgttctgagcagctcagcctgtaggcctggtttccagcgagtggagcagttggccaggcagtggaccaaggcttacccactgatggtaccaggcagggcagggccatttgcaaatgctagctatgctagctacttgtggccagtggaccctgcgactggggccttgggaattcccaacagatgcagagactgcctttgtttggggtattttcctttgcctccttttcatggcatcaggtgctatcatgctctgatggtgtaaggaaagcagcattcagtaagttgatggccttcaggactgggtaagtcaaccagagtgcacctggagttgtctgtctctgccatctgggctgtccagccacctggacctagcataggtcatcttggtgccatctgagcctccatgctatctgcacctaacacaggtcactctgtggtgccctctgggtttgacacaagatctcaggacttttctccagtctctcctctttggggattggtatggagtgctctgtctgcatgggatctgtctgtgtttgtgtctctgtttagtgttacccctttctccaagggtgctttggactagtctccatcccacccgccaagactaggtcagaaagcatcaagataggctgcttctctcctctgcaggggagaaagtttccaatatcctagcctctaattttgtcatcctctctgagacctccagagtatttcctgaatccatgtcaaggtttgtggggggagaaagcaagtcaactctcttttctagacaatctgagactccacctggttacatattatggccaacttttgtgcacattttaagctgatgggcaaattacagtaagggaaattcagaggtcaaatggttaacctgcaactctacagttaagcagagtcttctaaggctctctacctctcttttcttttctgccttctttgaatctgctgttattcagctactggtgttgagataaaacttactgtttccacattacttggagattttgtttttcttatacatttcagccagttctagctaaaatggaaacactagaaactcacttgaaactgcagaaaaaagaagagtaaaaaggttttcaaaaccaaactgccatagaaactactttacccaaattttggttcacagatttccttaaattggggcaaacagctttccttagccatgtgaacaggttccaatttcatcagaaaaataatttggatccagctatcttttataaagtggtgagtctgtactgctatcttatggctggagttccaaagtaaaagctattggatctttgtgcatgtaggtatacatgtttagatatgcttgtgtgtacatacatgtattatgttgtatattgtgtctagcatgctaccaaattggattataagtaaatgagtactcataaattaaataagtccagatgcttttcaaattcacatgaatctttggtaaataaaactaaaattattgatagaaatgtcttcaaaattgtcagaatacatttttgtctgagttttttaaccaaatggttttatatttgtctctgtctacatgttaaggtgtcagagtttcacataaaggttataggactataaacccaaacaaaaccaaaattatctttgtgtaatttttttttgacaaaaagactagattgttggtttaattaaaacagctgaatcttctgagttattggcaaaatgtgtttacgtttaaggttcttgggtgttcacctgctattcagacttttaaaatggttaataaataaataacttatttatttatttatttatttatttatttattttttgagacagggtcttgctgtgttgtccaggctggagtacaatggtgcaaacttgcctcactgcaacctcctcttcccaggcttaagtgatcctcccacctcagtctcccaagaagctgaactatggctgtgtaccaccacgtggtaccagctaatttttgtatttttttgtagagatgaagtttctccatgttgctgaggctgaaataaatttaaataatgactagatttgtgtaacatctcagttttcagaagtaatctagataaactgttaaaaatggaaaaaattgagtacatgtaaatgagataaatgcttgtaagtggacttcttgtataatttaaaatcttgacattattttgaattaaataatagatgcttttttggatgtctgggtcatttccaattaagaaaaaaataatgtgtgaaaacatgttataatgttataatatgggaaaacgtaatattatggaatggtttataatattatggagtagttgtttcatctacaaaatgctaatatctaacaaacagttcaggatttcttgcttcataggtttttactaaaatttaaggttaccaagaataaaaattctaattaatatataatcgtgtaagttgtgttattgaaaactaacacaatacttttatgtaatttgggggttatttaaaagtaacttctaaaagaaggtagaaaggaccagtaagtaggagagagatgttaagaaagttgtggttatgaagatgtgtttttggtaagaaaggttataaagaaaagaaaatgattttgtataaaaatatagcctcatatggtaaatttttgtcctaaagaaaaatgattatttaggaaagagagaagtataggacaagtcagaaattccaagcatgtcatagacggtctgtataagttgcaaaatgttcatgaaggggaatttataaaaggaattttgtgggttgtttttttttttgagatggagtctgctctgtctcccaggctagtgtgcagtggagtgatcttggctcactgcaacctctgccttccaggttcaaatgattctcctgccttagcctcctaagtagttgggattaagggtgtgcaccaccacacccagctaatttttgtattttcagtagagtcggggtttcgccatgttggccaggctggtctcaaactgttgacctcaggtgatctgcctgcctcgacctctcaaagtgctgggattacaggcatgagccaccacgccaggcctataaaaggaattttgtcttgtggttaagttagctatgattaaaagggaattatttatgatagtatttctaaagaacagtcccctatgttaaaatggggctttcttaagctattgatttgctcttattaaaattacaagaagatttgctttttaattctataaactgtttcttttgaaaacttcttagattaatatcttaaaagttcagcttttgttgtatctcactgcattcagctttttctccctttgaaaaggcctgagatgataactctccttcaactttgtccatcaacttctataattttttcccctctggatctaactgttgtggccagatgctgaaatgttttatcttagaagtctgtaaaagcagtggtttcctccagtataacttgattctgttgtcttggcttttcttgatatgtctaaattttcagttaatcaggaaacttctcatgcagttactaagagtcatgtattcccctgttatactcatgatcttgaacatactctttctgtgtctaattaaattaaagcactttttttcatcaagtttgacttccaggttatctaagtgggcttcccataaggagaagcagtcacaccgcagaaagtttttctttgcctttttggcaactggctcaagaaacaagattctacattttatggaggtaattcctatgctgtcttttttttttttttttttttttttttgagatggagtctcgctctgtcacccaggctggagtgcagtggcacgatctcagctcactgcaagttccgcctcccgggttcatgccattctcctacctcagcctctcaagtagctgggactacaggtgtccgccatcatacccggctaattttttgtatttttagtagagacgggtttcactgtgttagccaggatggtcttgatctcctgacctcgtgatccgcctgccttggcctcccaaagtgctgggattacaggcgtgagccaccatgccctgcccctatgctgtctttattaggttttgtttgtttgtttgtctttgagacagagttttgctcttgccatccaggctggagtgcaatggcacgatctgggctcactgaaacttccacctcccagattcaagcaattctgcctcagcctcctgagtagctgagattacaggcgtgcaccaccacacccagctaattttgtatttttagtagagatggggtttcaccatgttggccaggctggtctcaaactcctgacctcagctgatccgcctgcctcggcctccaaaaatcctgggattacaggcatgagccatcacagctagctataggtttttgattgcttaaaaaaactgagatttaaaagggttaaggcttttacgcccatttatccttctgtattgcctttaaagtcttttagttatctccttgtttcaatgagtaactactattttacaatgaccattattctgttttgataaaatgttttgagctttttaacatatttgacaaacatcctcaaatcaaatcctaaattaagagcctgacttactgctgaggtttatcaaagctataaaagttaatcactggaagtctgtaaaatctttttacagcttccagtcaggtcatgaactcaagtatcaccaccttcagcctcaaaaaagccctaaaaggtgctattaactaatctttgtgctgttaagttatggggctttgactcctgggtacacatatctcatctaaagaaggcattggctcctgccagtctctgacaccaaactcgagttagccaaagcctcgtctttagacctgggcaaaggagacaatcaaagcaaactgctttcatgagacatcgggataggtttgtattgaaaaacattaagattcatttaataattttgcctctatctgaaataatataatttgttctatgccttgatactaaataatttaaatgtttaatgacctatgaacttcctttcctgttctcctcagaactaggcagggcttatgatctttttgtgtaaaacattgctaattctttatgttttgttttgccttcaaaatttgaaactattcaatccctgcaggcccagggactattgcatgagattttaagggctgattttgagagagaaaattatttcagactctccaaatcgagaactagcacacagatgcctaaacggctgaacaaaatgcttgtgttttgtatagccaatttctacaagtcaaaaatacagtagttcaatgcattgaatttatagagaagtcaattttagaaccttgccttttggcttttggtttttggctcttacattgcttaaagggggtttcccctctggcctagactgtttaattagctataagtcttttgattttaagtccctttgccaaaggggttccactgagggacatgatgaacttggggcagatagcatcaatattggacaaaataaaagcttggccattgatgctacatctagcataccttgacaaaagaggcggaatataaacagaaaaaaaatcctaagcctcccaagagacagaatggacccgttttccctcccccaccttcccccatcttggccaagagggatccgaaaggaacctgaaaaactgttcagtccatgacagaaagcagggggttagacacaccttgctacaccttccccctcctttggaattcaggcacaactgaccatcattaccattaaaatagagatcataaaactgacagaactttgaaattctttgtttccctccatttccccatcaggcgctcccatgcacagcgcttgcttatctaattatgtgcttgcttagaaattccaggggctagtttttaaacaagccaggcagagagacccagctgcagaatcctcctgctcagggggtgttaggaacagttagcccaccaccactgggtcgaagtcaggatgatgccaagtggacctctgtagagcgattactcaagataaccatcagaaccagacacgcacacctacaccccccttttcatgagtcccgcatattccccacacctttttccttcttaaaccccttcactcagcccagaaggcaaagatggtctctttgaggctttagcctggccattctcccatctgctggcatttcaccactagaagctgctttcctcttgccacaccttgcttcttatgctttgacttgtgagcagcgagtagccggacttgagccagttacagtagtgccttctctaacctgttcctcagcagaacatttcaagtaaaccatttttgctccttactagtttctgtaatctcagtgggtgtctccctcaacagaccttgtcatagccccatgtaatggatcagctggtagactgaaaaacaaaaaaaagaaattaccttccttctagttgctgatcaccagggctaggctaacttcttccccttttctaactcttcccataatgctaagcatcctaacctcaatcatggcactattctctgcttagcatccttcaccccattctgtcctccctccctcactctctccttccctctctccctccccaccaccttccatcatggtctgactgtgagttgggggggtcttctgttgatgatactttttcctacttaagaaattgggatacaaggtagaattcacataccataaaactcactcttttaaatggtaaaattaaatgattttaagtatattcacagggtgcaaccatcatcataaataactttaggacattttttgttttgagatagagtctccctctgttgcccaggttggagtgcagtgacgtgatctcaactcactgcaacctctgcctcccaggctcaagcaatcctcctacctcagcctcccaagtagctgagacggtgtgtgcccccatgcctggctaatttttgtattttttgtagagatggggtttcaccatgttgcccgggctggtctcgaactcctgacctcaagtgatctgcctgccttggcctcccaaagtgctaagattacaggtgtgagccaccatgctcagcccctttagaacatttttaacacacacacacacacacacacacacacacacacacacacacacacacacatataaaacaaaacaaaaaaacccaactctgtacccatgagcagtcattccccattttccctagtccccccagccctcagtaactactaatctactttatgtctctatggatttgcctactctggacatttattaaatggaatcatttaatatgtggctttttttttttcttgagacgaagtcttactctgttgcctagagtgcagcagcgcaatgctggctcactgcaacctcttcctccaggttcaagtgattctcctgcctcagcctcccaagtaggtgggattacaggtgcccatcactacacccagctaatattttgtatttttagcagagatggggtttcaccatgttggccaggctggtctcgaactcctgacctcaggtgatccacctgccttggcctcccaaagtgctgggattacaggtgtgagccatggcgcccagcctaatatgtggctttttatgtctggcttcttttactgatcataatgttttccaggatcatcaccttgtatcagtacttattatttatttatttatttatttatttttgtagaaacaagatcttactatattgctgaggctggtcttgaactcctgggctcaaacaatcctcctacctcagcctcccaaagtgttggaattacaggtgtgagccaccatgcccggcctccattcctttttatggctgaataatattctcttgtatgaatgtatgacatttagtttatccgttcctcagttgatggatttattttttctactttttggctattgtgaataatgctgctatgaacattcatgcacagatttttgtatggacatgttttgctttctcttgggtatatacctaggagtggagttgctgggtcatatggtaattctacttcttgaggaactgccaaaatattttccaagaggctgcacaattttacattcccactagcaatgtatgagggttccagtgtctccacatcctcattaatactttttatcatctgtctttgatcattttggccattcccatgggtgtaagtggtatcttattatgatattgatttgcatttccctaatgactaatgctgagcatcctttcatgtgcttattgaccatctgtatatcttatttggagaaatgtcttattgtgtcctttgcccatttttaaattaggttgtctttttgttgttgagttgtaagagttctttacatattctggatactagacccttctcaggtacatgatttgcaaatattttctctcattctctgggctgtcttttcactttcttaacagtgtcctttgacacacaaaatttttgaattttgatgaagcccctttaatctatttttctttgatcgtgcatgcttttggtgtcatagttaagaaacgattgtcaaggccatgcatggtggttcacgcctgtaatcccagcactttgggaggccaaggcaggtggatcacttgaggccaggaggtcgagaccagcctggccaacatggcgaaaccccttctctactaaaaatacaaaaattagccgggcgtggtggcaggtgcctgtaattccaggtacttgggaggctgaggcgggagaatcacttgaaccagggaggtagaggttgcagtgagccgagattgcgccactgcactcagcctgggcgacagagtgagactccgcctcaaacaaacaaacgaacaaacaaacaaaaagaaatgattgccgaatcctaggtcatgaacgtatacacctatgttttcttctgagaaggttttacacctttagctcttatccaatcctatctctttaccattcttctcccattgtttctttatcatcttttttattaaatcaacttatctttactttccttcacatcatctcaaatcaaaacttccagaaacttgcttgctgcttcccagcttttcacagtagcttgattccaacaccatgggtttgtttccaagtagtcttctccccacaccccatatccttgttccttattttcagttcatgtaagcgcaatgacacagtgacaagctcacactgccttgccagcatccacactgggctcctgcaaaaatgatctttatggtcacttgctgtgtccgatgatgtgaaccaacctaggccaatttggccaagccaactcctagctttgttttggtagatgttgtttaactgttaaaagtttgaggtcgataaggaggtgtgtctatgtatgtagcagaatctggagtgggggaagcaagtagcacctccttttccacctcaggacactctcagacaaaaactgagtttaacaccaaaagactctcgttttagaactaaaacatgcttatcacagtgactgcgatcactttgaaacacttcatcatagatagtgtgtcccagtggtcggctggcatcatattagaggtggatttcagaggaagggaccacttttgctatcatatctagaacaatacctcaggcttgctaagaagtaaatttaatgtcagaaatgagttttcactgatgaaattaacaacttgttaattagtatgatgactcttaacgaaaagctctaatggttaaattaaagatattaatttccaaatttggatattttaagggattttttagttactgagttctagtttaattacattttaataagagtatatactctgtatgatttcaatccttttacatttattgagacatcttatgccccagtgtatgtctaaacttggtaatgttccatgtacatttaaaaaaaggtatattttacagttttttgatgtagtgtcctacaaacgtcatttagattaagctggttgatagtgttgtttaaatctaccacatctttattgattttttttatccatttgttctatcaattactgaaaatggagtattaaaatctccaactctaattgtgttttttctgttttccttttagctttatcagcatttgtggaatgcagataaagcaattcttagagaaaaatttatagctttaaatgctgttattagaaaaggaaagaggtttgaaatcagccatctgtggtttcattttgattatatagaaaaagaagagcaaattaaacctaaaatatgcaggaggaaggaaataataaagataagagtggaaatgaaataaatagaaagcagataggcaacaggccgggccggtggctcacgcctgtaatcccagcactttgggaggccgaggcgggtggatcacgaggtcaggagatccagaccatcctggctagcatggtgaaaccccgtctctactaaaaatacaaaaaaaaattagccgggcgtagtggcgggtgcctgtagtcccagctactcgggaggctgaggcaggagaatgacttgaacccgggaggcggagcttgcagtgagccgagatcacgccactgcactccagcctgggtgacggagcgagactccgtctcaaaaaaaagaaagcagataggcaatagagaaagacctacaaagccaaaaattgcttctttaaagtgagtaataaaacttctggctcaaaatataatattgaaaaacaatgacatgtaattcaagaaggagtaaatcagtggtaaagtattctaaggtcttgaaattttcagaagggggtagaataatatattaattttaaaatttgttatatatacatgcagagcctcaaagattatccctaaaaagaaaagaaatggagcatgtaaattcaaaacagtataggaaataggaaatacaaataggaatagggaaaacaaataaaagaagcccaattagtaaaacaaaaaacaaaaaaccaagaaagaaaaacaaagaagcatgaaaaaaatgcaaaaaagaataagatgatagaggtgcgttaaaaaataacaataatcacagaggtgtatggactaaacccaccagttagaggacagagattttcaaaatggattacctctcccccatccaactttctaagagatgtattaaaagtcaaagaacggccgggagcggtggctcacgcctgtaatcccagcactttgggaggccgaggcgggcagatcacgaggtcaggagatcgagactatcttggctaacatggtgaaaccccgtctctactaaaaatacaaaaaattagcctggcgaggtggcgggtgcctgtagtcccagctactcgggaggctgaggcaggagaatggcgtgaacccgggaggcggagcttgcagtgagccgagatcgcgggactgcactccagccggggagatagcgagactccgtctcaacaaaaaaaaaaaaaaaaaaaaaaaaaagtcaaagaacacagaaagcttgaaaataaaaagattttttaagtgccaagaaagcaagtttatgatatcaacatcagataaaaatattctttttttttttttttttgagacagagtctcgctctgtcgcccaggctggagtgcagtggcacaatctcggtttaccgcaagctccgcctcccaggttcacgccattctcctgcctcagcttcccgagtagctgggactacaggcacccgccaccacacccagctaattttttgtatttttagtagagacggggtttcaccgtgttagccaggatggtctcgatctcctgacctcatgatccgcccgcctctgcctcccaaagtgctgggattacaggtgtgagccactgcacccggcccagataaaaatattctttaaagaaaagtcattactaaggatagagagggtatgtacataaagataaagtattttaattcaccaagatgataaactaatttaaaacttgtacatatcttatagccttaaaatgaataaagcaagaatcaacagaaaaaagaaaagaaacccaagaagaacttgacaaatccaccaccattatggaagattctaacatatttctatcattggtagatcatgcagaaaaaagaacctgtaagagtgtaaaagatttgaacagtactgctaaccagcttgattgaatgctcatttatagaatgttttgcataagaattagataatacacattcatttcaaactcttgtggaacatttgtgaaaaatgaccatgtattatgccataatcaagtctcaataaagaccaaagattgaaattatacagatcaccttctgtgattatattgcataaattataaatcaacaacaaaaaataaattattaatacatttggaaatgaaaatgttcactttttatacagtccattagtcaaagacaaaattctaatggaaattagaaaaatgttaaactgaaagatgatgacaatatcacatattaaaacttctcacatgcaattaaaatagtacttagagaaaaattgatagccttaatttcatacactggaaaacaagggagactaaaaattaatgagcgaaccatctatctgaagaagttagggataaaactgcagcagaacaaactcaaagaaagagaaggaagctaattactattgtctgaatgtttgcatctccccccagaaccacatgttgaaatcctaacccccggtgagttggtatcaggagatggggcacttggaggtgagtaggtcgtgagggtggggccctcatgaatgggattagtgcctcttataacaagaggcacaaaagagattatctgtgtctgccatgagagggcatagccaggaggcaccctctatgaacctgaaagtgagccctcatcagacactgaatctgttagagtctttatcttggacctcccagcctctggaacagtgagaaataaatttctgtgtttataagctatccagtctatggtattttattataacaacctgaacagactaagacagaaataataaagggtaggccaggtgtagtggctcacacctgcaatcccagcactttgagaggccgaggtgggtggatcgcttgagctcaggagttggagaccagcctggtcaacatggcaaaataccatctctactaaaaacacaaaaattagttgggtgtggtggcatgtgcctgtagtcccagctactcaggaggctgaggtgggaggagtgctcaagcacgggaggtcgaggctacagtgagccatgaacgcactgctgcactatagcctaggtgacagagtgagatccggtctcaaaaaaaaaaaaaaaaaaaaaaaagagagagagagagacaatagcttagtaagtggcataatccacctttctggcttctcagcatttgtatacacaaatctgactttcaaataagaggataggctgggcgcggtggctaacgcctgtaatcccagcactttaggaagttgacacgggcagatcacttgaggccaggagtctgagaccagcctgaccaacatggcaaaaccctgtctctaccaaaatacaaaaattatctgggcatgatggcacacacctgtaatcctagctactggggtggctgagtcaggagaatcgcttgaacccaggaggcagaggttgcagtgagccgagattgtgccactgcactttagcctgggcaacagacagagactccgtctccagaaaaaaaaaagacaactctatgtttacacttaacaggttgcaactatccttcatgcaaatgaagacattctcagtctttccccaaaatggggagatgcaaagattccaacagcattgtatccatctccggacaatgttaataacccctcaaatccagtcacagtgccggctgaatattccgttatctaaatactgaattggaaagttaacttccaagaaaacttatcaaaaaataaataataggaagggagagaaagaaggaaaaaaagtggttaacatatacaaacacatacacacacacaaacacagcaaacgaagaaagaaaggtacacaactgctacagtccttgtttctgtaataggccatgtggctgaagttgacattccaattctgtcttccactcttccttgtacatatcttttgctctcaactggctaggcctctttgcctgatggagtgacctaaatcttcatcctgaggtgtctggatccttagtggtcctgccttttttgactgtcatgttttttcacttatttttatggttggacatggaagtcctaaggggcatcctagagcatccttgggggttcagatgtggtcctccctacctccactgtgtggcagcaacccaatttctccttgtaatagggatcagtcgccccaggcagtagagtaacccctttcttctctcggttcagtggcatgaagattcccaatggccagcagcagtcccaacatccaattcaatggagctgcagttgtgtcctctggtggcaggattcctctcttgggagccatgaccatgacctccaaacctgcagagctcagagctgtggagatgggaagaaagattctgcacacaggttattaggtgtgcagtgagaggagccactcccatgtctatctggaattccatattctggtgataggagagaaagcaccacatactaatttctgatccaaagcataaactgcatcctgttgatagaagtcaaatcctttcaagttcttctttcaccctggacgattctctcttgagagatcatttatcataccagaaatctggtatggtaaagcagattttggaggcaaagacagggaggtgaggcctgaggcttgagacagaaagaaaagaggaccgtagagagaaggcacacagaggggcccagactttgtgttgttcatgtccttgagtaaggggttaggagggataagaagagtcaatagaggagttcttataagaagaacagaattgccacatgcattgctataaaaacagagtctcaaggagagagggtcagcacttccaggcaccacaggttagccggcagagaaggatgagcatggctctgggcatcccttgctagggcacccattctctgtgaactcttgtgcctgaatctcattgactggctttcgaggcttaaagcagaaaagcaccgtgtaacttggcttaggaattgctcttagacaaatctatagatcctggtctcttaacatctgctttccccggaagccagcagtgggagctcccctttctccactgatgggtccaaatggaagcgttcctgggtatttttggttctcagccccatcttccagcctggaggggagggttgtaacagttcacaacatgagcactggtgaaaatccagttactccagcagcaagagcacaacctatgagaggcaggggggttctgccctcagactggctcttgcatagggagagaagaccttgtgctgataggactcacctgtttggcacaggaggcacccatcagcgctgttcatggtcctgaactacagctgctggtctctctttttttgtttttgtttttttttgagatggagccttgctctgttgcccaggctggagtgcagtggtgtgatcttgactcactgcaacctccgcctccgggttcaaacgattctcctgcctcagcctcccaagtagctgggattacaggcgcccaccaccatgcccagctaatttttgtatttttaggagagatgaggtttcaccatgttggccaggctggtctcgaactcctgacttcaggtgatccacctgccaaagtgctgggattacaggttgagacaccgcacccggcccagctgctggtctctattgcattctccttccactttccatagagtcagtggtgacttcagtccagcctctcccaagaattgggaatcaagttagcaaggacgtgagaggagaggggaacatggctggaatcctttggagaataatgctgctgagacatttgcagggagaagaaaatgggactttttcttttggtcatctttgacaaagttttacaattaccaagacctctgagaagctgggaagcgcatgacaccactataccacatccctctgctggcaagttcatagaaggggatggagacctaggactgtgaattccaggagtgcagggtccatattggactcccttatcccttgtcagtgtacaaggcaggcattcaataagtgttggttgaactgataagatgttgggtgtaagagactaagtacaggaatacctcagagatacggtgggtttggttccaggccatcacgataaagtgaatattgcaataaagcaaggcacacaaattttattgtttccgagtacatataaaagttatgtttactctatactgtagcctattaagtgtgcaatcgcattattctaaaaaagtacataccttaaaaatattttattgctaaaaaggctaatgatcatctgaaccttcagtgagttgtaatcttattgctggtggagggtcttgctttgatgttgatggctgccaacagatcagggtggtggttgctgaaggctggggtggtggtggcaatttcttaaaataagacaacaatgggctgggtgtggtggctcatggctgtaatcccagcccttttggaggccaaggtgagtggatcacctgaggtcaggagtttgagactgggctggtcaacatggtgaaacctcatctctaccaaaaatacaaaaattagctcagcgtggtggcaagcacctgtaatcccagctacttgggaggctgcggcaggagaatcatttgaatcttggaggtggagactgcagtgagccaactgcaccagtgagccaacgccactgcactccagcctgggcgacaagagtgaaactctgtctcaataaataaataaataaataagacaacgatgaagtttgccacattgattgactcttcctttcatgaaagattctctgtagcatgtgatgctgttttatagcattttacccacagtagcactcctttcaaaattggtgtcaattctctcaaacctgctttatcaactaaatttctataatatttaaaatgctttgttgttatttcaacatgttcacagcatcttcaccaggagtacattccatttcaagaaaccactttctttgctcatctataagaagcagctcatcattcactcaagtttgatcatgagattgcagcaatgcagtcacatttataggcttcacttctacttctagttctctagctatttccaccacatctgcagttctttcttttactgaagtcttcaactcctcaaagtcatccacaaaggttggactcaactcctttcaaactcctggtagattgatatgttcataatggcacctagaatgataaatgcttttcagtaggtttcaatttactttgcccagatccagacttgaaagctgaaaggactccttggtccatgggctgcagaatggacattgtgttagcaggcaggaaagcaacattcatctccttgtgcatctccagcagagctcttgggtgaccaggtgcattgtcaatgagcagtaatattttgaaaagaatatttgaaaagaatatttttttccgagcagtatatatcaacagtgggcttaaaatatccagcaaaccacgctgtaaacagatgtgcagtcatctaagctagagcactggcagagtagatttagcatcattcttaaggaccctaggattttcagaatggtaaatgagcattgacttcaacttaaagtcaccagctgcactagcccctagcaagatagtcagcctgtcctttgaagcttcaaagccaggcattgccttcccctctctagctatgaaagttctagatggcatcttctttcaatagaaggttatttcatctacatggaaaacctgttgttcactatggccaccttaatcaatgatcttagccagatcttctggacaacttgcagctgctccatcagcacttgctgcttcaccttgcacttttatgttatggagacagtttctttccttaaatctcacgaaccaacctctgctagcttcagacttttcttccgcaacttcctcacctctctcagccttcatagaattgaagagagctagggccttgctctggattaggctttcgcttaggagaatgtcatggctggtttgatcttctatccagacccctcaaactttctccatatcagcagtaagcctgtttcactttcttatcattcatgtactcattggagtggcacttttaatttccttcaaaggcttttcctttgcattcacaacttggctaactgcatagtggaagaggcctagctttcagcctatcttgtttcttgacattccttcctcattaagcctaatcatttctagcttttgattgaaagcaagagatatgtgacagttcctttcacttgaacactgagaggccattgtagggttattaattggcctaaattcaatattgttacatctcagagaatagggaggccagggcagagggagagagatggggaacagctgttggtggagcagtcagaacacacacaacatttatcaactaagtttgctgtcttatgtgggtgtggtttgtgatgcctgaaaacaattacagtggtaacatcaaagacactgatcacagatccctgtaacagatataataataatgaaaaagtctgaaatattgtgggaatttaccgatgtgacacagagacctgaaagtgagtacctactgttgggaaaatcatgccaatacacttgctcgatgcagggttgccaaaaaccttccatgtgtaaaaaaaaacacagcatctgtgactcagtaaagtgaatcccaattaaatgaggtgcatctgcactcaggataagttatgctttcatccctcctctaaggagagcaaaagggctcaaatttgaggtccaagtatgtgtcaggcatttgatattagggtctttcacttaattctcataggagatttatcacaaatttcccaatcaagattcagcctcatagaagtgagcctcctgagtgagactctgtggctcctaagtggggaatctagggctcgaacccaggtcttgctgatcccatgtttttctcaccatcactggatacttccttcttatgcaaggagagaaatgcaaattctacaaaagaaaaatgggcttgtggtctagacaagcatcttggttaatgtctgagggtcatgttaaaagcttagaaagttagttttgtctgctgggcatggtggctcatgcctgtaatcccactaccttgggaggccgaggcgggcggatcacctgaggtcaagagttcgagaccagtctggccaacatggtgaaaccctggctctactaaaaatacaaaattaggtgggcatggtgtcatgtgcttgtaatcccagctactcaggaggctgaggcaagagaatcgcttgaacccaggaggcagaggttgcagtgagctgagattgcaccattgcactccagcctgggcaaaaagagcgaaattcaaaaaaaaaaaattggttttgtgatggcagctgttgctaatcagggtatggagtcaggagcttaggtctagggttgagctcagatctcgacatggaccaggcttttcccctgtctcagtgcctcatttatggttcagtttcaggcagcaaaactaatgaatgatttccaaccacagaagccgtcactgggagagccaataaagatacgacagatctggcaggagaacaagatccagcccaggtgatggggtgtgaggcttggtcttagctacaggtaggtcgtttcccttagctcctggatgactcagcttggcagccacccagacttctatcaggacccagaggtgctgccagctctggagccatgtcaggccagctttctccccatgtcaccagggaatggagatttttctggtctgctggggcttttcctaattctgcacggtcggcttgagactgtccacctgttgctccatctaggctgcgttgcccttatgagccgtcttcacaaggtacgtttggaggatgtcaggatgtctttcaaaggatttgtagacatgctttaaagtacttacggagtcaatgtcccctttgcttcaagcttctctcctactgtaggaaataatgtctacggtggcccatttccaaggcaaagtgcctcaaataggcttgggcccacaacctgcggatggacaggatatactagacccctgctggtcagggcccccttagttacccccacccaaagcaaagcgtttagtctagaatgaaagtttactagcctgaaaaatagctcactttatctattcttatcagcttgcctggccacctgggtcataagtcaaatacttgaagagcaccttagctgactatgattgcagtgcattatgggccacaacaaactgcagcgagacaaccctaaagtaaacacctaaaagccccaacccaacgaccaataggtgatgtctgggaagatggtgaccccatggtactcagcctatgaggaaccgggggagggacttgcctactaggggatacattgcttgttgtaactgtactgggtgtgcctgcctaccagacaccagatcttgcaagactgtcattaaaagtctcacttctggctgggcgcagtggctcatgcctgtaatcccagactttgggaggccaaggcaggcagatcccctgaagtcgggagttcaagaccagcctgactaacatggagaaacccccatctctactaaaaaaaaacaaaaacaaagaaaaaacctacaaaattagctgggcatggtggtgcatgcctgtaatcccagctactcgggaggctaaggcaggagaatcacttgaacccaggaggcggaggttgcggtgagccgagatggaaccattgcactccagcctgagtgacaagagtgaaactctgtcacaaaacaaaacaaaaacaaaacaacaacaacaacacaagtctcacctctgcaattctctatgtctctaagttcatcctttgggtttggacaggtgagcatgtttctcatattacccacactggtgggccccgtaggcttcctggttggtccaggagtggatgcctgatgcaggctgcacaaatcagattctctcttctggagatttagaatcgagaaccagtggttatcataggttagccttggctgtcagacctggaaggtgaggagacccagagctgagggtgcccttttgggacaggtgtcaaatccttgtacaaacagagaaaccagactgacaagggggtaggatgaaggagctgaaggagaagcagagccacagaggaccgggcagagagaggggctgccttggtggggacagcctgtagacagcgccaacgacgtggggctggtgctgtccccactgtggtctcaaacaccagactagtgcccggtcagcacagagttcaggacagtggtgcagctgacacccagaaagacaccgcagtggaaagcctggcctgacgctcccagctctctccctgccatgcactgactccatgtcctgtgaggaggaggtgggaggagagttttattaggggaattcatttgtaataattgcctaagtatttgctacttaggagaacatggatctgcaaagggtccatgaccctttgagtcagagtttcactcttgttgcccaggctggagtgcaatggcgtgatctcggctcactgcaacctccgcctcccaggttcaagtgattctcatgcctcagcctcccaagtagctgggactacaggggcacaccaccatgcaaggctaatttttgtattttagtagagacggggtttcaccatgtcggccaggctggtctcaaattcctgacctcaagtgatccgcctgtctcggcctcccaaagtgctgggattacaggcatgagccaccacagctggcctgcaaggggtatttttaggtgttagaagcatctcgaggcatcctttctcaacgtttcacaccacagaccactgaatgggcatttggcacattcatagatcatcaattgtaattcaaaaaaaagtagagtttcatcaatgattttaaatttaaagagagtgtttgaaacattaattatgttctcatatccatgagatcttcatttctttcttcctctctctccctcccttcctccttcctctcctccctcctcctttcttccctccctcccttctctccttcccttcctctcctccctcctcctttcttccctccctcccttctctccttcccttcctctgctccctcctcctttcttccctccctcctttctctccttcccttcctctgctccctcctcctttcttccctcactcccttctctcctttttgctgctgctttgctgtttgctgccatcagggcaggggtggagcagtaagtgggttccacccccagccacaccgtgattggctcaggagtggacacgtgccctgagccagtctaatccatgctaacctcaggaccttcctgggaattgtgggagacagagactctctgttggtccagataggtggggcgtactgtgggcttggcgctgctgtaacaatttttctaccacaggagacgctggtctgaaaagaaggcaacgcaaggaagagaacagagccaaggcacctgcagcgagccagagccagagccctgacatcacaaatgctttaattggttccatttattgtttaatccacttgaaattgaatttctgtcatccccgactggaagtgtactgacctgcatactacctgtgtttcctcacagcaggctgaaaagctgtgccaatattgagctcatccagaattagacgaagtttgtattctttttattacttcctttaaccctgaatcagggtccagaagcattttgttgaccattaactcttctctgtgaataaagcagcatgaggaacaacctcttttattcacagagcaaagctcttcgctgctcagccacagcggcttcaactctggcacgggtcctgaagtgccatttctagcacatgactcacaaagtaaataatctgtaaatgaaaagcctcttatcatactttggcacgaaaaacaaagcgacaagccaggcagcatttttccctcatatttgaaccccacatgcaccaagggctgttttatgccttgcacatgaggagtttggtttgctcaaaagcaaagtattggctaacatgtgtgtgcactagtaattgcatttctgctttgtgtgctctgttatctgatagaggagctttgtcaatatcctttggatctctctccaagcacagtcttcattatgatctgtgagctgatttacggtcttcttggcaattttacgactgatatctaggtgcatttgctaagaggacagcaatttagaatgatgtttctgtagctttagtctcctccgcacctttaataagaagaataatcaattttacattagaaagttattttgtgcttattctggaaaaatggaattggttgctttttctaaagataatgagaaacactttttatggctccagactactatatatcagcattttcattttaacagtaatatatcgaggactaggggcaaatggattgcttgtccaataaatgaaatgttcaagtattcctcactgaacttagactcacaattttcatttatggttgcatgtgtaaaatcaccactcaagaacttgtttgtccttgaatatatagttttgtatttccatagttatattgcagaaccatttactcattatgtttacagtgcccttctgaggatttatgctgccattttcatcattactttgcattttatagaacctctttttagtcattgatccattttggtgaattggagatacagtgtgacatatctactacaataaccatgaaaattaaaaaataacagacataaactataacttgcaagcgagaagccctatgtgaatatgatttattaatactttgttttaagtctctttcccctggttctcacctattgaagctttttgcttttctgtcagccaagaggtgccaggtaggtaaggagcatactgggtaactgtgtactccgtgcccaggcctactcatgcctctgtgggctgggcactgatgcaaacttctgccaggcatggccctcttaagtggacaggggatagaaaaataacctagaaatgatgacaaatgtggcttctttccaatgatcacatctcttcccttttccttggcttacttattggttcagaccttcacaaagaagttgaccaagtgcagtgacaggatgatgtgctggtcatcatcctgtcgctacactgaaacatccctttctccctttttgggcccatggtggagtcaggctttcccgcatcattgaggttaggtgtgaacacgtgatttgctttggccaatgaaatgggagtgaaagtgacacatccctgccaggtacaagctttaacggccagggaacaacgtgcgtcatcactgccttgaccctgtggtcaatgttccagacaggggtctgtgtcagcctgtgtcccttagtgaggactgggtatagactgcccctctccacttcatggatatttaacttaagcaagaaaaaggcttcatgaacttaggccactgagatcatggaggtttgttcctgtagcataacccagcctcttctgtccaaaacaagtgggtacacaaatccaaaaaggacagaaatccctttgcccagttcccttcctgagagctgacactgactggcacccagcctcagccccaagcccagggccctcgtttatagacactcatctgtgtccaagttttgttcttctagttgccattcttccattttctctttgccagtaacacacaaaaaatgagagattttctcagtattggtatggattttcaattaacaacaacaaaaacaacaaaatactcccaatataataattctttttttttttttttgaaacaggttttcgctctggtcacccaggctggagtgcagtggtgtgaactcagctcactgcaacctctgcctcccagattcaagtgattctcctgcctcagcctcccaagtagctgggattacagatgtgtaccaccacacctggctaatttttgtatttttagtagagacggcgtttcgccatgttggccaggctggtctcgaactcctgacctcaggcgatctacctgcctcggccttccaaagcgctgggattacaggtgtgagccactgcgcccagcctcccaataggagtgtttaaaaacactcatttttaaaaacgaggccgggcgtggtggctcacacctgtaatcccagcactttgggaggctgagacgggcggatcacccgaggtcaggagttcaagatcagtctggccaacatggcgaaactctgtctctactaaaaatacaaaaatgagccgggcgtggtggcaggtgcctgtaatcccagctactcaggaggctgagtcaggagaatcgcttgaacccaggaggcagacgttgcagtgagccgtgatcacaccactgcactccactgtgggcgacagagtgagactctgtctcaaaaataaataaataaatagaaactagagtgttgggtctaagggcgacagtggtaattaaaacacaaagatcaacgcactgttcaaagattcccagtgcgcggcgctgctagagtcgctgagtcctcacaaccccggctcgtggcgcgagcctggtgccacccgggcggtggtgggagtgtcgcggcccggggtgggtgggattcaggctgccgggggcgggggggggggttgccgcagagggggctggggagggcggcacccccccattgcccgtcctgggccctgcgtcccctggcgggctgcggccagagcagatggcagcaccggcgctggaggtggcagatccccggggaatgagcagcgggatagatcactggctgcagggcagggggcgctgtgagtcgccctggccgagctgtcggagaggagattacttagcagctggtagtgaaaggagacgcctgggcagattggagcagaacggagactcaaagccgggactggggtgcctgttctcacagtcactgacccccacctgttcgaagactggcaagattctgtgaatatgggggaggaagagccaatgattcccagcagaagacgcaagattctccagtgtcataaactggatagtatatgcagagtatgtggaaaatgctagctgggttgttccccaagcaatgcaaacaccatcgtcccttccctccaaaccatgccttgtttgtaccaaggactgcacagaacttggagtgtcaccgagtgacagaaaaaggacccaacacggcgcaaccgctcagcccgagaggcgggtgtattgtcgtcaaccaacatctgaatgacgcttgcaaactgaatttgccgtgcagggtttccaacagcaggcatgttttccagatgctttgaaatcctcttttaaaaaagtgaataagaggccaggcgcagtggctcacacctgtaatcccagcactttgggaggccgaggcgggcagatcacgaggtcaggagttcgagacctgtttgaccaacatggtgaaaccctgtctctactaaaaacacaaaaattagccaggtgtagtggcccgcgcctgtaattccagctactcaaggggctgaggtagaagaattgcttgaacctgggaggcagaggttgcagtgagccgagatcataccactgcactccagcctgtgtgacagagtgagattctgtctcaaaataaaataaaataaaaaagtatacaaggctggctgaagtggctcatgcctgtaatcccagcccattgggaggccgagatgggtggatcacctgaggtcaggagttcgagaccagcctggccaacatgaggaaaccctgtcgctactgaaaatacaaacgattagccaggtgtggtcgtggcacctgtaattccagctacttgggaggctgaggcaggagaattgcttgaacccaggagggagaggttgcagtgagctgagatcgtgccactgcactccagcctgggcaacaagagctaaactccatctcaaaaaaaaaagtaaaaaaaagtacaatattttaataagccaaaagccaccttttttttttttttttttttttttttttgagacagagtcttgctctgtcgctgagtctggagagcaatggcatgatctcggctcactgcaacctccgtctcccgggtacaagcagttctcctgcctcagcctcccaagtagcttggattacaggcacctgccatcatgcctggctaatttttgtatttttgtagagacggggtttcggcatgttggccaggctggtcttgaactcttgacctcaggtgatccatccaccttggccttccaaagtgctgggattacaggcatgagccaccgcacccagccaccaccttcttttttatacatcttaactgtgcctctcttccttgtattttgtgggtgtcatttgtcttttcacagcattcaaatgtttctgtctatttgacatcagtctgtggtttatttgtagccttaaaagtcagatctggccaggcgtggtggcttatgcctgtaatcccagcactttgggaggctcaggcaggcagatcatgaggtcagaagatcgagaccatcctagccaacatggtgaaatcccgtctctactaaaaatacaaaaattagctgggcatggtggcacatgcctgtaatcccaactactcaggaggctgaggcaggagaattgcttgaaccggggagttggagacctggcaacagagtgagactccgtctcaaaaaaaaaaaaaaaaaaaaatcagatccacttactctgagatattttcccccataacttgttttttctttcacagtgctgatgtgttcaacaacatctgaatagtgggaattggtgaaaaagatcattcttggacccaaagaaattttacatccattccaaaacttgttttatataattataattttaatttataaattttagatttgggctagttttgtattgtccaataattattttgacaaacgatttactttgctttctcaggaatttgtcaactcatttgtctcatttttttctttaaaagttttttttttaattaaagactttttttcaaaagcagttttaggttcacagaaaaatttgaagatgcagagatttcccatatgttccctgccccacacatgcagagcagcagtttttaattttaatcaagtccagctcatcaattattcctttcgtgggtcaggcctttggttattgtatttacaaagtcattgtcataaccaaactcatttaggtttcttcctatgttatctttgaggagttttatacttttgcattttacaattagatctatgatcctttttgagttagtttttataaatggtgtaaggtctgtatctagaatcactttttcttttccatatggatgtccagttgttccatcaccatttattgggccaggtatggtggcttacacctgtaatcccagcactttgggaggccgaggtgggcagatcacccgaggtcaggagttcaagaccagcctggccaacatggtgaaaccctgtctctactaaaaatacaaaaattatccaggcgcggtggtgggtgcctgtaattccagctactggagaggttaaggcgggagaattgcttgaacctgggaggtggagtttgcagtgagccgagatcgtgccactgcactccagcctgggcgacagagtgagaccctgtctcaaaaaaaaaaaaaaaagaggatctttgtgtcttagtctatttgtattgctataaaagaattctcgaggcagggtaatttataaagaaaagaagtttatttggctcatggttctgcagtctgcaggctatacagtaagcatggtgccagcatctgcatctggggagggcctcaggctgcttccactcagggtagaaggcaaaggggagcaggtatcacatggcaagaggggaaggaagagagagagaggaggaaggtgtcaagcttttttaaacaatcagctctcgaggaatgaatagaacaagaactcattcactacctcaagaacagcagcaggtttttgaggagggatctactcccatgacccaaacacctcgcactaggccccaactccaacatcagggatcaaacttcaacacgagacttggctttcaacatgagacttggcaggagaccaagcaaaccataacattgtattccctttgcttttttgtcaaagatcagttgactgtttatgtgggtctatttcagggctctctattctgttccattatctatttgtctatttcaccaataccacatggtcttgattactatagcttttaaatacgttttaagtcagctaacttcaggcctccaactttgttcttctccttcagtgttatgttgctattctgggtctttggcctctccatataaagttcagaatgtttcttgatatccacaaaataacttgctgacattttgatttagattgcatggaatccatagatgaaattggaaagaatagacatcttggcaatatcaagctttcctatccataaacatggaatatcttttcttttcttttttttttttttgagacagtctcactctattgcccaggctggagtgcaatggtaccatctcggctcactgcaacctccacctcttgggttcaggtgattctcctgcctcagcctcctgagtagctgggattacaggcacacgccaccacacctggttaatttttatatttttagtggagacggggttttaccatgttggtctggctggtctcaaactcctgaccttgtgatccacccacctcggcctcccagcgtgttgggattacaggcatgagccaccgtgaccagccatatcttttcatttatttagttttttatttctttcatcagttttatggttttcattatatctatcttgtacatattttgctatatttatatcaaagtatttcttttttttgagtgctaatgtaaatggtattgtgttcttaatttcaaattcacctgctcattgctggtataaaggaaagctattgacttttgtatattaaccttgtatctggcaacctttatataattgcttattagttccagaagtttctttttgacaattctttaagattttctatgtagacaaatgctttgtggtatgaatgtttggatcctctcaaaatttgtatgttaggccaggtgcggcggctcatgcctgtaatcccagcactttgggaggccgaggcgggcggatcacaaggtcaggagatcgagaccatcctggctaacatggtgaaacctcgtttctactaaaaatacaaaaaaagtagccgggtgtggtggcgggtgcctgtagtcccagctacttgggaggctgatgcaggagaatggcatgaacctgggaggcagagcttgcagtgagccaagattgcaccactgcactccaggctgggcgacagtgcgagactccatctcaaaaaaaaaaaaaaaaatatatatatatatatatatatgtgtgtgtgtgtgtgtgtgtgtgtgttaaaaactgatagccaatgcaatagtattaagaggtggggcttttggaaggtgattaggctccactctcataaatgggattagtgctcttataaaagaggccagagggagcatgcttgccccttccaccatctatgaggaatgggccctcaccagataccaaatctgctggcaccttgatcttggacttcccagtctctagaactgtgagcaatacatttctattgtttataaatcacttagtttaagatattttgttatagcagccccaatggacgaagacaatggtcatgttatctgcagacaaagacagctttatttccttgctcctgatctgtataccttttatttcttttcctgtcttattgcattagttaggacttccagtaagatgttgaaaagcagtgtgagagagggggcatccttgctttgttcctgatcttagtggaaaagcttctagtttctcaatttgcctcaattttcacagctggtattttgtcactggctactggctacctgctatgactatttcccctaataagttaagattcgtttcaatacaatgtataactcttgaagctggtgacttttagggaggcattgttaaacaaatgcaaatagtaaatccattttatcatgaaagctgaatttgatttagcatgctcagttgccaactccctttatccataatctccctttgcatggaataattttgaaacctatttgattcaatgttattttttgaagtattttcagtttttgaattcagtgacacctcttcaattaaatttgcctgtctaccaatgaccacaggattggactctaatcttgcaaactatctgaatttgcctagtgcttgtattctgggcaacttgcaaacttcccaagacttctatttgtataatgaaacaggatacagttgtcacactttgaatctgtggttatttaatctgattctggagctcacttgagcacaattagaggaaagactctaagaagatttagtttttttaaaagaatgagccagacatttcaggctacaacagtcaaccctatatagataacaaacaatgtctaccatctcaagcctcccaaagttgcaatgccggggctaccatttgtgctctctgagtggtggctggacaaacttgggcagctaacctttacaatcctacgtgccttccaaatttaaaaaaaaagaaaaaaacaaaacagacaagaattagtgattataaactcatacttgcaggcttgaggtagacgctatcctgcgtgttttgtaaactggtgatattttaccaagggccgaggtaggaggaaatggaaatttggtgtttaatggctacagagtttccatttgggatgatgaaaaagttatggagatggacggtggtgatggttgcacaacactgtgaatgtacttaatggtgaatttgatgttgtgtgtatcttactatacattacttttgtttttatttttattttatttttttgagacggagtttcactctgttgcccaggctggagtgcagtggtgcaatctcggctcaccgcaacctctgcctttcgggttcaagcgattctcctgcctcagcctcccaagtagctgggattacaggcgcgtgacaccacgtctggctaatttttgtattattagtagagacagggtttcaccatgttggccaggttggtctcgaactcctgacctcaagtgatccactcgcctcggcttcccatagtgctgggattacagcgtgagccattgcgcctggcccatgccacacttttttaaaaggccttctgtgtgctgattctgctgcctgctcacccctgtttctgctcctcttggccctaaggccacctccctgaagcaacagcaggttgcagtttctggcctctcctctcccacacctggcttctactcgcctctctcctctgctcggctctgctttctgcctgccatgcctttctcttcctcttcaccttctcattccactcccatctttctgacttaggaactgaacatttgggaatcagatgcccaatgaaaaccagctgtgggagtcatagacggtctcagcccttcccctctcttttcttttcatttgcagccaagtagccattaagtcaaaaggcacggggcaggatctggggaccctggaattaattattgacatttaccttggcttggcccccagcagctttgatgcaaactccacccttgttgggagccccatcccctgccccacaccacccaagagcatttcttttcttttccttttctttttttcttttttctgtttttttttttgagacagagtctcgctcttttcgcccaggcttgagtacagtggcgtgatctcagctcactgcaacctccgcctcctgggttcaagcgattctccctgccttagccttcggagtagctgggattacaggcgcccaccaccacgcctggctaatttttttgtatttttagtagtgatggggtttcgccttgttggccaggctgggcttgaactcctgacctgaggtgatccgcccaccttggcctcccaaagtgctgggattacaggcatgagccaccatgcccagcccttaataatgttttctgatgataaaaacaacactccctcatcacaggcaatttgaaaagcagagaaaagttgcaaaaggaaattatccctattaccacctagagatggtgaatacttgaattttttgtttaaactttgaattttatttcaaattgacagaaaattgcatagaaagaggatccgtataccctttacccagattcatcagctgtgaacatttccccggtatgctttaaccctgtgtttgttctatcaatcatgtgtttctcattcggattataaaattgacactttgctctattctagtgttcctcagctttggtctctttggtgtttgaccacgattatgtgacagatggagcctggccaccatgtccctggctgtaccccaggccccagcctagccctcatttgcaccatggggtgtgatcatccccagctcccgggcaccgtgccatggcaaagtcaggtgtggccatgccagggctgcgggcagcctgccaacaagactgcaggttctgcctttatagcagggcgtgcaccagcgcttcactgttcctgccttctgtccttgtgaccttgtaagataagggcgttgggcaaggaaagtgcaggtaggagcaagggaaatgaaggagatgtgaatgaaatagttcgattcaggtagatctgggcatcaccaggcccgaggaaaggtgtattttcactgatgaaggaaaccatgtttttgttgttgttgctgttgttgtttgttttttgtttgtttgagacagagtcttgctctgttgccaggctggagtgcagtggcgcactctcggctcactgcaaactccacttcccgggttcaagcgattctcctgcctcagcctcccaagtagctgggattacaggggcgcaccaccacgcctggctaatttttgtatttttaggagagacgagatttcaacatgttggccagactggttttgaactcctgacctcaggtgatccgcccgcctcggcctcccaaagtgctaggattacaggcctgacccatcgcacctggccatcgcaccttaaaacatttaagacatgttttaaatgctgaaaccaaatggccaacgatcgtatctaaaagggaagatataatcagagattttgagacatcttttagttccctaggaatggaatcctcctgaaaatatggaagttgagtattctttctttttagttttttcagcgacgtcgtggatacaatttcttcagacttgttctactttattcatgttctacattatcagagattctgtggatgcatcactttaatgacagttataatattttaagcattgttaaattagatggcagttagaataagaacaatcagtaagctggacttaagggttagtagaacactcttctcacagttgacagtgtactcataggaaatagtataaccttggctgaggtacctgctttttgagtcataagatctgaaatagggacattttctgtacatttttgtaaagtttgctgaagtagtttaaaacccattttgacatagtttcagttccacctgaatcagcattctgaaaagaacattccaggggtttcctgaaacttacagagctgaaaagctagtgtgcctcccggagtcaggctggagaagcagatttgggggctgcagcagaggtgtcctggctggggtgaagggcagagccagttcctggagggagggagcccagagaaagggcaggtggccagggctgggctagagaagacctagaaagaggccaggaggagaggaggagcctttaggggaaggagccgagttcaccaccctggaggtcccaggaagcagagaaaaggtgacgctgactcactgctgcaggggtcgggagtacctgggtctcagctctgcccttgagtccatcacgcttcgcctctgtctctgagtctggcctctgcatcttcccgctcccattaccagttttgtttgcattttctgtcccaggaagctctctttggcctctggagctgcgtatatctgtagacagcggaccctgctgccacatggctgggcctgccgcttctgtggcttggtcacactcacatgcacgtacgtgtgcatgaacacgctcgcacacacccacatgcatacacgtgtgcacacatgcatgtacaggcacacacgcacacatgtgcatgcgtgtgtacgaacacacacatgcacacacgcagaatcagaaaaggatcctgcccatagctcaccccagactcccctgggtgtcgcatcttgtaccacccaaagtcagggtgtcccagccctctccaggaggcctttacttcccaggctctgtcattcccagaagcagggggctagcatgtgacaaggagtgctcaggctcaggtatggtcagtctgggcagcagggaccaaatcccagtggaaaggcgcaggccggtgagtgagtgaaggcctggtgtccatctgatgcttccagagggcaggggccagcttggacttatctgcaccacacagggccccagcccagggcttcccacggcatgggtgaactgggtcaggtgggcttcacaaggtgtgggaagagagaagacgctggcctgggaattggccacctggctttctttcctggccctatggagggaagggaaggaacattgaactcccccaagtcaggccctggactgagtctcccactcaaccgtagaagccatcatgctgggaagtggttttatccccgttgaagagaggacacagttccactgagaggtgaggtcgtgatgaatgtgtccatgggtgtgtgcgtgtgtgtgtgggtgtgtgcgtgtgggtgtgtgtgtgggtgtgcatgtgtgcatgggtgttcgcacgtgtgcatgtgggtgtgtgtgcatgtgggtgcacgtgtgtgcatgggtgggtacatgtgtgcatgggtgtgtgcacgtgtgagtgtatgcatacatatgtgtacgttggtgtgcatgcatgtgtgtatccatgtgagtgcattgtgttcacgtaggtgtgtgcatgggggtgtgtgcatgtgtgtgcatgtgtgtgagtgtgtgtatgtgggtgtgtgcatgtgtgtgcatgtgggtgggcgcatgtgtgggtgtgtgcatgtgtgtgagtgtgcatgtgtgtgcgcacgtgggtgggcgcatgtgtgggtgtgtgcatgtgtgtgtaggcatgtattgaggggctgggaagtctagtcaaggtggggatatgtcctggtcctattgaaagtctcactgcagcacctctgtagacactgattgtagggagaagattgagagtcagaaggttctccaccatcccagtgagaggtgatggtgcaggctgtggggacagagattagcaggcgagtagggataagtttggaggtggcattggcaggactcagtgatgaactgggtgtcaggagaaagaagaatcctggtaacaccttgggctggggctcaagctcactgctcgctgggtgaatgctggtgtcctgtgtaaagttggtgaagtctgaggaaaaatacatttttgggggggaacccacaaggaatcaggaatgtgaattatgatgcccatcagatatcgagagtggatgcccagtaggaagtggatgtccgagtctcgggctgaggcgaactccaggaccggagaggtgagtggtgtgcacatggggcgggccgatgtctcctgggagaaggtgggagacacaagtggggaggacccccaagtctggtactggtgtttacagatcctggagaagaggaggagctactgagtgagcagaagagagaaagccgcgggtcaggggtgtcaccaacaatgagagaggaggcggctcaggaagaaagtgtgttcagccgggtcatctgctgccggtggaggggcaagatgagaactgaaaactatctctttctcctggcaacctgaaggtcgctggtggtgtggccaagagcagttttcttggagcgttggggaggggacaggagccagattgcagggggatgaaagtgaacaggaggcaggaaactgggacagaacatgtagaaagattttatatctataaatcatatataatttttttctatgaagggatgccaagaatggaggaaaatgtggctccacagggtggagatagcagtccacgtggcttgctgatgggaaggagcctccagtaggggcgatggtgtggaaagctacagagggaaacccactgaaggagaggccgagccctgagcaggaacagaaggctgggctttgacagggcacagactatggcaggccgcggagtcaggaattgtgtctgtttttgtttgagtctgtatccagctcctagaatagcacctgtcacatagtagctgctcagtaaaaacaatgttgcatgaatgaatatagacaccaaaggaggcagggttttagaggtggagtgaaggtgagtgtgatcttttctgctttttggtgctcagtgacggctgaggtagggtcatgggctgaggactgggaggggattggctgggaacgggtgactgcgggagcagctgtgcaggagaggagctgtgctcactgtgccacgggaatgccaggaggattcatttctcatccactggacaacaccagctgaatcgaggcccatctttccacccctgaattgcagctccaccttggtcatataccagcttcccaaatatccttgattctgtttgtgtgtggcattttcctcatctctatttctgctcctggtgcatatactactcttttgattacggtagctttatagcattcctagtttcttttttttttagacggagtctcactctgttgcccaggctggagtgcagtagcgcaatctcggctcactgaaacctccgcctcccagggtcaagcaattctctcgccttagcctccctagtagctgggattacaggtgcacaccagcatgcccggctaatttttgtatttttagtagagacagggtttcaccatgttggccaggctggtctcaaactcctgacctcaggtgattcccccgcctcggcctctcaaagtgctgagattacaagcgtgaaccaccatgccaagtcagcttccctagtttctgatatattgtaagtaccccctcatttccttcaatcacaattattctgtcacttggacttaaataacccgtttactattttaaaaaaagaaagaaagctaagagcagtcatggtgattctatttgcatttgtgttgtatttctgtctatcagtgtatttgggatattttatgtccgttagtaaaactgttcccttctttcaaaatacaggctttgaaactttgttttctttcaaaaatgtttgtattggagtataacttagagttaattgcaaaagcttaggtttgcagttgatgtaaccaccggccagatggggtggaggctttctccagaatctcaggtggctcatgcatgtcattcgatttgttccccctccactggaaactggtgttctgacttctattatcatagattaattttgcctgtttttgaacttcatagaaattacacagtatgaattcttttatgtgtgacttcttttgttcaatattacttttgtggggttcactgatgctttatatgccaggagttcattcatttttattgctgtgtagtattccattgatggagagagtacaatatatttaccatgtataacatattcacaatatattttaatatatattttaaattataatatattaaaattacattgtatataatttatatattaaaataattttatatattataatatattttaatatatgccattgttgctggacagaccgagttatttcgagtttttggctgtcatgaataaagcgaaatgaacgttctttttttttttttttttgagagtctcgttctgttgcccaggctggagtgcagtggcaccatctctgctcattgcaacctccacctcctgggttcaagggattctcctgactcagcctcccgagtagctggaattacaggtgcatgccaacacgcctggctaatttttgtacttctttttagcagagatggagttttgccatgttggccaggctggtctcaaactcctgacctctggtgatctgcctccctcagcattccaaagcgctgggattacaggcgtgagccaccgcgcccagactgtgaacgttcttatgcagccttttggtggacatagcatctatttcagttggatattataatacctaggagtggcattgctaagtcatggagtagatgcttgtttcgctttagtagctgcaactaaacattctatgctgccccttttatgctaccatcagcaatgtaaaagagttccatccttgacaatatttgatgttgtcagtcttttggattttagccatcctggtggggaggggctagtggtatctcactgtggttttactttacatttctctgatgattaatgaggttgaccacattttcatgggttcacaggccattttgatatccacttttgtaagctgctccttcaagattttggcccattttataatgggctctttttcttactgattttctggagctccttatatatttgggagataaactctttgttaggtagatatagtgcagacatcttttccgagtctatgataggccttttcactcccttactcccttaatggtgctttctgatgaaagtctgtgcttttcttactaattcctggttatagtatcgttttatttcacattgtggatgaggttaaaagttgttgatataacacacactagttaagacaacatcctggagaagggaacacggcgcagaggattttctcctctaggctgcttccggttttcggagtcagtcatactgaccctctggttttagttccttgggtggtttcctcggggaaccactatttcttgatttactagctcttgatggtatctactgccttccctccgcgaatatgagagtttcgctcttataattctccagaacttcccctcccctcctctcccctcctcatgtagttgcatcagtgccctcaggtcccccgtgggcaaacgcccacagcttcaagtgcttgctgaaactcaacaagaagcagaatcacttgactcaaccttgtgaatcagccgctgacacttccctcactcctcttccagcctccctcctcattccatcttgacctctttcactttcgccttcacattattaaggttgagaatgtttatattaattttgtgaacatatctcagcctcccatgtcctgtctatagattgaatctaaatgttgaaaacccagtctttggggtttacatcaccgtacttataggaacgtgcatctcaccaacctcggtcatgatgacttacctctcccgaatcttcctgtcttaatgccgttccaaaaaacatcttcttcatgtggcagccaaatggttccacctttttgattttccaccgatgatgcttacaatcgtgccatgatcttgttggcctcctccttggaccatggctgtagagtgtggaaaggtgttaactcttcaaccttttctgtctgtccagtgtagaaaagggttaacctttccactctgtgagccgccccccatgtttccttttttttgagatggagtctcacttttgtcacccaggctggagtgcagtgccacgatctcagctcactacaaccttcgcctcctgggttcaagtgattctcctgcctcagcctcccaagtagctgggattacaggtgcctgccaccacacctggctaatttttgtatttttagtagagacgggcttttgccatgttggccaggctggtcttgaactcttgacctcaggtgatccacctgccttggcctcccaaagtgctgggattacaggtgtgagccagcgcacccagcttcccccacgtttctaggtagccatggttagtttcttttgcttgcaaccaaagatctctaataggtaaagaaggtgatccaagattccaggaaacaggaaacagaaggaacgtgctgtggggagatgaaacagaagctccgggtgagaccagggcagcactgaccactccacagcacctggctgtgtagctgctctgggttggactcgcctgcccagcatcccttcctctgctgcctttggggaaccgcctctcctttgattgtcatcttgattgatttgtggacaagacaacccaggcccctgccctctccaggactagggccagttcagaacccaaacccaatctgactcccctggagctctgactctgaacaaaataagacaaaaccagaaaacacggtcagagcaatgtggatcccagtggttgagacctccagggctgtgcatgggttcctgctcctggaccctgcactgtcactcgttcttgtgcttcctgagcccagattctgtaatttacccttcaaccccgtgagctctgttacgtttctcgttagctatggtccacttcttttgcttgaaaccgaagatccctaatggatagagaaggtgatacaagattccaggaaacaggaagcagagggaatgtgctgtggggagacagaggcgccacagccccctatcggcgacacctggctccaagcagtttttttctctggttcttaagcctctctcctccccgactcaccctccctccctgaaggtgtcttctctgcttttgcctttgagatggcctcttccttccccttttctggtctccttccctctgggtccctgccctgtccgaggcctcagtgctcccttctctgatgatgcctcccaacgttgactccagctgagcttctcaaagctccttctcctggccaagaacatttggtgtcaccttctaccctgtgctgactccttcctgcttggtcctgtcgccttcctgtttggccttttggtcacacttgtctttcctcagtaggggctttggagcccagcagacctaacctcaagtcgagtttctgccttttctgggctgtgtctttgcacagtggcttcacccgtaaaacgagggtcatgacgcttgccttcactgcaaggagattgtaaaagttaaataggagcctgtgtgtggagtgcagatacaaaaagtgatcaatgttcctctgtaaacaaaaacagagaaaaaaatcctcccacgaccctttaccaccacctcttgtgaatctaaaggtctcttgctgctgtgtttttgagcataaatctgtttattaatttatctctaggtcatttctctcatttccttccttccttccttcctccctccctcccatccttccttccttcctttcttcctccctcccttcctccctctccttctcctcgctccctccctccctccttcccttccttccttccttcctttcttccttccttcctttccttctttttctttcatctcactctgtcatccaggctggagtgcagtggcgtgatcatggttcattgcagcattgacctcctgggctcaagtgatcctcccacctttcagcctcctgagtagctgggacaagaggcacgcaccatcccgcctggctaatttttgtattttttgtagagatgggatttcaccatgttgccgaggctggtctcgaactcctgtgctcaagcgatcagccctccttgacctcccaaaggactgggattacaggcgtgaaccaccatgctcagccctttctctaggaattgtgtgtaagctgacgagatttcagtgtgtgcctagcccatccttttgaaggctagggttgtcggtggttctcaaagagagtccagcctcttgataccttggtcttaaagctcaggaatctcgaagaattaagctccgtttaggccagtcctctgtgttcactccatgttccgctcacaggggctgcttaccacccatgcttcccttttgccctccttcccctctcctgggattggagagctcatggaagcaccgattctgcatctcatcagggcacctgctggggaccactcaggaagggtgtgggaaggtggccttcggccgctggttcagatttgattctgagagcaagggggtgggaagatctgggctctctagaacactgctgtgccattagtctcctgaaagtcacacaggtggcaaatacacgccccaggttgggctgtctctcggctcacctatggggccctcgctgaacagaattgactatgacaagttcaatatcatgcactcagatacctctgcatgcgagaccccttgtgtcatgattgtctctgccattcacagccctccagcctggctgactcctatctgcctttaggattcatttcagggaccacctcctcagggaagccttctcagatagccctgtcccctctgggttgtgtgaaatgccccagctctaagcacccccacctccccagcacattcccctcatcgtgtggtggccacccattttacccagggatgaaactagactctcagtgtcttgaggacagagttggtggctattgatctgtagggagcgaagaaaaaacttccccttcgccctctgaagttttgctgaaagaggaactcacaaaaggcagacaacttggccaggcgtggtggctcacccctgcaatcccagcactttgggaggccaaggcgggcggatcacctgaggttaggagttcgagaccagcctggccaacatggtgaaaccccttctctactaaaaatacaaaaaaattagccaggtctagtgacaggctcctataatctcagttactcaggaggtcgaggcaggagaattgcttgaacgagggaggcggaggttgcagtgagctgagactgtgccacagcactccagcctgggcaacagagcgagactccatcaaaaacaaaaacaaaaaaaaacaaacaacaacaacaacaacaaaaaacagacaaatcggagaaaaggcatgcatgttttatttaacgtctatgatggagccttcagaatgaataccaaaagatacaggggaagtcatccatttttatgcttaatttcaaccaggtatgggcagccatgtagaaatataattggacaaaaagggtttgatctaatgctaatagactgagggggaaatccagcagggcttgtctctctagattcttcttggcctctttgagcaacattccttccttctgggtgtggggcaaggccctctctggactgggagtcttatgacctacagtcaaaataggtcagagaatttcttctttctttcctgcttgcttgcttgcttgctttctctttcttttcttttctttctttctttctctctctttctttctttccttccttccttccttctttccttctttccttccttccttccttcctttcttcctttcttcctttcttcctttctttctttctttcttttctttctgacagggtctcactatgttgcccaggctggagtgcagtggcacaatcttggctcactgcaacatccacctcccaggttcaagcaattctcctgcttcagccttctgagttgctgggatgacaggcacccaccatcatacctggctaatttagatatttttaatagagacagagttttgccatgttggccaggctggtctcgaactcctgacctcagatgatccacccacctcggcctcccaaagcgctgggattacaggcatgagccactgcacccagcccagagaatttctttatgaacagtttttatatagaaaggcagagagaaagttagaataatattttcgggttttatggctggtttggggggaaaagtaatatttttaggttttatggctgtttgcagggtgggggtggaaaggggattcgacttcctatggccagcttagcaagagaatgagactgaggacaaaagggcatgcaaagttcagagaaaagctattgcttctgaggctgcttctcaggccttcattttgagatattgttttctgcgtcccaacacgttctttcactgagttttcccccaaacattgaaaaagcactgaccatgtgctaggagttcaaaaccaaaaaggagggttggttttcgtcaaatgggagatactttcaaaatgtgtggctcatggcagggaaatgagagcactggggactactggaacagaaccgcctggcccgggagaatccaaggaaggcttcctggaggaggaatggcagagcggacctctgctactgcagcaggaatgcccccagctgctgctggggaagggcttatgttggctgggtttgcctttggggcagagtggctggctgctccccctgcccagcgagggtagttctggggagagttgccacgctcggaccccatttcccatcatccccaaccctttgcattggttcttgccagcagatgtgaagataaaaagctggccagacttcccactctccttccgcttctatccctgtgcgctgaggcctccgaggagccctctgaggcttctgatttgcgacctggaggaaattgcccgtgtgctcggaggaatgcctgcatgacactcttgtgtgagagaggaatagacgtcttttgtattaaaccactgcagtgtcggggtttatttgttccctatgcagtgcctcttacttcaccagcacccagcctagcagatcgcttgagctctgaacctctggtggggctgaatggcgggattaggaagtgataccagtctttgaaagtctccctcactgagtcacttgatcctcattcactcagggctcataagccgaatacctggcgctgatgatgcagagatgacactgccctgctcttacaggaggtacaacccagtggagagaacaggcggaaagtccaacagccacgcccccctctctctactcactttcccccagggtcttcctgggctgatgtttcctagagagttgagggagatgttccaagctgagcaggtgaaagggacagtaccagggagagggccatcggccagagaggtcagcggcaggtaggagcagggacatgtcgtaggtggaggagagacattggtcctggggctgccaggggctgaagtgttgatgttaactgccgggatcactgtcagccaatcagggctgccacgtacagttgctcagcctcgcactgctcagggaggatgagtagaggctggcacctggagaaatgtgtctgtacagagcaggggtacttttctctgactatcacaaacatgccaaatgagtcaggtgccctgataccagtgaactcagggtcagcacttaaactcattgcttattagtgatgagacttcacagaagtaggggtgagaagtgggggtgagggtaagaggaataatggagccacttctgctgctgcacatgagtggcaccttcttgcttaagcctcacggcagccatgtgggcaaggggttcttctggtgcgggggagggagttaaggttaggtggcttgcctagatctatattcgggacatctcagagcctcagcctccccgtccatgtaatagcaattgatcgactccctctgaatagggtgaacctctgtcccttttgccctggatggggatgctctaggcctgctgtccctgccatgggtgacagcacccctgtcactcttgaaaaggtccaggttcagatgaaaagtgccacagtgaccctacttccaaggcaaggtatgaggctagaaatgaccaattgccagaaagagcttgccagggcaaaggcatcacctggcaacatagtcagggaagacagggcctgggagggaagcgctggggctgcccagagaggcatctatccaggaagctgcacagaaggggctgagggtgcagctgaaggacaagcacctgaattcaaactctgacctcactcacagagctccccgctgctggccagccctggtcagagggacaggccaggcaataagaggagagccagcagtgagtctccctgttggaaaggggccacacatatgcagtcagggggccttgggagcagccctgtccccaccccttcctgatcccaccccactagagagggagcccagaggtgggtaaagggcctaccatgccccgcgccacttcctcctgtgtgtccttggctacaggacatcccctgcctgagcctcagcatccacatctggaagctgggagtaatgagagttgctcacctagggggatggggtgaaaattaaacaagattctgccggcaaggtccttgggtttgcccacagctcctcacagcctccctctctctcctatctctcacgtccctccctcctctcccgtcattgtcactgtccccagacctcctccctgtgccctctttccactctctcacctcctactccattcaactcccctgcttttccagaatcagggaaactgaaggatgggcctcagtctctaaggaaggcagagacctgggttgagcagcagaataaaagatcttcttctaagaaatgcaaacaggctgttcatcaccatctccaggtgttcacagacaccagcaaagcaatgcactcctgacaagtagattttttaaaaaatcagagtgaattaattttaattaaaaatttatcttatgttttggccgggcgtggtggctcacgcctgtaatcacaacactttgggaggccaaggcaggtggatcacctgaggtcagaagttcaagaccagcctgatcaacatggtgaaaccctgtctctactaaaaatacaaaaattagccaggtgtggtggtgtgtgcctgtaatcccagctactcaggaggcttaggcaggagaatcacttgaacccgtgagatggaggttgcagtgagctgagatccagcctcggcgacagagagggactctgtctcaaaaaaaaaaaattaagtttcaagaattaaattgtatgattatggttaatactctgggaatagctttcgatttattaatgaaatgattgttttaattggctttgaagctacacttctaaaataaaatgttaagaatcttccataatttgttaggtaattgtaccatgaattgcaagtgtgtaaataaacactaggaaatgaataaatgtcattccttttggagtggaccttcatgtggggcaaaagtcacactaactccttctgggatgagaaaacacagctaacccttccgggacaagcacctgaattcaaactctgacctcactcacagagctccccactgctggccagccctggccggaacggacaggccaggcaataagaggagagccagcggggagtctccctgttggaaaggagccacacgtgtagtcagggggccttgggagcagccctgttcccaccccttccggattccacccactagagagggagcccaggtgggaagggttccacatggaggatggactctgcccctggacagcagcccccacttcccaacctcagccatggtgggcactggtgctctcttgcctttccatctgcagagcctgaagcccctgggtccagcctcccggccctggtcaccctggacgacaggattgtccagaaagggcagccttccccaggtctccccttggcaaacttctgctcacatatctggggccaaactgtgccacaacgttgacagtgactatatgggcctgggggaaaataattatttagtggaggggattagaagcagcagtgagaggggatggcgcaggagggcaggaagaagtctggcagccgtttaggcccgaagggaagagctagtagactcagatccatggagagatggaaggaaaggagaagagaggagggaggagaggggcagggcagggctgcaggcaactgcgggaggacaggaggcagtggacacgaaggagccaggaggacaggggcgtgggaacagagggagctggagggaggtctgtggctgtggggaccagcagagctgcctgaggggctgagtagggttcggtcattacatacaacaagatccaggcctgcgaccacgctcaggatccaggctctgcccccacatctgctcctgcagacgcagctctcctgctggtcacctggtggcccccagagggatggctggccatctccaggcactgggcctcatcccagggaggaagaaagaggtcgtggctaagctgtgagtgagccccaggggacagggggcctgggcccttggaaggtggggttctgggggacggtggtccggtctccctgagacccgccctgtgacatgactaactgtggggttctttcaccagggtgagcccctcttgcctcccttacactggcccctttgcccagaatgactgcacaatttttatcacttacttccaatgagtggagtcagggctgttatcaaacccagagacacaagcaaagggcagggcgtcacgtgggggtggtgaaggcttctctggggacccttcaagcctggctgccatgaggtgccagggcaggaagcacactgtccttccttaagctcccacagtgtgcccagcccttgatggaagtctcaatttaattataaatgcaggcttgaggttgccagtatcaatcatctacccaactaatctataaacgagtgcaatcacatttaaaatgttgatagggctttactggaacctgacaagctggtcattgcattcagaggacttggatccactcatttgattttgaaaactacgagagataaagagagttaaggtagaaaatgtcaatacatggctgggcatggtggctcatgcctgtaatcccagcactttgggaggctgaggcaggcagatcacctgaggtcaggagttcaagaccagcctggtcaacatggtgaaaccctgtctctactaaaaatacaaaaattagctgggtgtggtggtgcacgcctgtagttcccagctactcaggaggctgaggcaggagaatcgtttgaacccgagaggcagaggttgcagtgagctgagatcacatgactgtactccagcctgggtgacagaacaagactcttgtctcaaaaaaagaaaagaaaagtccatactattttaaagctataacaattggaagagtgagctgtacaaagtctcaatacagttataaagctataacattcagaagggtgtgtgtaggagggtggacgggtgctcagaaggaagctctaaagccacaaggagaaatttcaccccctttggactggacatgggctgggctctggcaaattgcacaatgcaaggtgctgacattattgcccactaggtcacattgcctaagagtagcaatttataaaatctcattagagagtgcctgtgtaaattctttatttctgggccacccgtgtacttcctcattagtaaggaggagaattaggtgaagctcatggttgtggattgctgcagtttgcacagactttacaaaaagagcttcagctggtgtcctgcccctctagggcactcactggggctttcacgctggcattggaaaagtgggcatcggcaagttccgtggctgaagaggaaaaagaaaagcaagctttcacccgccctgggtgaactgtgaattctaaagtgtgtccccaggaatattgggagacctcagcagtttacacttggtgggttgaacagggtttgttagtatgaattattcatccaatattgaacacctacctgtgcacagcacgcttgcctagtgaagagagcagggctgctgttcctgctctgtgcccgggtgggaggcagacacaggggctgtcatgggagaagctgggctcaaacagcccatgaaaagggacccatgcacaggcacaaaagccccgaggaagaagccagcttggtgcactcgacggagcatcacccacttggctcaacaaatgtgtggtggtatgtgcatgtgtgtgtgtgtgtgcatgtgtgtctcacacatgcgtatttatctacatatgcaagaggataggaagaaatacaggaaaacacttttgtaatcttgtggttgagaaagctggcataaacaaggcacacaatgccagacactatggccttcaggcctccctgccacggggatgctgccttttctgctccgggtgtttccacgaggcaggcatggaatcttccctggacaagcgacataccgtggagagacaggtaagaatttctacacataggaagggtggagcagccatggtcttagatgtgagcccaagggaagacagcctgatatattttactgggccatatttgaaatttctgcacagcggaagacaccatacagtaaacacaggagcctgcgagagaacctctgccgagcaccagtgaacggccaagtgacacgagtgacaccatgagcttggtgccctctccatcccaagccagaggcggaagccaggcccttcctcccagcccagactcctacatcccaaacttgagccatggcacacatgctgggcacttactctgtgcatagcagagggagctgagctgcatccagaaacagacctaggagctcacagacccaaggcctgggtctccacccctggaagagggtggtgccgagagcagggcccccggctgtcactggcccggagctcaccgtgcaggggcagcccaggccctccggggatggcactggggtgtcggaggccaaggagcagaaacagctgtggatgcttccctcggaggactgggtggggccgggaccaccaggacctgcccaccaccttctctatggggcatctggctgtgtctgggagtatcttgtggaagggtcctttttaccatgtgggatcggtggtccagacttgtctgggagccaaggataccaggcatgtcaagtaggctcttccagaaggttttccctcctgggatgtctgtgtctctgcccctctcctgctgcctgcatcaggaagggagggagcagatgggctggtgaagtgagcaatgtcagtcacatgcatggactgtccagggctcattctgtgctgagggtcctcccgtgaatacgtggctcaccagcgtcccaccccatagagaaggtggggggctggccctggcagccagggctggagtgggaggaggttgaccaggagcatgggggtgagggagaaagagagagggaccccactgtgctgccctagcacaagggacactggtcttcctgattcctggccttccacgaggtgggacgcccctccttctctgggctccttctctgccccgcggggtggtggatgcagtagggaccttccacctcaggacctcaggagccgcatatgtggtacacagtgggcctcctcgacagctgctcatgagcaaacaggcccaactccttctggtggcaaagacacagacacacacagacacataagcacacacagacagtgacaggacagaaaggaaccttccccggggtttcccagacacacccagatgtctacctcagctctgccccaagtcagaggattgcagcaattcttaccgtgaagagtgctggggaaaccacgtcatcaaccccgatcctctcgttttcatttctgggttctgacaacagccccagctccaccccttgaaacaagtgaccgaaaaatggacaacatgtagtcactctgggcaaagaggccaccccagtgggggtatgggggacagagggccccaccctgggaggacagcactgtcccctgtccaagggcaggtgcagccacctcctccacctccctattccccccaccctttgtcccccccgcccccccgagcttggcccctttgcttggagagatcctttggttttttcgatcacttgcttctaggctgaggagggcggggctgttgtcagagcccagaatcaaagccagaggagcaggtggacgctgagactgtcccctcaccctgctccacgggcaatgttgaagtgggcatctgggtgtgtctggggtatcccaaggaagggtccttttcgtcatgtcactctgttgggggcggggcacaggagcagggagccctttctctcccgagctcctcagactcccagcttccctgggtctcatctcagagctttgcctatgacctgggagccctgtgggtccaggggaggggactggacgcagccccatgacaatgctcagacctgggctaggaactggaagcctgtggttcctctgggctgtaggggttggggccccacagtgatggcagagccaggacctcatacacagcagcatggactccagacccgagcgggacctccgttctggtcccagggtgacctgggctgagtggcccagcaatcagggaccacttcagggtccctctgcactggtctgtccctctcacccagtctggacccctgtggggcacttgccctgtccccagttttccttacaggggacctgggcaaagcccagggaagcttgcacctgttaaggaggccattctcctgcctcccccttggggatccagtttctttctctcgccttggaccttccccaggatcctatggaaactccagcaagacctggtattttatcacattttcacagttatcgcattgattgttcagccaacattccagggacagaaatgggggaggggctgtccttccccaggaaagggtggaatctccttccgtcttccttacagttggcctagggaaggtgcacactcttaaccacccctgggttcccctgatgccttgaagaccctgccttgccctggctgcagggggaccaggaaggggccagttgtgtctgggacattcctgccgggagagagtcaggccctagtgcacagaaggatgtgggtgtggtcggtgggggcactggcagggggtagggcacataagtccctggggagctcactcagaggttccaggttgtggcccttatggaagttcctgggtccaggggctagagtgagactgttccccgctcatgtctgggctgcagacgcccaaccagtggctccccctgtccacccttggcaagggagggtcctggcctccctctctgctagtggggaccccccaacaccctgtcttctctcctctctggagctctgcctgggtgcatggcttgtacagtgagttactgagaattgaactctggacagtagctgggccccactttgctttaaacattttagtctgaggccttctttgtcatcagatgagaaggttcacagatgtgcagatgtgctgatagtctaacctgactggtttgtaaaactagaaagagaaacagacaatgtgcctgtttctgtgatgggccataaagtggatcttacagatttggagacattctggaagatctggacctgtctggatcagagaggggaggcaggcatgggccagtcatgaatccagtggggcttgggccagctggggcagcagggaggaggacgtgcccagggtgggtgagctggggagaccctggaacccaaggctgaggacccagagccaggagatgcaggagacgccccagggatgctgaacaaagcgctgtcccctgttgcagctctcctgggtctccccatagaaagctcatgtgggggctgtcctgaccatgggtccaggggtgtatttgctccaggggcatttgatgcattattgagccaggggaaaggccatcacactctgggcagcaggagccaccgggaagggttggggaagggttggatcctcccaaagttggtacaagtgtggtctctggcccaggtgggctgtgggtactgcggggcgtccagctgtgcatgcctctggtgtgaactgggaagggtggcctctggtcagactcacacaacacaccaagatgagctcacaccagaaccacctgagactcaaatggcagttgactgcccccaggggacatcttcttgactagaagagtccaacatctggagacagaatgggaggggtcctcacggcagagaacagggcctcttctagtctgtggcgcccaccaaaatggcagggacactgtgctgaggtgggaggattgctggccaaagacaggggggtctagtaagagccagaacaggggagcaggcaggacaggggacagcccctgggcccacagggccagcaccttccaggggcagctgtgctgggtgtagcaggtggacctgggaaaggacggcgccagacctgccgccaggactcaggggctcacttggggcaggagcacagtgtccctcacatttctgcagggcccagaggtgggagaaagggcacagggtggcccttctgacaggggggtgggggtgtgtccctgctggggactctgtttcctgggagggcctggatctctaggtacctttcagagcctttagcatctcctctgggtaatggggatgaaaacactcctccctctagtttacaattattagatacactgatgcataggaggatgcaggacctgctggtctcccatcttcacagccagggaagaagatgcaggaccctaacagagagcacaggatgcagcaggtgccagggagcctggaccaggcacatcctgcactggccacaggggaggacacaggggtggctgtcctggagcctgctctctggaccgctgagtgttattcagggtctttctccagggtgtggacacctgtcttctcacctgccccctggtctcctgccttccagattcctgtggcccacagggagcaaagtgtggccagctctacatccccattgtcactccacagtgtctggtggttcagtggtcagagtgggcacatcaaaaccaaagcttgcccagaggcatggcagagaacttccttgttctgacgctaatgagggtggcacactcggcctgagctggagaaggggtggggcagggtatcgctgactcagcagcttccaggttgctctgatgatatattaaggctcctgaatcctaagagaatgttggtgaagatcttaacaccacgccttgagcaagtcgcaagagcgggaggacacagaccaggaaccgagaagggacaagcacatggaagccagcccagcatccgggcccaggtatgggaagcccctccgagcacctctgcgcctcagcctcctctttgagcttttctgatgagcactcacctctcaccctcaaacccctggggcctctcttttcctcctgaccctctctctggacctggcctcttgctctaggttcccagttttggtcccagcgctggtctctcctccgatggtaccaattccaggtctccttccacctcccggggcaggtgcacagggagcctgaaaatcccaatagataatggtgctgtgccccagccagtgaagacggtcagagaggggattctcctcacttgtctttaaatgagcatctactatttcttgcaaatgttccatgtatctggacttggcctaagccctttttatgttcagtgtcatctcgttctccctaatattaagaaaagggggttgcttgtaggactgcttggctatgaggaagccttgtttcctttttttgagaacacagagcaagtgagtggtagagcccagattcatgcccaggtctactcgaaatggtggggaacattttgaaccttccttccttctttccttccttccttcctccttccttccttccttccttcaattctctctctctttctttcttctttctttctctctctctctttccttctttatttctttttcttctttctctctcttccctccctccttccttcccttctgtgcttccttcctttcttccaatatttccctttctctcttcctcccttccttcctttctctttctttctttccttctttctttctttttctttcattctttccttctttctttcttttacttccttcctccctccttccttcctctctttcttctttcctttccttcctttcttccttccttcctctctttctccctttctccctcccttcctttcttttttctttcttttctttctttcttctttccttctttctttcttttccttcctttcttttttctttctttctttccttctttttcttttccttccttcctccctccctcccttccttccttcctccatctctctttctctttctttctttctttctttctttctttccttccttctttctctttccttctttctttctttctttccttccttctttctctttccttctttctttctttcttttgtgctgcctcccaacagagatttttctaattctgattatgtcaggatgcatagagaggggctgggagaggtcttcaaggtggggctggtgtttccagcccaggagtcctgagctgccccatctcaattgcctgagaagcacatttgggagacctcagggcaccctaagggatgtggaaaatcctatgaattacccgaaaagaagtccctggcaggttcctctccccagtcatccccctcaggagtgtccctgtcccgatgctcggtgtggtaggagttaaccctgcaggcaggaggaagccccagagggtccatctccagcaggggctgtgggtgagcagagccaggacaggggtgcatggtgaggccacagaataagacccagctctaccccagggagaggagcagggtcctcctcggagggcctgagcacactgagctgaccctggggagaccctgacaaggcttagacaggccccagggctgcagtgatctcccagtgagccatagaaggggtcagagggggaggtttggaagtgtgctaagggatgtgcggagcagggggaaggagggtggggtgcaagggaggaagtgtggggagggaggaggaggcagggcagtccaggagggctcttcctcctctggtcttttccctggctgtccacagacacttgatggatccacacatattcacttccaactttaacaatggcattggaaggcataagacctacctgtgctacgaagtggagcgcctggacaatggcacctcggtcaagatggaccagcacaggggctttctacacaaccaggtgaccgacccagccatccgaatccgggcagggcccttccaatccagggacattcataggtagaaggttccggattgtacttgtggtttcctgcagtgtttgtcacttgtgcttcctgcagctgctgctgcttggccctggggttggggggagacttcggcttcagtgactatccatgcccaggtggggttgagtctgcccaatggcaaagtgcttcctgaggaccctcccaggatcccctcacagacacagctctcaccaggaacaattcagcaatgtgggatctgaggactcagggcctacctgacctcacaaggccaggatgccccagtgccctctcctgggcttcatcctgcacggagagagactgaggcaggagaggctgaccagggatcctgtcctgcccagggtggagcccacagcaaggccagaacaggtcccatgtcaggatgcagggatgtccagcatttggggaggagctgggccaggccaggctgaggggccctgagcccgggggactttcttccctggcccctacccagcacagcctctgtctggagagaccaggtaatgcttggctccggtgctggaaactgggaccttctctgggctctatgagctcaatgtgggcctcgctggatccacacacactgcttggaacatcctttcaagggtgccagtctccatcaccgcctaagcagtgggactcccccaggaacgacccacagccccttctcagcacaaaccatgtcatccactccaccctgcatcactgctgatggagtccctccctgtctttgtccccatcacaatcacagtccttgctgccctgctgtccccaacttgaccgattcctagtcttagtggaaaatccttttctctggagtttggagtaaataccatatttctataagtcaaaataatgacaattataccatgtcacagggaccttcccacgttggagtgagtcctgctggtcttctcttccccactacttttggtggaattcattttggcctaagtctatatcacatttgggctcagcacaggttgtggcacagaatagaagcttctagaattatgggccacagatgggatgggagtaggggagttgatgagtagagcaggtcaatctccccttgaaggaagcacactcactcagggccatcaggccaatgacctcggggctccgccggcccctcctccctgcccccatctctgtagcccctccctgcagggctgggtctggggtgagggtcctgaaggctctgaccttgggtacaaaattgatgggggctccaaatgctcagtaattagagaaaacacattttaatttaataattaatgcaatattttaaaacgcaaatttaatacaaatagatcatgatgaataaaagcaaagattttaataaagcctggcaggagagtgctgtcctgtgtatagtggagctggggcaaaataaaacctcattgctcctgatctgtttgtatttaaatgggcaacattttgcttatcttgggatttttgcataacatctgatatttttaatattgcatagaaaatcatgcatcctaataaccggggttttggtgacccctctaatttcgtgctggaggcccccgcctccccagccccacctggtccaggcgctccctccctgttcaccacacatcacctcacactctgtttccttttctaggctaagaatcttctctgtggcttttacggccgccatgcggagctgcgcttcttggacctggttccttctttgcagttggacccggcccagatctacagggtcacttggttcatctcctggagcccctgcttctcctggggctgtgccggggaagtgcgtgcgttccttcaggagaacacacacgtgagactgcgtatcttcgctgcccgcatctatgattacgaccccctatataaggaggcactgcaaatgctgcgggatgctggggcccaagtctccatcatgacctacgatggtaagaatggaaggttcaggtggggtggggtgggtgggggcaggagaggttcctgggaagaaaaggagaaaggccttggtctgctgcctgcagaaacgatggctggactctgggacctgactttggggtcgatgggaagagagaggccaggccaggagatgtgggcccagggagggcagggagagtggctggaagtggaagcagaacttggggctttctgaaagaatgagaactgggctggcccagattccaatgggaaggaactgcctgatgaaggagctaagtccctaggggagggagagggaaaggagggactgaaaccaggatgtgggaagtctgtcctgagagtcatgggccctaggtgccaccccgatcccacagcgggagcgtgacttatctcccctgtcccttttcagaatttaagcactgctgggacacctttgtggaccaccagggatgtcccttccagccctgggatggactagatgagcacagccaagccctgagtgggaggctgcgggccattctccaggtgagggcttcctccctctgcccggtgccccatcggcctccccctcctccccactcccctgggccttgccttcccctctgctcagagcctcctctgggttccctgctccccacagggcgcccagctccgtccctccctttccttctcacagcctccttctctttcccacctcccgcatccctccctcctctcccgtcattgtcactgtccccaggccacctccctgtgccctctttccactctctcacctcctgctccattcaacccccctgctcttccagaatcagggaaactgaaggatgggcctcagtctctaaggaaggcagagacctgggttgagcagcagaataaaagatcttcttccaagaaatgcaaacagaccgttcaccaccatctccagctgctcacagacgccagcaaagcagtatgctcccgatcaagtagatttttaaaaaatcagagtgggccgggcgcggtggctcacgcctgtaatcccagcactttggaggccaaggcgggtggatcacgaggtcaggagatcgagaccatcctggctaacacggtgaaaccctgtctctactaaaaatacaaaaaattagccaggcgtggtggcgggcgcctgtagtcccagctactctggaggctgaggcaggagagtagcgtgaacccgggaggcagagcttgcggtgagccgagattgcgctactgcactccagcctgggcgacagtaccagactccatctcaaaaaaaaaaaaaccagactgaattaattttaactgaaaatttctcttatgttccaagtacacaatagtaagattatgctcaatattctcagaataattttcaatgtattaatgaaatgaaatgataatttggcttcatatctagactaacacaaaattaagaatcttccataattgcttttgctcagtaactgtgtcatgaattgcaagagtttccacaaacactagcaaatgtgtagatgtctttccttgtgtagcggacctgtagcggggaaaggtcacacaacatccctctggatccagaaaactcagctaaacctcacaggagaggaacctaaatgcagaccccaccctcactcacagagccccgcccaccctcacttacagagccccgggcgctgattggaagggacaggcccagcagtaagaggacagccagcagccagtctccctgttggaaaggaaccacaaacgtgcagtcaggggccctcgggagccgccctctgtccaccccttcctgattccacccccctagagagggagcccaggggaggccatggctgagacccaggacaggcccagtcgggggaaggagcccagggagggggcaggtgtctaggctgggcccaaagagagggctggggagaggagcagcccaggaggcagagcccagccacagaggggaggggagctgagtcccggggacaggaggctccagaggcagagacggagcccagggctagggcggcaggtgtcagggctgtggcttcagcttggcgtctgtcctgggccttctgcgctggttcccaactctgggatgtgtgacttatatgcctgattacagcggcggctcccacctcacgatttctggaaagtcctcagaagccgcatataagaccaagaacgggcctcacatgcagctgctcctgggcagaaacgactcactgtttccctggcctagacacacacaacacacaaacacacacaagacacacatacacacaacacacacaacacatacacacacaacacatgcacaaaacacatacacacacacacccacacacagtgacagagacttcacacaaagaaacctcctccaggtgccccagagcactccggggcgcaccccagccccgccctgagcagaggactttggcatttcccacgcaggggcgggtgcgggagggaccggcttgtcaaagctgccctttgcttgtgtctctgggtttgataacagtcctaactccacttgttggaagcaagtgatgaaaaacgtgcagtcattctgggcaaagggaccagtgtaggggaggcatgagaggctcacctggtgaaagaacaccagagttagtcatgtcacagggcagctcccagagagacctgcccctcgtcccccagaaccccaccttccaagggcccaggctcctgtcccccgggcctcaactcacagctttgcccatgacctgggagccctgggggtcctggtgaggtgactggacacagcctcatgacactgctgggacctgggctgggaactgagagcctgtggtccctctgggctgtaggggtcggggccccacagtggcggcagagccgggacctcgtacacagcagcatggactccagacccaagtggaacctccattctggtctcagggtgacccgggctgcacagcccagcacctgcccagggtccctctgccctgctctgtccctcaatagtctggacccctgctgggtacttgccttgtcccccccttacaggggaccagggtgaatcttgggcgaagcctgcacctgtgaaggaggccattctccttgctcccatccctgccgcccacatggggaaccagctccttcttgttcctggggacctttcctgggctctggtggaaactccagcggaatgtggggtctttcattttccctcagtgttgcagaggccgaaatggagaggggctgtcactccccaggaaagggcacaatctccttccttccctccagctggcccagggacggtgcacactcttatcctagtcaccctgaggactgcagccctggtatgagcccagagtcacccccaggttttatggatgccttacacactctgccctggcctgacctcaagaggaccaggaagtgcccagttgtcactgggttttgctgccctgagagagtcaggctccagtgcacagaggaacgtgtgtgtgcagggtggtggcactgtcagggggcacagcaatcccaggggagcgtgccctgctgttccaggttgtggcacttatggaagatcctgggtccagaggctggagtaaaatcgttcccactcacatctaacctaccctgggctggctcgtgggagtcaaaggcccagacagtggctggccctgtccatccttggccagggagggtcctggcctccctctgcgctggggggggagccccactcaccctctcttctttcctctctggaggcgctgccctgctctccggcttgtacaatttgctactgagaatttaactccagacagtatttttgccccaatttgctgtaaacatttgagcctgaggccatgtttgtcatcagatgaagtggtttacagatgtgaaattgttgtttgtagtctaacatttctggtttgtaaacccatccgtgatgggctcccagcccaacccgctgcagatgaggccgctgagtttctgttgagaatgaagaccgggttcccaattagggcaactcgtccctcacactgctccttacacccccatcttccagatcccagccaagccccctccacccaatacaccccagcgtccttgcatccaattaacatctcagagtggccacctttgcagagacctggctggggagggaggtcacagtaaagacacagcctggctcctgtgggccccctggggacagcagccctgcacacacactctgggcctttctctccccctttcagccttgtccttggatatcccccaggtcactcttgctcaggaccaagcagattgactggggacagcaaatgtaaccataaaaggggattctacaaggactcccctcagggagcaggtgccagcggtggggactggggagtagataagaggtggctgggagctaggataagagcgacagcccagagttcctggatcctggctgaggctgggtcccgggccccaggacagtcctgcagaccccagaatcagagactgaggagtcaaagacaggcaggagacgcccctggggatgcccagcaaagcactgtcccctgcgtgcagctttcccgggtctccccacagaaagctcagtgagggctgtcgtggccactggcgacccaggcacatttgctccggtaagaggccattgctctgggaagcagcagccacacaggaagagttgggggagggcaagggctctgccctccgagggtcctgcagggcacagggtctgcatagcaggaaccccagactctttgtgccccacccccactctaactcagagctctgtgctaaggagagccttatcatgccctcggtggattcagaagcactttgtagggctgagtgacgaaacatttggggctgggagtagagctggctgggtcaggacgacaccccctcctggaagggcaggcctgtggggggcacaagcagggacaacagcccattcgtgtctgctggtacaggtgcagtctctgtgcaggtgggcagtgggtactgcagggcaccatgctgtgtgtgcctcgagtgtgaactgggaaaggtggtctctggtcagactcacacaacacaccaagatgagctcacaccggaaccacccgagactcaattgggagttgacagcccccaggggatatcctcttgactagagaagtccaaggtctggagacagaatgggaggtggcatcctcatggcagagaacagggcctcctctggtctgcccatgaggagtggtgcccaccaagatggcagggacactgtgctgaggagggtggatcactcccaccttcttctgaggtttccacctcagcgagcaccggccaggctgggagggcgaggagctgtgcttggtccgggtggccagggtgggactgtccccaggatgtggactctcttgcatgagacagctggccaaggatggggggtctaagaggagccaagacaggggaatcagcaggacagggggcagcccccaggcccacagggccagtgcattcttcgggcagctgtgctgggtgcagtaggtggacctgggaaaggatggcgccagacctgccgttgggactcaggggctcacttggggcaggagcacagcttcccacacatttctgcagggctggaggtgggagaaagggcacagggtgagccttctgagggcatttgtgtccctgcatcactctgctcactgggagggcctgggcaagtctaggtacctttcagagcctctcgtatctcctctagaggagtaatggggatgaaagcaccccttgctctagtttgccgtaattagatggactgacacaaacaagggctcagcatgtctgtctccttcccttcccagggcctgggatcaagacccaggacacactctgctctctgcactgcacgccctgcagggccctggatgcagcaggcatgccctgtgctggctatagtaggggacgtagggtcggctgctctggagcctactctctgggggcgctgagtcttattcgagacctttctccagggtgtggatacctgtcctcctgcctgtcccctggcctcctgccttcctggtccctgctgcccaaagtgactgaagtgtggccaaggctcgctttcctcattgtcactccacagcatccctgtagggctattgtcagagcagggaaatcaaaaccaatgcttgtgggaagacacagcagagaacttccttattctgtgacactgatgtgggtggcacaggggacctgagttcaggaaggggtggggcaggtcattgctgacccagcagcttgcggtcactctgaagtgatgtaagcctcctgtgtcctaagagcaaccagaggaggaccacaggagcacatgctgtgaccgtcacagaagcaggaggaccctgacctaggaaccgtgaagggactaggacatgatggctaatggctaacacggtgctgacagccagtcctgcagcctctcgaagcctctgctcctgagcctcctcctcgggttccttggtgatggtcacttgcctcctgccctccaggggctccttctggttcccttggggactgtcctctccccttaaccctctctggacctggcttctgctctaggctcccagccctgttcccagccccagtctctagtctgatgctatctattgagtctcctcctgctcctggggcaggtgtgcaggggggcagcaaatcccaggtgatggcactgtgcccagggggcgaagacggttggagagaagattctcctcacccacctttagagtggcacccaccatttctggcaaatgcaccatgtctcccctctgggctaagctcttttcgcgcccaatccaaccctatcttacccaatattgggaatagggagttgctcccgacaccaccgtgctacgaggaaaagccattctttccttttcctgtgaacacacagagggtaagtggtagagcccagattcacaccggtgtctatgcaaaaccataggcagcactgagatttccctaaggccaggctcattagggttatgtagggtgcacagagcggggctgggagaggcctgcaaggcccagtaggtgcttcctgcccaagagtcctgaggtggcccacctggctagagaagcatggtcgttgcttgtttggcagaacacaggactgttgtggtatccttcattgccgtgttcatgtatataatttaaattaaaatgtaaaattaaagaaaagaaagaaagacgttagagcagccccggtcagccccggtcctgggaggtatcacccaggttgtgggctttgcactcctctcccatatgatcacagctcccctcggccccggtggcccccctgccacgccgccttgaatttgacaatgccacattagaagtcttggtcttaatcctgaatgtttcttttgcccaccttccctttcattcgcccagctgtttcaaccccaaaacgctgcttcctccccttcctctcacttccatatctaattagtaactcactctggctgaattcatccccacaattcacccccaatgtaccctgactgccatcactgtcacctgtcgcctgggatgtctgacagtctccggttcaccagctcagctcccattccctttgcatgcagctactggagtgactttgtttttttctttttttagagataagctctgtctctgtcacccaggctggagtgctgcagcgtgatcatatctcactgcagcctcgaactcctgagctcaggcaatcctccaatctcagcctcctgagtagctgggacaacaggaccatgccaccatgcctggggaattttttgtagagacagggtcttgctatgttgcccaggctggtcttcaaactcctggtctcaagcaatcctccatccttgacctcccatagtgccaggattactggcatcagccacctggcccagctctggagtgactcttcaaaagaaaaaccaggtcatgtcactgtttggtgacatgaaacaacccctaccccaaccacacatggatatgcacatgtacacatgcatgtaggctcacacacccatgtatgcatgtgcacgtgcatgtgggcacatgcgggagggtacacccagttgttgtcttttaaaatgaaatcgaggccgagtgcggtggctcacacctgtaatcccagcattttgggaggccgaggcgagtggatcgcttgaggtcgggagttggagaccagcctggccaacatggtgaaactgtgtctctattaaaaatacaaaacttagctgggcatggtagcaggcgcctgtaatcccagctactcaggaggctaaggcaggagactcgcttgaagctgggaggcagaggttgcagtgagccgagatggcaccactgcaatccagcctgggggacagagcaagactctgtctcaaaaaaaaaaaaaaaaaaagaaatttacatttttcccaatgacccatgagactccctcctcccgtgccagctttgtcaccctctactttttttttttttttttttaagacggagtttctctgttgttgcccaggctggagtgcaatggcacaatcttggctaaccacaacctccacatcctgggttcaagtgattctcctgtctcagcctccgagtagctgggattataggaatgcaccaccatgaccaactaattttgtatttttagtagagacagggtttctccatgttggtcaggctggtctcgaactcccgacctcaggtgatctgtccgcctcagcctcccaaagtgctgggattacaggtgtgagccaccgcgcccagctcctctacttgttttctatgctgtctggctggtgtctgttctagtccaggtcacccagccctctctcgcctcagaccacggcacctgccattccctctctctggacaaagcttccctcggctcttcccactgctatcccttctctccctcaggattcagttcccaagtcacctcccctggcctcttaaagcgagctgcccacacagttcccttctgccccatctccatgtctatttcctgcaccgcccttgttacaaaccagatttatcttccctgtgtgtagattctcatttcttgaccatctgcctccacttcccataaacgcactgaggtcagagtccactgcttcctgcccatgcctcgacggcagtgctggcagccagccttgccccctgggtaggaatccatttacaattgttgaaagaaaaaaaatgaatgattaaaaacagtataaaggaatgagaaaacggtggatggtaatacacaaattattcattagccccaaggagtgggctaggaggtacacagagtggacagtcacatcctctgtgatacctgtttgtattgggctcttgagtaattgacagaatgataacactgccaccagagatgagctttccatgacgaccaaggtggaggagtcagattctgggtgctgcggccaaaatacacgtttcaaaataaatgggtaaagaaattcgtcactggagactgcataaaggttggggcaattgccagagccttgcatggagaatcacacctgcttcaaagatccatttctgtgctacaaaccaccccaccttaaagcttaccataaggtgtattgttcaggcttctgtggatcaggactcagatgacctgtccactggatgagccagcagctggctcactcgtgcagctacagtcggaaggcggccaggcgggctggatggtgcccagtggtctcacttacctgcctggtacttggtgtgggctatcagccaggcacccagctgggctgtcagatgctctccctgtggtcaccccatgcatccagcttgagctccctcaccgaatggcatctgggttccaaaataccaagtctggtcaagactctgcctacatcacacttgctaatgccctgttggccaaggtaagtggtcaagctcagtgttgatatgggaggacgaggctgggcatggtggctctcacctgttattccagcactttggaagaccaaggcgggtggatcgcttgaggccaggagttcaggaccagcctgggccatatggtgaaaccctgttgctaccaggtgtgcacctgtagtcccagctactccagaggctgagacaggaggagaatttgagcccagaaggtggaggttgcagtgagccatgatggtaccactgcactccagcctaggtgacagagcgagatgcttttcaaaaagaaaatatacgtgtatgtgtgtgtgtgtttgtgtgtgtctgtgtgttgtgtgggaagccagtcacaaggatgtgaatatcagggggtgtgtttcactggggatcgccaacatgacagtttatcagtcttccctgtgtgccaatgcatcttactccacccacttgaaaataacccacccattcccaacagccacaaagtatcaccccaatatggaatcatgttcagacatcacatccaagatcctgtcatctaaatcaatcccaggtatagacagggcaccttcagtttgttttgtgggggtgagttgcctcaggttcagagatctgtgctctaaaacacaagtgatctccagctgggctcggtggctcaggcctgtaatctcagcactttgggagggtgaggcaggtggattatctgaggtcaggagttcaagaccagcctggccaacatagtgaaaccctgtctctactaaaaaatacaaaaattacctgggtgtggtggcgggtgtctataatcctagctactcggaaggctgaggcaggagaatcgcttgaacccgggaggtggaggttgcagtgagccgagattgcgccattgcactccagcttgggcaacatgagagaaactccatctcaaaaaaaaaaaaaaaaaaaaagggaatcgctagatggggctgaatatccagggggccttcatcacatgcctggaggcttgggcaggctgtcagctggggtgtttcctctctccacctggtctcgcagcatttaggactacaagtctgttttccttgcatgtaggtgagcaagtcctagatatgcaaaaaatgaaacctacaaggctactcaaagcccagccaaggaaatcacatgacatcatttctactgcattttattggccaatgcaagtcacagaccagcccagatggaaggggacaaaaaaatagactgcatcccttgatgagaagagtgtcaaaatctcatggcaaagggttgtaaaaacagaccggaggaagcgtgaggcgtacactgcacccccaccacaccagcccaagcccttagagaaaaatgatgaaaaatccacctttggccagccacggtggctcatacctgtaatcccagcactttgggaggctgaggcaggcagatggcttgattccaggagtttgagaccagcctggacaacatggtgagaccacctctacaaaaaatacaaaaaaattagccaggtgtggtggcgtgagcctgtagtctcagttatgtgggaagctgaggagagaagatgccttgagctccggaggttgaggctgcagtgagcggtgatcgtgccactgcactccagcttgggcaacagagtgagattttgtctcaaaaaaaaaaaaagtcgacatttgttagagtcacccaagcaagggaagatcagacgaataaggtctcaagtgaacattttctacgtgagcatatccaacccggggcctctgcagggcctgttttctctaggagcaaggactattagcaggcaggggatgggcctggggggcctgggaaagggagaacaggtggaggctccatacagggggacgctggggccaagctcaaggtagggcacacccctccatatcgaagtaggtcatcaagagtcatgcagacgggacaaggcaaggagttccggtgcaagctcgctaggaccctcagtaacaccagaatagaacctggacccaggatccagggcagagagaacctttttaccaaagcctgctgtcaccacccaggctgctttgccttgacagtcccactcctcaactgtaggaaggtgagaaaaattcaacttctcaagtgtgctgttcaggtcacaccctctagagggcgagcatgcagcagaggcatgcggcataaacctttgtccctttcctcggcagggtcccgtgaaagtcaggttgcaggacccccaggccacactggaggagaccctgaagctccactttgtcacccaggagtccgtgccttgcagagcctgggccaggtgctgagaaacacagggatggggctgggctgcacctgcccttgcttgttttttttgttttttgttttttggtttttggtttggtttggtttttttgagacagagtcttgctctgccactcagactagagtgcagtggcaccaactcagctcactgcaacctctacctcccgggttcaaatgattctcttgtctcatcctcctgagtagctgggattacaggtgcacgccaccacacccagctaattttttatatttttggtagagatggggtttcaccttgttggccaggctggtctcaaacttctgaccttaagtgatctgcccaccttggcctcccaaagtgctgggattacaagtgtgagccgccgcgcccggcctgcccttgctttttgggttttgtctttgccacccagagtggcgtcacctggataacatgccctaagactgcagggatgtaggtgagtctgtcccagtccaggaaaccaaggctagtatcagattggctttcatggcttctgggcagagcccagatctgcacctcacgtgtcccggagtcagggaagggtgatactggcttccccagttctgccctctggacgggcgctccgttgacagagaccctgaagagcatcatgccaggtgtggcctcaaatagtaaagataagagaaacagaactcgaggaggagaaatatagaggccaggccaaggccgtgcacagccccctacagcatctggcactgtggtcgcttctttactctgcctccctcctctggagctcccgtgaatgtgagcgtcctcctcctggctggacggcatctcctctctctgggccttctgccctggccccatcctccctcggactgggtgccgagtctcaatgttggtcacttatgaccccaaatcgccttctccagctggacacccccagtctcctgggctggactctgcagtcacctttagtgctcccagctcccctgttcctaagccctgctgtttctacctttgggaggacacgcaggctgtcagcccatgtttgccgagtgctacggtgcttgagtgtgcatagccctaaacagggagctggcactgggtgttatgactccccttgctgtaaactttaaggactcaaacagaagcagaaaaaagtgaaaataagcaacatctactgagtactgaccacccaccaggctccgttccttatgcctgaaggggagcggctcatttaaaccttacacctgaatgggagcgctcattgaacccttgcgcccaaccccacagtgaggagccatcattttcaccttccctgttcagatgaggaaatggactattgcagttagaggttgcaaagccaagctggggttgacccagccaggtaggtctctacccaggtgctcaaacgcagctggggcaattgaaacaagtcttgaaatcagttacagagattctttcttttttgtattttaccatttacctaactttacatgcaacttccttagttcagatacaatgtttcattaaaaaaaaaaaaatctgggctggacatggtggctcacgcctgtaatcccagctctttgggaggctaaggcaggcagatcacttgagatcaggaattcgagaccagcctggccaacatggtgaaaccctgtctctactaaaaaaaatacaaaaattagtcaagcatggtggcacatgcctataatcccagctactctagaggctgaggcagcagaatggcttcaacccaggaggcagagtttgcagtgagccgagatcacaccactgcactccagcctgggagacagagtgagactctgtctaaaaaaaaaaaaaaaaaagtctgctcttctttagagcaagggtccccaacccccgggcctcggatgggtacaggtacatggcctgttaggatcccagctgcacagcaggagatgagccgtgggtgagtgagcattaccgcccgagctctgcctcctcttacatcagtggcagtgttagattctcacaagggcgagaaccctattgtgaactgctgtgaactgcacatgcgagggatctaggttgggtgctccttataagaatctaatgctggccaggcacggtggctcacacctgtaattccagcactttgggaagctgaggcaggagaatcacttgaacacgggaggttgcagtgagctgaccctgccattgcactccaacccccggcgacagtgtgagactctgtctcaaaaaaaaaaaaaaaaaaaaaatctaatgcctgatgatctgaggtggaacagtttcatcccaaaagcatccccctcaccctgtcagtggaaaaattgtcttccacaaaacgatcactggtgccaaggagtttgaggactgctgctctagaggaaatcatacagtgtcctactgggaaactacctttaagaaaggaagttaacgtgttctttaattcacagatggaattttcaaatatttgcaacccaaattattcctattttaaattataaatgcaccagtaaaatgctttttttaaaaaaaaggtttttggctgggcgtggtggctcaagcctgtaatcccagcactttgggagcctgaggcgggcagatcacgaggtcaggggatcgagaccatcctggctaacacggtgaaaccccatctctactaaaaatacaaaaaatcagctgggcatggtggtgggtgcctgtagtcccagctactcaggaggctgaggcaggggaatggggtgaacccgggaggcggagcttgcagtgagccgagattgcgccactgcactccagcctgggagacagagcaaaactctacttcaaaaaaaaaaaaaagtttaggctgggtgcggtgactggtgcctataatcgcagcactttgggatgacaaggcaggcagatcacttgaggccaggagttcaagaccagcctggtcaacatggtgaaacccagtctctactaaaactacaaaaattagatgggcttggtggcatatgccagtactcccagctactcgggaggctgaggcaggagaatcgcttgaacccaagaggtggagttgcagtgagccaggatctcaccattgcactccagcctggctgacagagcgagactctgtatcaaaaaaaaaaaaaaaaaattacacacttaataacagaccatcaaaatatatgaagcaaaaattaacagaattgaaggagaattagagttctacaataattggagacttcaatacccaatgctcaataatggacagaacaaccagatagaaaaaaaaggaaggaaatagagaactcaacacaataagccaactagatctaacagacatatatggaacacttcacccaataacagcagacagccgctgtggaaaacagcatggcagttcctcaaaaaattaagaatagaatggccagatgatccagcaattccactgccaggtgtacactcaaaaaaattgaaagcagagtctcaaggaggtatttgtacacccatggaggtaacccaaattttcatcaacacatgaatggagaggccaaatgtggtctacacatgcaatggaatattactcagccttgaaaaggaaggaaattctgactcacgctacaacatggatgaaccttgaggatattatgctgagtaaaataagccaatcacataaagagaaatactgaatgattccatttatatgacgcacttagaatattcccaatggccagtctggcgcagtggctcaagcctgtaatcccagcacttcgggaggcccaggtgagcggatcacctgaggtcaggagttttttgtttttgtttttgtttttgttttgagacaggctgtgtcatccaggcaggagtgcagtggcatgatcttggttcactgcagccttcacctcctgggctgaagcaattctcctgcctcagtagcccgagttgctggtattacgggggggcccaccaccatgctcggctaattttgttttgtttttttttttttttgagacagagtcttgctctgttgcccaggctggagtgcagtggcgtgatctcggctcattgcaacctccacctcctgggttccagtgattcttctgcttcagcctcctgagtagctaagactacaagcacacgccaccacccccggctactttttttggtgtttttagtagagacggggtttcagcatgttggccaggatggtctcaatctcctgaccctgtgattcgcccaccttggcctcccaaagtgctggcattacaggtgtgagccaccattcctggccaatttttgtatttttaatagagacaaggtttcaccatgttggccaggctggtctcgaactcctgacctcgtgatccttccgcctcggcttcccaaagtgctgagattacatgcgtgagccacctcacctggcaggttcaggacttcaagatcggcctggccaacatgccgaaaccacgtctctattgaaaatacaaaaattagctgggcatggtaggatatacctgtaattccagctacttgggaggctaaggcacgaagaatcgcttgaacctgggaggcagaggttgcagtgagccaaaatcgtgccactgcactccagcctgggtgacagagcaaggctccatctcaaaacaaacaaacaaacaaacaaacaaacaaacagagaatattcaaaatgttaaagacagaaagtagcatggtggttgccaggggctggcagaggagagaatggggaggagggaatgaagattttgcattaaacgggtacagagtttcagtcttacaagatgaaaagagccggccgggtgcagcggctcacatctgtaatcccagcactttgggggggccgaggcaggtggatcttttgaggtcaggagttcaagaccatcctggccaacaaggtgtaaccccgtctctactaaaaatacaaaaattagctgggtgtggtggtgcgcacctgtaataccagctactcgggaggctgagggaggagaattgcttgaacctgggaggcggaagttgtggtgagctgtgattgtgccactgcactccagcctgggcaacagagtgagactctgtctcaaaaaaaaaaaagaaaaagaaaaagaaaagagccatggagaaggatggtggtggtggttgcacaacattacaaatatgattaatatgtttaataccactaaactctgtacttaaaaatggtcaagatggtagattttatgttatgtataatttaacacaacatttttttctttttttttattattattatactttaagttttagggtacatgtgcacaacgtgcaggtttgttacatatgtatacatgtgccatgttcacaacatttttaaaattggaaaaaaagaaaaccagcagcaaggattttaccagagcaataagtagatgacagtcacatgaaaaagacattcgacatcattagccattagggaagtgaacattaaaatcacaatattactacagacctatcagaatgttaccacagacttatcaatgggtaaaataaaacttagtggcagtgccaaatgctggagaaactgggtcatttatacattgctggtgagaatataaaatagtacagctattctccaatttagtttagtagtttctttctttctttctttctttcttttttgagatagtttctcactctgtcacccaggctgcagtgcagtgggacgatctcagctcactgcaacctctgcctcccgggttcaagtgattctcctgcctcagcttcctaagtagctgggactacaggtgtgcaccaccatgtccagctaatttttgtatttttaggagagacggggtttcatcatgttggccaggatggtctcgatctcttgacctcatgatccacccgcctcagcctcccaaagtgctggatttttattatttttattattttattttatgttattttgagatggtgtttcattcttgttgcccaggcttgagtgcaatggtgcaatctcggctcactgcaacgtctgtctcccagtttcaagtgattctcctgcctcagcctcccaagtagctgggattacaggcatgcaccaccacacctggctaattttgtattcttttttagtagagatggggtttctccatgttggtcaggatggtctcgaactcccgaccttaggagatccccctgactcggcctcccaaagtgttgggattacaggcatgagacaccacgcctggactatttttttattttttgagatggagtctcactctgtcgcccaggctggaggatactggtgagatctcagctcactgcaatgtccacttcctgggttgcatctattctcctgcctcagcctcccaggtagctgggactacaggtgcgtgccaccatgcctggctaatttttgtaatttttttttttttttagtcgtgacagggtttctccatgttggtcaggctggtctcaatctcctgacctcaggtgatccacccgcctcagcctcccaaagtgctggtattacaggtataagccactgcactcagccatatataaccttcttcaaataaaattacacaggtggaaaatttttttctttctttttttttttttgagacagggtctcactctgtcgcccaggctagtgtgcggtgatgatgtaatcatggcttaagtgatcctccccgcctcaacctccctagtagctggaattacaggtgcacaccaccacatctgactaatttttttgtttttgtttttgtagacacggggtttcagcaagttgcccaggctggtttcgaactcctgacctcaagtcatccgtccacctcggcctcccacagtgctgggattactggtatgagctaccacaccttgcccgaaaacgttttcaaaataataaaatgggctgggcaagtggctcacgcctgcaattagaggcctggagacattaagtaaaccacccaaggtcacacagtaaggaaggggcagatctcagagtcgcctggctgcaaagctggtgtcccttccccactgtgccttaactgccgccttacagctgggttggaggatgcctccctggtctagggtcattattacattttcttttacaaagtatgtttctgataaacggaactgtttattttccaccgatggtcttatcctttgtccatctctttctgacggcaacagaaaacttcaccttccagaggagcgcctctgcctggctgtcccaccgtctgggaagtaaggagcgcctctgcccagcccccgcaccgtctgggaagtgaggagcgcctctggacggcccccgcaccgtctgggaagtgaggagcgcttctggacggctcccagcaaccccccaggtgtgaagtgacagccctgtgtgtgatctttctgccctccccaagtttgcattttcgacaataaaatttacttttaaattaaaagatttatactggggaagatttaaaaaaaaaaaaagaaagaaaagaaaactcaccttccaaaaacaaccactgggagtccgctttgtgcagaggttggacaagcttctgtgcaggtaggggcgctgctgctccccctaccacccacgcatcctcctccctgtctgcattcccgtcgtcgtagccagaggagttcagagcctctacagagagcacaacttctccagctggaacaaactccccttaaaggaatctatttaggaagattatttcaatgtacattcattcctccaaaatatgcttagatggacttaaataatcagaaagctgtgtgtgtatgtgtttcccgttttcttggcccacaaagaaccccttgagaggtccctgggcagtgagcctgtttatagacacccttctcccttccttggtgtcgcagacatcgcagtccctctgaggggctgacctgccccccaccttctggaagctgggaggttggaagaggggacgcatgccatggacccagcacacagctgggaactcgaggcacacctaagccttcccttgtgctgtgcggagtccacacttccttccccactggagtctcaaaacctcccctcactcaacagggtggtgctgctcaaagctctgggcacacattagggctggggagggggtggtggagagggggctccagcctgcccaaccaccaggcaacggggcacctgcccctctctcagctgggtctggacccgcctcccaggctcaggctgcaatgcctttctctttctctttgcaattccgttgggtcctgcccaggacagataaagacagagcagcctgtctttattggaggttcctctgccagcgggaagggtccggggaaaaccagagccagagccagagccagagaaacatgaagcaccccggggcctcccacaccaatgcctgagcaggaatggggaggggccatgactcataaggccctgggaggtcactttaaggagggctgtccaactgcaaggacgctgtaagcaggaagtgaaaccacagagcttcaaaaaaagagcgggacagggacaagcgtatctaagaggctgaacatgaatccacagatcaggtaccgctgcccactctgcctgctgggcccctcctgccccttcctgcctggtggtcctgctgggcctcaaccctggcctccccccgcccctgccccagccctgggctccctcccctctggctcccctgccacacgaatcccagtcaggctctttgtcctgctgtgtggtcaccccactgctgcttctgaatgggctgcctcccctacctgcaccagcccaggccccgtgctgagactctcccttaaagtcatgcccggactggtgctccccgccctgggagggtgctccctctgtgtgcttcctgccactcctgagctcagaaactgggagaattgaaccaaagggtaattggagcaatcaggcatttttgttctcagtgttttgatgaaatttctgtaagaattactttgcttaaatacaaagtcttaggagagggtgcgggggtaggaatggtctctgaagcacatgataaatcgtgtcatccaaggatgactccatggtgagcagatgtccccagacaggttccactccaaggtcactcttcatcttttagaacatgaccagtggttgagcgtggtggctcacacttgtaatcccaacactttgggaggccaaggcgggcggatcatgaggtcgggagtttgagaccaacctggcccatatggtgaaaccccgtctctactaaaaaacatacaaaaattagccaggcatggtggcgcatctctagtcccagatactcaggaggtttaggcaggagaattgcttgaacctgggaggtggaggttgcagtgagctgagatcatgccactgcactccagcctgggcgacagagtgagacttcatcaaaaaaaaaaagaaagaacatgatcagtaacatggaatgtgagaatgtgggaaaaaagtgcaatgatgaggagaaatgctctgattttaaaatttagtgaaaagagagcccagtccccaacagctttctcctacaggatccgtgatgcagaggctggacagggctggcctggaaaggggcccctgctccatccgtccccagctctgtggcctcggcaggttaccccgcctctctgtgcctctggcatctcctctgtaagatgggaatggcccctgcaggcctagggtagcctcacgtgagctcacacccgctcagcacttagaagagtggcctgggcctcagaattcagttctaccatgattttaaaataatgttaacacgcagagtgaaacatcaggaaggaattgagctgaaaggttaaaagctattttttaggggtgaagggttttattctcttttgcattctcctaatgggttggggagtgggttggcagaaatactaggagggtggggaatgtacccctggaaaggccagagttggacccgagctgggagagatcaccccagcccgcctgccagcatcccctcctcttcctctcccctcagtcttcctgcctgggaaggcagcagaaattctcagggctgtggaggggtcggggaggcccagggccatcctgggagctgtgttcagtggacatgagccccgaggactcccgggagggctccctgcatgggccggtttctctcttgtgccttcagaaatccgatggagcggatgtatcgagacacattctacgacaactttgaaaacgaacccatcctctatggtcggagctacacttggctgtgctatgaagtgaaaataaagaggggccgctcaaatctcctttgggacacaggggtctttcgaggccaggtaccacccaaacttcaatcgaatcacaggcagtgttgcaggaattagaggactggagagactgatatgggtgagacaggaggatttatttaggtgcactggttcagcagactcacatccaaaaaggctgagcccttaacaaagacagactgaggtatttataagcaaacttacagaagcagaacaaaggcgattaatcaaacagtgacaggtcacataatctatagcataacagatgacttagcataacttggggccttctatagctggtggccttgcagctacatcaaaaggaaaacaggaactggctaaatacagacatttgtaaaatatagttataatggttctggaaaggagagacagtaaaggaatttgtcttttttttaaaaaatttttttaaaattttcttcaaccttgccctggaggggtgtgggggtggtgtctggagcccattcctttggccttgacttttcaggcagtgttataactgtcgttggagtgagctggctaggcagaggaaaacttgttcttcttttctttttaacccttgctacagtaggacctaagcagctggaaatgcagaaaacacaacaataagtaaaatgcccagcactgggctctcaattgtgtatttttcccacatttcttttttctctttttttccttttttttttttttttttttttccgagatggagtctcgctctggcacccaggttggagtgcaattgcacaatcttggctcactacaacctccacctctcaggttcaagtgattcttcggccttagcctcccgaatagctgggattacagaaggctgccaccacgcccagttaattttttctatttttagttgagactgggtttcaccatgttggccaggctggggaattcctgacctcaggtgagtcacctgccttggcctcccaaagtgctggggttacaagcatgagtcaccgcacctggccacttcccacagttctgtttttttgttttgttttgttttggtttttttttaagactgagtttcactctttgttgcctgggctggagtgcaatgactcactctcaacttccacctgccaggttcaagtgattctcctgcctcagcctgtgagctgaacagtcacatgagggtgaaggttgttgccacaagctcaggggatgctccagacagagtggcctgggatgtcgagtcacagctgctccatgccacggggacaagaggaagcaggagtttagtctgacacactgcccttccagatagagggcaagagacagaaagaggggctgaagtcacccttgaataaccacagcagtggcacccacaaaggtgcagtccccacagcctcatagcctcttctaggtgccacctcttaaggccattacaatagccattaacactgaacgtgagctttggagcagacaatcactcaaactaaacaggggggatggaggaaaggagcttcaatggcaagatcccctgggctcctgtcctggcccctcctctccctgccccacccctgcactcctcctgctccccctctcagagcatcccctgccccctgctcctctcccaggtgtatttcaagcctcagtaccacgcagaaatgtgcttcctctcttggttctgtggcaaccagctgcctgcttacaagtgtttccagatcacctggtttgtatcctggaccccctgcccggactgtgtggcgaagctggccgaattcctgtctgagcaccccaatgtcaccctgaccatctctgccgcccgcctctactactactgggaaagagattaccgaagggcgctctgcaggctgagtcaggcaggagcccgcgtgacgatcatggactatgaaggtgagaggtggaggggtcaggggagcgtgagcgggaggaacagcatgaaagatggatggatctgcaatgccatggctgggggtgtcccagggcagcctgcaggggtgggactggcactgactgcaactgacagccaggagaccaggcctgggaggacaggccagggtcaggggagagcctgactgcttcccgcttcttcatctcagaatttgcatactgctgggaaaactttgtgtacaatgaaggtcagcaattcatgccttggtacaaattcgatgaaaattatgcattcctgcaccgcacgctaaaggagattctcaggtgagggtctccctctggcctcatcatctctctcctctcacctgctcatcctcctgaggcctccgttggcctggccctcccgccctccctcttgacccactgcctgccctcatggtcacaccaccttcccttaactcctggtgctccctccacactgcctcctccctgctttcctgggcccttcctgtgagtaagaggccccttctgcctctaaggcacctgggtcttggactagaggaacaaacagcaagacagggtggcctgggacaccagccgctgcccttctgtgacatggggacaagaggaggcaagagctcagccttccagggaacaactctgggcaggagatgtggaaggaaggagctcagtgtgggggcacccatggcatcctggggggacatctgagggccacccccacccgctattcctccctccaatggtggcctctgagtgtgaaggcatgggggaaggcagacacctgcccctgactctccctcactaccacatagctgctgggtggctggggacggggggggtccctgggatgattcctgagggcaggatccaggggtccctccagatgtcctcccatccaggtgagaaagcagcataaagtgaggcttgcactcagatgggcctgggaggtcactcacagcgcaggtgtctcctggaacaagggccctggaagatagaaatagaatccaaacccaggactaacatcagggccaagacaagcctgccagggaggctgcacatgaagccccagatcagggaccactgcccgctctgcccatggggcctctgctgccctttcctgcctggtggtcctgctgggcctcagccctggcctccccctgtcccagccccagccctgggctctctcccctcctgttcctctgccacccccactcccagccaggctctttgccctgttgtgtggtcgccccactgctgcttctgaatgggccacctcccccacctgccccaggccagaccccctgctgagactcttccctgaaagtcaccgctgggctggtgctccctgccctgggagggtgctccctgtatatgcttcccaccattcctgagctctggaactgggagaattgaaccaaaggatgattggagcaatcaggcattttgttcttagcattttgatggaatttctgtaagatttactttgtttcaacacaaagtcttaggagagggtgtgggggaggaaatggtctctgtaccagaaaataagtcatttcttccaaagacgcctccgctgtgagcagaggaggatgcacacgaccccagacacaggctcctcctccgtgagcaccattcaccttttagaatgacacctgcaacatggagtgtaggaaaacatatgatcaggagaaatgctcttattttaggcagggcacggtggcttatgcctataatcctagctctttgggaggctgaggtgggtggatcacttgaggtcaggagttggagatctgcctggccagcgtggcaaaacctcctctctactgaaaatacaaaaaatgagccaggcatggtagcgggagccggtaatcccagctacttgggaggctgaagcaggagaatcgcttgaacccgggagggacagcagtgctggtcacggaaacacccaggactcaggactgaagcacaagtgtttccagtccccacacactaaaaaggagacaagaactcctcttcgagcttttctgatgagcactcacctctcaccctcaaacccctggggcctctcttttcctcctgaccctctctctggacctggcctcttgctctaggttcccagttttggtcccagtgctggtctctcctccaatggtaccaattccaggtctccttccacctcctggggcagatgcacagggagcctgaaaatcccagtggataatgatgctgtgccccagccagtgaagacagttggagaggggattctcttcacttgtctttaaatgagcatctactatttcttgcaaatgttccatgtctctggacttggcctaagccatttttatgttcagtgtcatctcgttctccctaatatttagaaaagggtgttgcttgtaggaccactttgctatgaagaagccttgtttccttttcttgagaacacaaagcaagtgagtggtagagcccagattcatacccaggtctactagaaattgtggcaaacagagattccttccttccttcctcccttccttccttccttccttccttgcttcctctctctttctctctttctctttctttctttctttctttctttctttctttctttctttctttctttctttctttctttcttcctttcttctctctcgtctttcttcttttgctgctgcctccaaacagagatttttctaattctggttttgtcaggatgtctacagaggggccgggagaggccttcaaggtggggctggtgtttccagcccaggagtcctgagctgccccatctggcctgagaagcacgtttgggagacctcatggcatccaaagggacgtggaaaatgctatgaattatccaaaaagatgtccctggcaggctcctctccccaatgatccccctcaggagtgtccctgccccaatgctgggtgtggtaggagttaaccctgcaggcaggaggaagccccagcaggtccatctccagcaggggctgtgggtgagcagagccaggacaggggtgcatggtgaggccagggaaggagacccagctctaccccagggagaggggcagggtcctccccggagggcctgagcacactgagctgaccctggggagaccctgacaaggcctaaacaggccccggggctgtgttgacttcctgataatccaccagaaggggtcagagagagaggatcagtggcccccacaaagggagtggaagcgcctcctctgacaggtgcctcagtatatggggagcagggaaggagtggggggtgcaggagaggagcgagaggtagtcccaggaggagtcttagggcttttggtttcccctgtctttgtccacagatacctgatggatccagacacattcactttcaactttaataatgaccctttggtccttcgacggcgccagacctacttgtgctatgaggtggagcgcctggacaatggcacctgggtcctgatggaccagcacatgggctttctatgcaacgaggtgaccgacccagccacctgcatccaggcagggccctcccaatccagggacactcatagatagaaggttctgggtggtgcctgtggtttcctgcagtgtttgtcacttgtgcttcctgcagctgctgctgcttggccctggagttggggggagactttggcttcagtgactctccatggccaggtggggttgagtctgcccaatggcaaagtgcttcctgaggaccctcccaggatcccctcacagacacagctctcaccaggaatgattcggaactgtgggatttgaggactcagggcctacctgactcacaaggccaggatgtccctgtgccctctcttgggcttcatcctgcggagagacagactggggcaggagaggctgatcaggggttttgtcctgcccagggtggagcccacagcaaggccagaacaggtcccatgtcaggatgcaaagatggccagcagttggggaagaactgggccaggaaaggctgagggggccaggctaggctggccaggagccctgagcccaagggactttcttccctggcccctacccagcacagcctctgtctggagaggccaagttctgcttggctctgttgctggaaactgggggcttctctgggctctatgagctcaatgtgggcctcgctggatccacacacactgcttggaacatcctttcaagggtgccagtctccatcaccgcctaagcagtgggactcccccaggaatgacccacagccccttctcagcacaaaccatgtcatccacttcaccctgcatcccctctgatggaatccctccctgtctttgtccccatcacaatcacagtccttgctgccctgctgtccccaacttgaccgattcctagtcttagtggaaaatccttttctctgaagtttggagtaaataccatatttctataagtcaaaataatgacaattataccatgtcacagggaccttcccacattggagtgagtcctgctggtcttctcttccccactacttttggtggaattcattttggcctaagtctatatcacatttgggctcagcacaggttgtggcacagaatagaagtttctagaattatgggccacagatgggatgggagtaggggagttgatgagtagagcaggtcaatctccccttgaaggaagcacactcactcaggggcatcaggccaatgaccttggggctccgccggcccctcctccctgcccccatctctgtagcccctccctgcagggctgggtctggggtgagggtcctgaaggctctgaccttgggtacaaaattgatgggggctccaaatgctcagtaattagagaaaacacattttaatttaataattaatgcaatattttaaaacgcaaatttaatacaaatagatcatgatgaataaaagcaaagattttaataaagcctggcaggagagtgctgtcctgtgtatattggagctggggcaaaataaaacctcattgctcctgatctgtttgtatttaaatgggcaacattttgcttatcttgggatttttgcataacatctgatatttttaatattgcatagaaaatcatgcatcctaataaccggggttttggcgacccctctaatttcgtgctggaggcccccgcctccccagccccacctggtccaggcgctccctccctgttcaccacacatcacctcacactctgtttccttttctaggctaagaatcttctctgtggcttttacggccgccatgcggagctgcgcttcttggacctggttccttctttgcagttggacccggcccagatctacagggtcacttggttcatctcctggagcccctgcttctcctggggctgtgccggggaagtgcgtgcgttccttcaggagaacacacacgtgagactgcgcatcttcgctgcccgcatctatgattacgaccccctatataaggaggcgctgcaaatgctgcgggatgctggggcccaagtctccatcatgacctacgatggtaagaatggaaggttcaggtggggtggggtgggtgggggcaggagaggttcctgggaagaaaaggagaaaggccttggtctgctgcctgcagaaacgatggctggactctgggacctgactttggggtcgatgggaagagagaggccaggccaggagatatgggcccggggagggtggctggaagtggaagcagaacttggggatttccgaaagaaagagaactgggctggcccagattccaatgggaaggaagtacctgatgaaggagctaagtccctaggggagggagagggaaaggagggactgaaaccaggatgtgggaagtctgtcctgagagtcatgggcccttggtgctgccccctccccacaacaggagcgtgacttatctcccctgtcccttttcagagtttgagtactgctgggacacctttgtgtaccgccagggatgtcccttccagccctgggatggactagaggagcacagccaagccctgagtgggaggctgcgggccattctccaggtgagggcttcctccctctgcctggtgccccatcggcctccccctcctccccgctcccctgtgccttgccttcccctctgctcagagcctcctctgggttccctgctccccacagggcgcccagctccgtccctccctttccttctcacagcctccttctctttcccacctcccgcatccctccctcctctcccgtcattgtcactgtccccaggccacctccctgtgccctctttccactctctcacctcctgctccattcaacccccctgctcttccagaatcagggaaactgaaggatgggcctcagtctctaaggaaggcagagacctgggttgagcagcagaataaaagatcttcttccaagaaatgcaaacagaccgttcaccaccatctccagctgctcacagacaccagcaaagcaatgtgctcctgatcaagtagattttttaaaaatcagagtcaattaattttaattgaaaatttctcttatgttccaagtgtacaagagtaagattatgctcaatattcccagaatagttttcaatgtattaatgaagtgattaattggctccatatttagactaataaaacattaagaatcttccataattgtttccacaaacactagcaaatgtgtagatgtctttccttgtgtagcggacctgtagctgggaaaggtcacacaacatccctctggatccagaaaactcagctaaaccacacaggagaggaacctaaatgcagaccccaccctcactcacagagccccgcccaccctcactcacagagccccgggcgctgattggaagggacaggcccagcagtaagaggacagtcagcagccagtctccctgttggaaaggaaccacaaacgtgcagtcaggggccctcgggagccgccctgtgtccaccccttcctgattccacccccctagagagggagcccaggggaggccatggctgagacccaggacagacccagtcgggggaaggagcccagggagggggcaggtgtctaggctgggcccagagagagggctggggagaggagcagcccaggaggcagagcccagccacagaggggaggggagctgagtcccggggacaggaagctccagaggcagagacggagcccagggctagggcggcaggtgtcagggctgtggcttcagcttggcgtctgtcctgggccttctgcgctggttcccaactctgggatgtgttatttatgtgcctgattacagtggcggctcccacctcacaatttctggaaagtcctcagaagccacgtataagaccaagaaggggcctcacatgcagctgctcctgggcagaaacgactcactgtttccctggcctagacacacacaacacactaacacacacaagacacacatacacacaacacacacaacacatacacacacaacacatgcacaaaacacatacacacacgcacccacacacagtgacagagacttcacaaaaagaaacctcctccaggttccccagagcacctgtccccggacggggactcccttgcatgagacagctggccaaggagaggactcccttctcccctgccagctttgtcaccttctacttgtttttttgtttttgttttgtttttgagatgaagttttgctcttgttgccaggctggagtgcaatggtgtgatatcggcacaccgcaacctccagctcccgggttcaagcgattctcctgcctcggcctctggagtagctgggattacaggcatgtgccaccatggccaactaattttgtatttttcatggagacagggtttctccatgttggtcaggctggtctcgaactcccgacctcaggtgatccgcctgcctcggcctcccaaagtgctgggattacaggcgtgagccaccaagcccagctcctctacttgttttctatgctgtctggctggtgtctcttctagtccaggtcacccagccctctctcgcctcagaccacggcacctgccattccctctctggacaaagcttccctcggctcttcccattgctatcccttctcttcctcaggattcagttcccaagtcacctcccctggcctcttgaagtgagctgcccacacagttcccttctgcctcatctccatgtctatttcctgcactgtccttgttacaaactggatttatcttccctgtgtgtagattctcatttcttgaccatctgcctccacttcccggaaacgcactgaggttggagtctaccgcttgctgcctgtgccttgactgcccagccttgccccctgggtaggaatccatttacaattgttgaaagaaaaaaaatgaatgattaaaaacagtatagacctagggcagtggctcacgcctgtaatcttagcactaggaggcaggggcaggtggatcatctgaggtcaggagtttgagaccagcctggccaacatggtgaaaccccgtctctactaaaaatacaaaaattagctgggcgtggtggtgcatgcctgtaatcccaggaggatgaggcaggcttgaacacaggaggtggaggttgcagtgagcctagatcatgccactgcactccagcctgggtgacagagcaagactcaactcaaaaaaaaaaaaaattaattaaattttaaatatagaatttttgtttttttgttttgttttgtttttgacatggaatctcactctattgcctaggctggagtgcagtggtgcaatcttggctcactgcaacctccaccttctgagttctagcaattctcctgcctcagctttctgagtagctgggattacaggcatgcgccaccctacccggctaatttttgtatttttaggagacacggggtttcactatgttggccagcctggtctcaaactcctgacctcaggtgatccacctgcttcagcctcccatagtgctgggattacaggcatgagccactgcgcccagcctatagaattttttttaattcttaagatttaaatacgacaatatgcgaacaccaaagtgtgtactccccaacttaagaaataggcacaacacaactcctagccacccccctccccattcatctgcaaagtgagtctagggaggttcttgtgattctttggcccaatttttttcctgtccaatacttttatagcagagatgatagaatgtaacagttaaaagcatgggctgtggatgcagaattcctggattcaactcccggctcttcctcctcctacctgtgtgaccccctattgagtgactcaccctctctgtgccttggcttggagctcattaaggcaggtaaagtattcaatggatggacccagccacagccatggccaacaggtaataaatagtgctatgctggaaactatcttgtgcccagaagttggagtcctgcgtctttccttatagtatagttacaaacatttccccacatcttaggaaaaggcttcaaaaggctgcataatatacgtgtgatagccaggtgtagtggcgcctgcctgtaatcccagctactcgggaggctgaggcaggagaatcacttgaacccgagaggcggaggttgcagtgagccgagactgcgccattgcactccagcctgggcaacaagagcgaaacttcatctcaaaaaaatccatgcctggaaagcccctgatctacaagttctcaccaacccccagtggagcacagttaggtagttttcaaatttccagtattgtccatgaagctgcgatgtggggtttcataattgcttaggcattttggacagatggtcgtagaacatttcctaagaactgaacaaagcttttgatgcacttagccaaacccgcctatgaaaatcttcttggagttcactgtccccacggaagggtgtgaggacctgcctcctcacccatctcgcagctcctctgcatctgggcatccccagtgaaactgtggcactagttggggaagaacagagccaacccaggggccagcaggagtccagccccaaaccaggacccggccactgttttggaaccaactccttcagtgttaccctacaacaccctcgccccatgaaggctccacctccagccctgggctcgccggagttacccagtcagacgatgccatttctgctccctcctgaaagaggaagtgtccaggatgagaacttcaggcaaagaggtgcctgtggatgggcagtgggagaagacttggagacagagcatctgtggctaaggacagggagatttggggtggtcatcacaaagaggagggcctgagggagggaaggcaccgttcctggggctgagaagtgaccccatccctgactctacacaaggaaaaatgagatgtggcctcgtggactaggctggattcggggcagaaggtcctggagaccaccagcaaagaaagcaaaaagctttccaggctcatcccaggtggtcggggcctcagagatgaacaagtgcctgccagggctgcagggcacccgtctgtgtcttcctttcatctcccctctgacctctggatgccagatgtctccaaaggacttcaacttttttttgtttgtttgtttttgttttttgagagagtctcactctgtcacccccgctggagtgcaatggcaccatctcagctcactgcaacctctgcctcccgagttcgagcgattctcctgcctcagcctcctgagtagctgggattacaggtacgaaccaccatgcccggctaatttttgtattttagtagatggggtttcaccgtgttggccaggcaggtctcgaactcctggcctcaggtgatctgcccgcctcagcctcccaaagtgctgggattacaagtgtgagccaccgcgcctgacctggacttcaactttaactatgaaaacctacagctggccaaagggcgaggggagacttgcctatcctaccatgtagagtgatcagatggtgacaccctgtcctgctggacaccagtgtccttcacaaccaggtgttagctggggatggacacaggaatcccagattggtagggaaaggggagccccccacaagaccagctttcttcctcccatcaggctcagaccaaacacattgcacaacgcagttgcatggaagccacaaagatggaaacccagggcctggggccctctgggagggacctacacacgatcatagcccccccgacaatgcctcgtgtgcccaacaccagcccaccaggtagctagagccattccctctggtcactggagcagagcagccaccacagcctcctgcaacacaccctcccatgctgcgcccacccgcctgggctctcccacctccctttgacctaccttgttcctgggcacagccccctgtcctggctgcagatctcagggtaacagacctccacacagctgctgatgcagaagtccaggctgcagtgcccacaagtggatagaggagggggtacgtgggatggaggggctcactatgggtcctcgttgatttccctacactgtgatctcctggagggaggaccatgtgccatccatccttgcatcccaggttcctgcctgagccgtggccctgagtgggtgctcttgggttactgttgaaggaatgaaggaactagtatatgaatgaaccagttgtccttccttgcctccccccttccctccctccctccctcccttccttccctcccttcattgacccttccttccctccctctctccctccctccttcccttccttcctttcttccttccttccctccctcccttcattgacccttccttccttccctccctcccttcattgactcttccttccttccctccctctctccctcccaccttccctccctccctccctccttccttccttccctccctatctccctccctccctcccttccttccttcacccttccctccttccctccctatcaggggacctggtccgataatcatgtaggttcttttctattttcttaagtgtcggctggcttgagaaataaagggacagagtacaaaagagagaaattttaaagctgggcttccgggggagacatcacatgttggtaggatccgtgatgcctcacaagccgcaaaaaccagcaagtttttattagggattttcaaaaggggagggagtgtgtgaataggtgtgggtcacagacatcaagtacttaacagggtaatagaatatcacaaggcaagtggaggcagggcgagatcacaggacctcaggactgaggcaaaattaaaattgctaatgaagtttcgggcaccattgtcattgataacatcttatcaggagacagggttttaagagcaacccgtctgaccaaaatttagtaggcgggaatttcctcttcctaataagcctgggagcgctatgggagactggagtctatctcacctctgtaatctcgaccataagagacaggtacgccctgggggggccagttcagagacctacccctaggtgcgcattctctttctcagggatgttccttgctgagaaaaagaattcagcgatatttctcccatttgcttttgaaagaagagaaatatggctctgttctgcccggctcaccggtggtcagagtttaaggttatctctcttattccctgaacaattgctgttatcctgttcttttttcagggtgcccacatttcatattgctcaaacacacatgctgtacaatttgtgcagttaatgcaattattacagggtcctgaggcgaaatacatcctcctcggctgacaggattaagagattaaagtaaagacaggcataggaaatcacaagggtattgattggggaagtgataagtgtccatgaaatctttacaatttatgtttagagattgcagtaaagacaggcataagaaattacaaaagtattaatttggggaactaataaatgtccataaaatcttcacaatccacgttcttctgtcatggcttcagctggtccctccatttggggtccctgacttcccacaacacctccctcccttccttgacccttccttccctccttccctccctccctcccttcctttcttcctcccttcttccctccctccctgcctccttccctccctccctccctccctccctccctccctctcaggagagagcagcacactggaatggctgagcttgaggaccccccatctggcttgcacagtcacccaaaccaccacccctccccttccctcctcttctgccttgaggaatctgactgtctggaaacttgtttctccttctccatgaacattctaaagccactggccatgcactggtgctaccaggtcacctggagcatctcctggagcccttgtccttaatgtgcccagacagtgaacagcttcctggctgagcatgtcaacgtcaacgagaaggcttgaagcctgacccctccactgccaacagccagaaattgcaggaaatgaggaccctgcaccgggctggtcagctgtcatgtgggatgtcagggggaggctttgggctgaagggtggttgggagccggtggggagagtccttggctaggactgtaggtgacaccaaggacaagactcaggacgtggaagactcaggacgtccacatggaaaggatgccagggccaaggccgagaggtgctggggagggctccccacctgccccacacaccatggcctcagcccctgtgacggaagctgactatctccccctcaccgcagtgtttagccctgctgggaagactgttcagaccaccagggaaagccctatgagacctggtcctgcctggagacggatggacgccaccagcctgtcctgggtcacagctgtccccagggctcttctctccctctgtaccttggcgggccccatcctctctccatttcctccatgatagccactttccagatttctaatgcaatacgttagtttagctttttctgcacttgctctaaacaccagcacatagtacacaatcttctgtgtgtggctcttgtcactcaaccctatgtttgcaaggttcacccattctgtttatcacggttgcaggtcaattcctattgctgtccactatcccacccgtgaatacccggcactcactttgccagttctgttgttgatgggcatttggctttgggtgtgatgactgtggcagagtggaggaagacacgaggggagcgagggggccgggggccgctgggacccggcttcaccaggaccatgttctctctgcagaacattgttcatttatctactcagtctctttgatcttttccaatctggtatgagaatgggctactgtatagtatttcaatggttactagggggagattaaactgatgtctttgttgttttaaactgttttgtttgtttgtttgttagtggtggttttctttttctttttttttttcttttctttctttttcttttttttttttgagatggagccttgctctgtcacccagggtcgagtgcagtggcgtgatctcggctcactgtaagctccacctcccaggttcaagcaattcccctgcctcagcctcccgagtagctgggactacaggcaaccaccactacgcctggctaatttttgtatttttagtagaggtggggtttcaccatgttggccaggctgctgtcgaactcccaacctcatgatctgcctgccttggcctccccaagtgttgggattacaggcatgagccaccacgcctggtctgttttaaactgttttttttttttttttttttttttttcccaagacaaagtcttgctgtgtcgcccaggctggagtgtagtggcacgatctcggcttactgcaagctccgcctccttggttcacaccattctcctgcctcagcctcccaagtagctgagactacaggcgcccgccaccacacctggctaattttttgtatttttagtagagacggggtttcactgtgttagccaggatgatctcgatctcctgatctcgtgatccacccgcctcggcctcccaaagtgctgggattacaggcatgagccaccgcgcccggccacaaagtgtttttaaggaaatttctatccactcttactccctttcatcccgtaacacgtagctctactagcctgctattgggctttcctgctaatgaacaaagttccatagcctcattctaaaaattgtgcacatctttgtatatacgaaatactataagataaagatgaagatgtcccctctcccctgcagcaactgaggggggagatcttgcttttatagaacgagttcaatgaatctgaacgtaagagtaaagtctggccgggcatggtggctcatgcctgtaaccccagcactttgggaggccgaggtgggcagatcacctgaggtcaggagttagcagagagcagagagcagcctggccaacgtggtgaaaccccgtctctactaaaaatacaaaaattagccagacgcggtggcgtgcgcctgtaatcccagctactcgggtggctgaggcatgagaattgcttgatcctggggggcggaggttgcagtgagccgagatcgtgccactgcactccagcctgggcaacagggcgaggctccgtctcaaaaaaaaaaaaagaaaagagtcaagtctgatattgacagagcatcagtcctgattttatgtgctattggatactggtaggaacgcttgtcactgttaccaagcagcacaaggggagcagtgtgagtggcaactctgcagccggctgcctgggtttcatcctgcttctgccacttactggattgtggcatttagcaagttacttagcacctctgtgcttcagtctgtcatatgaaatggagatgataatacaacttcttcattgtgggttgtgaggcttaaacgagtttgttcatattcatattatagctacatatattataaagagcacctggcccatagtgagccatttagaatattggtttgttatctatcaccagaaatctgtccctgaaaacagagtgttaaaaatcatcttgatggtcgggcacagtggctgatgcctgtaatcccgcactttgggagggcgaggcgggtggatcacctaaggtcaggagtttgagaccagccagaccaatatagtggaaccctgtctctactaaaaatatggaaattagccaggcgtggtggggtgtgcctgtagtcccagctacttgggaggctgaggcaggagagttgcttgaacccgggaggtggaggttgcagtgagctgagattgcgccactgcactccagcctgggcgacagtgagattccatctcaaaaaaaaaaaaaaaatcatcttgcaggcaaggtgcagtggctcacatatgtaatcccagcactttgggaggctgaggtaggtggatcgcttaagcctaagagttgaagaccagcctgggcaacatagtaaaaccctgtctctacaaaaaatacaaaaattatctggatgtggaggcgtgcacctgcagtcccaactacttgggaggctgagacaagaggatcacctgaacctggggaggtcaagattgcagtgagctgtgattgagccactgcactccagcctgtgtgacagggcaagactgtatctcaaaaaaaaaaaaaaaaaagaaaaagaaaaaaaatcatcttgcaaaagttgtataagacccatacacagaaaactacaaaactctactaagaactaagagaaagtttttaaaaacacctaaatcaatggtgagatataccatgttttgggattgaaagacttaatattaagaggttaaatcggccaggtgcggttgtgcatgcctgtaatctcagcactttgggaggctgaggtggacagatcacttgagatcaagagtttgagaccaacctggccaacatggtgaaacccggtctctactaaaaatacaaaaaattagccaggcgtggtagcgtgcacctgtaatcctagctactcaggaggctgaagcagtagaattgcttaaacctgaggttgcagtgagcagagatccagccactgcacttcagcctgggtgacagagcaagactccatctcaaaaaaaaaaaaaaaagtttacagatttgatgcaatcctaatcaaattctcagggtttggggtcagctcttctgcccccttgcggaagctctgtaatgtgtgcactaagtcaggatgccctcccttcccagcggtcagatttcagggctagccacagagaccgccctggcaagtctgctgggaggaagtgaggcagcagcccttttctggcatgctcacatctccttggcgtgaagcagcacctgggcctgcagctgccaggagcagtcctagatggtccctgagtgtctctgatcctgagccaagtgtgtgtctttagctccttgaggaaggtccccagtaggacacaattaaagtcagaggcaagaacgatgacatgggttctgtctctcctcgtacgctccacagctcagacctgtgggttccagctggctcttgctctcccacacctagcatccctcatccctttctgatggccccttgaaccaccccgccgcagacttcaagctccaacatcacaggcagtgaagacaacattttatgggggttgcttaaccagcccctgcaactggataaggtcagattcagattttttaaaattcgtaaacaaaatatatacatcttagtggttctgtttattggctgaaccccaactaatacacccctaaaaagcattaccgtggcagggtacagtggctcatgcctgtaattcaagcattttaagaggcaaagttggggccgggtgcagtggctcacgcctgtaatcccagcactttgggaggctgaggcaggcggatcacaaggtcaggagatcgagaccatcctggctaacacagtgaaaccccatctctactaaaaaaaaaaaaaaagaatacaaatttggccgggcgtggcggtgggcgcctgtagtcccagctacttgggaggctgaggcaggagaatggcgtgaacccgggaaggggagcttgcagtgagctgagattgtgccactgcactccagcctgggcaacagagcgagactccatctcaaaaaaaaaaaaaaagaggcaaagctgggaggattacttgagctggggagtttgaggttgcagtgagccatcactgcactccagcctgggcaacagaataagatcctgtctctaaaaaattaaaaaattaaatttaattaattaaaaatttaaaaattaaaaaaatgtttaaaaagcattattctctgctgggttcggtggctcacacctgtaatcccagcactctgggaggccaagatgggcatatcacttgaggtcaggagttggagaccagcctggccaacatggtgaatctccgtctctactaaaaatacaaagattagccgggcgtggtggcagctgcctctaatcccagctactcgggaggctgagacaggagaatcgcttgagcccaggagtgggaggttgcagtgagccgagatcgtgccattgcactccagcctgggtgacaacaatgaaactctgtctcaaaaaaaaaaaaaaagaaaaaagcattattctcctacatctctccaaaattacttaaaatattttaagggacaaatggatatcgatttccaatgagttcagggtaggctgtgctgctagacacggtggtgtccgtatttgagctcgattcccgttcttgctagggtagcacgttatcgctcctaaatcattcacgcgttaaagacaaaatcatagtgtgaattaggcacacttagaactcaatgatctttttttcttttttttgaggcggagtctcgctctgttgcccaggctgaagtgcagtggcacgatctcggctcactgcaacctccgcctcctggattcaagcaattctcctgcctcagcctccagagtagtgctctagcaaattaactgaacccaaagaatgggtcatgggaacctcaacttgaagcctgttggtcagacactccagatgtctgagctttctactggtgtctaaagcaggggcagttttggggactgggccctcaacctgtgagatctgacaccatctcaaggcaatgttggatgtgactgagaggacacctggctggtgcctgctgaagaatggattgcttgtttgttggtgggaagaaatcccccacatttggtcacagaagtcttctgtgttgactgttgttgtgttggtgcgagagcagaggaaaaacacggcttgagtttgtgtgtttttctacacactcagtttcccaagccctcttaattcccagccgttgcttgttgcctgttgctggggtctcccggccaaagctgaatgcctcttcacaagaccttgtcgtgagtctttctgtggtgtatctgtctgaccctcacccatctgaagctttctgtaggatgttaggtacataatctctctttgaccatggttttaactcccggccaccaattccagggcagatggaaaagtcgtgcttggccttctagcacacttacataaatattccataaaagtaagaatcaccaaaactgacacaaaatggagaaaaatcactcagttaggtcgatcatcaatgaggacactgaaaaggtaaccaatcctcacctaacctcaggccttgatggttttactggcaatttctaccaaattgtcaatgaacagatcattccacattacagagactattccagagaaaagaaaatgatgggaagcttcccaaatcatgaccgaggtttatcacaaccctgatgctacaactgggcaaaaatagaaaacaattttttaaaaactataattcatgagtaatttcagtcaatgagacacagcagcccaggaactgaagagtccctgactaaaaaggcattaaatctggccgggtgcggtggctcatgcctgtaatcccagcactttgggaggctgaggcaggcatatcacctgaggtcaggagttcaagaccagcctggccaacatggtgaaacactcctctctactaaagatacaaaaattggccgagcgcggtgtctcatgcctgtaatcccagcactttgggaggccgaggtcggcagatcacctgaagtcaggagttcgagaccagcctggccaacatggtgaaacctcatgtcaactaaagatacaaaaaattagctgggtgtggtggcatgtgcctgtaatcccagctactagggaggctggggcaggagaatctgttaaacctgggaggtggaggttgcagtgagccgagatcacaccattgcactccagcctgggtgacagggcgagactccatctcaaaaaacaaaaacaaaaacaaaaaacaaaaattagccaggtgtgttggcacgcacctgtaatcccagctactcaggaggttgaggcaggagaatcacttgaacccaggaggcagaggttgcagtgagctgagatcgtgccactgaactgcagcctgggtgatggagcgagactcagtctcaagaaaaaaaaaaaaaacagaaaggtatttaatctgcaggccccagagctgatggcttcccggagctgggcaggtccacactccctcagcctcaggaccaagtgtccgtgtgcgtgagtgacaaggggcctcagaagctacacgtgggagtcctgagacttccgctctgtgctgttacacacgttgtcccacctgtcctgtatcttttcttaaagccaaggaaatgcatactgggtgaagcctatcacgtctcttttgatagtcaatccaaatcacaagccactactacttgtcaaacagaatgatattgcaactatatcaatagattaaaggagaaaaaccacatgaccatctcaatcataaaaaacagaaagcatatgctattaaaatagcatcttaggaccaggcactaatcccagcattttgcctgtaatcccagcattttgggaggctaaggcaggtggattacttgaggtcaggagttaatgaccagcctggccaacatggtgaaactccatctctactaaaaatataaaaattggccaggtgtgaaggtgaacacctgtaatcccagctactcaggaggctgaggcaggagaatcgctagaatccgggaggcagaggttgcactgagccgagatcgtgccaatgcactccagcctaggcaacagagcaagactccatctctaagataaataaaataaataaaataaaataaaataaaataaaatataaaataaaataaaaaataaaataagtgaaatgaaatgaaataaaacaaaatagcgccttagaagatgcaaaggtagcttagaagctatcttaagagcttgaagcatgctgccatgccaaagaaagcattcccagttcaacaaaagtcttagcaagctttcttcatctcataaaaggtttctagataaaaggttagtctactacaagtatctactagatggtgaaatcaaagtcaagagaaaaggctggctcctgaaaccccaatccagcattgggctagaggtttctgccaacagaaaaatgggcaaatgatatgcacaggcaatttatagaagaaatgaaataagcaataaaatatgcaaaattgaacagccttattaatatacaagtaaacactagtgggaatatcaactgggaatctcactttggagagtgtggcagacactaaaggcaggctcacccaaatgaataaaaataaaatgtaatgcaaatagtaaccaaaagagagcagcagtggctacactaatatcagataagagattttttttaaccaggtgtagtggctcacgcctgtaatcccagcactttgggaggccgaggtgagccgatgacctgaggtcaggagttcaagaccagcctgaccaacatggtgaaaccccgtctctactaaaaatacaaaattagctgggcgttgtggcgcatgcctgtaattccagctacttggaaggctgaggcaggagaatcgcttgaaccgaggaggtggaggttgcagtgagccaggatctcaccattgcactccagcctggccaacagagcgagactctgtatcaaaaaaaaaaaaaatttacacacttaataacagaccatcaaaatgtatgaagcaaaaatgaacagaattgagggagaattagagttctacaataattggagacttcaatacccaatgctcaataatggacagaacaaccagatagaaaaaaaaggaaggaaatagagaactcaacacaataagccaactaggtctaacagacatatacggaacacttcacctaataacagcagacagctgctgtggaaaacagcatggcagttcctcaaaaaattaaaaatagaatggccagatgatccagcaattccactgccgggtgtacactcaaaaaaattgaaagcagagtctcaaggaggtatttgtacacccatggaagcaacccaagttttcattaacacatgaatggagaggccagatgtggtctacacatacaatggaatattactcagccttgaaaaggaaggaaattctgacccacgctacaacatggatgaaccttgaggatattttgctgagtaaaataagccaatcacataaagagaaatactgaatgattccatttatatgacgcacttagaatattcccaatggccagcccggcgcagtggctcacgcctgtaatcccagcagtttgggaggcccaggtgagcggatcacctgaggtcaggagttttttttttttgagacaagctgtgtcacccaggcaggagtgcagtggtgtgatctcagttcactgcaccctctgcctccccggctgaaggaattctcctgcctcagtctccctagttgctgggattataggggcctgccaccatgcctggtgttttgttgttgttgttgaccgagtcttgctctgttgcccaggctggagtgcagtggtgtgatctcggcttattgcaacctctgcctcctgggttccagtgattcttctgcctcagcctcctgagtagctgagactacaagcgcacaccaccacccccagctattttgtgtgtgtgtttttagtagagatggggtttcaccatgttggccaggatggtctcgatctcctgaccttgtgattcgcccacctcggcctcccaaagagctgggattacaggcgtgaactaccatgcccggccaagtagtttcttataaaactaaacgtgtacttaatatacaatccagcaattgcactattgggcatttattccagagaaatgaaaacttatgctcacatttaaaaaacaaaaacaaaaacaaaaacaaaaacctgtgttcatagcatctttgttcacgatagccaaaaaccacaaccagtctaaacgtccagtgggcgaatggttcaacctgctttggtacatccatgcaatgagtcgtgccctgcaatgaaaacgaacaacctatggaaaccagcaacaattcagatgaacctcaagggtattatgctgagtgaaaaacgtcagtgacgaatgattccgtatatacattccacatataatcatatactgatgattctatatatatcaaaagaaatcatattaaaagatcccatatatatattctagatatatatttcatataatcatatactaaagatcccatatatataaaaccttctttttaatatttatttttattattttattttgttattttgagatgatgtttcattcttgttgcccaggcttgagtgcaatggcgcgatcttggctcaccacaacctctgtctcccgggttcaagtgattctcctgcctcggcctcccgagtagctgggattacatggtggcatgcaccaccacacctggctaattttgtattcttttttagtagagacggggtttctccatgttggtcaggatggtctctaactcctgaccttaggagatccccttgcctcagcctcccaaagtgctgggattacaggcgtgagccaccacacatggcttattttttaaattttttcagatggagtctcactctgtggcccaggctggagtacagtggtgagatctccgctcactgcaacgtccacttcccaggttccagctattctcctgcttcagccttccaggtaggtgggactacaggtgcatgccaccatgcctggctaattttgtaattttttttttttttagtcatgacggggtttcaccatgttggtcaggctggtcttgatctcctgacctcaggtgatctgcccgcctcagcctcccaaagtgctggtattataggtatgagccacggcaatcagccatatatataccttttgcaaataaaattacacaggtggaaaacgtttttctttttcttttttttttgagacagggtctcactctgtcgcccaggctggtgtgcggtgatgcaatcatggctcaagtgatcctcccccatcaacctccctagtagctggaattacaggtgcacaccacatctggctaattttgtttttgtttttgtttttgtagacacggggtttcaccatgttgcccaggctgatctcgaactcctgacctcaagtcatccgtccgcctcggcctcccacagtgctgggattactggtgtgaaccaccacacccggcccgaaaaggttttcaaaataataaaatgggctgggcaagtggctcatgcctgcaattagaggcctggagacattaagtaaaccacccaaggtcacacagtaaggaaggggcagaactcagagtctcctggctgcaaagctggtgtcccttccccactgtgccttaactgccgccttacagctgggttggaggatgcctccctggtctagggtcattattacattttcttctaagaagtgtgtttctgatcaacggaactgattattttccatctatggtcttaccctttgcccccatctctttcttatggcaacagaaaatttcaccttcaagaggagcgcctcggcccggccgaagtaccgtctgggaagtgaggagcgcctcggcccggccgaagtaccgtctgggaagtgaggagcacctctggacggccacggagcaaccctccaggtgtgaagtggcagccctgtgtgtgatctttctgccctccccgagttttcattttcgatagtaaaatttacttgtaaactaaaagatttatattggggaagatgaaaggaaggaaggaaggaaacttcactttccaaaaacaaccactgggagtccgctttgtgcagcgataggtaagcttctgtgcaggaacgggcgctgctgcaccccctaccacccacgcagcctcctccctatctgccttcaggtggtagccagaggagttcagagcctctacagagagcacaacttctccagctggaactgaagggggcctgcccctccacaccggcgggtatttctcgaaaggtggagatgagagactgagaaaagaaataagacacagagacaaagtatacaggaagaaaagtgggcccaggggaccggcgctcagcatatggaggacccgcatgggcactggtctctgagttccctcagtatttattgatcactatctctaccatctcagcgagggggatgtggcaggactatagggtaatggtgaggagagggtcagcaggaaaacatgagagcaaaggactttgtgtcataaataagtttaaggaaaggtgccgtgcctggatgtgcacgtaggccagatttatgtttgactttatacaaacatctcagtgcagtaaagagcagtattgccgccagcatgtctcacctccagccataaggcggtcttctcctatgtcagtaaatagaatgtatgatcgggttatacaccaagacattccattcccagggatgagcaggagacagatgccttcctcctatctcaactgcaaagaggctttcctccttcaccaatcctcctcagcacagaccctttacgggtgtcgggctgggggacggtcaggtctttcccttcccatgaggccatatctcaggctgtctcagtggggggaaacctggacaatacccaggctttcttgggcagaggtccctgcggccttccgcagtgcactgtgtctctgggtactcgagactggagaatggcgatgacttttaccaagcttattgcctgcaaacacatttttaccaaggcacatcctgcacagccctaaatccattaaaccttgagtcaatatagcacatgtttctgcgagcacagggttggggctagggttacagattcacagcatctcaaggcagaagagtttttcttagtacagatcacaatggagtttcttatgtcttcctctttctacatagacacaataacagtctcatctctctttctttcccccacaagaacaaactccccttaaaggaatctatttaggaagattatttcaaggatacaatgtacattcattcctccaaaatatgcttagatgaacttaaataatcagaaagttgtgtgtgtatgtgtttcacattttcttggtccacacggaaccccttgagaggtccctgtgggccgtgagcctgtttgtagacacttgcttccaccgcttgatgtcgcagacatcgcagtccctgatgtagggtctggccctatggggcttagtgggtgttctccccgtgtgtggagatgagaaatcgtaaaaagtaaagacacaagacaaagagataaagcgaaaacagctgggcccgggggaccactaccatcaagacacggagatgggtagtggccccaaatggttgcgtgcactgttatttattgcatacaagacaaggggggcagggtaaggagggtgagtcgtccaagtgattgataaggtcgagcaagtcacgtgatcataggacagggggcccttcccttataggtagccgaagcagagagggaaggcagtatacgtcagcgttttcttctatgcacctatcagaaagatcaaagactttaagactttcactatttcttctaccgctatcttctgagaacttcaaagagggaccaggagtacaggaggaaagtggacaaggagcgtgaccattgaagcacagcatcacagggaggggtttaggcctccggatggctgcaggcaggcctggatactatccagcctcccacaagaagctggtggagctgagcgttccctgactcctccaagaaaagggagactccctttcgtggtccgctaagtaacgatgccttcctaggcactggcgttaccgcctgaccaaggagccctccagtagcccttatgcgggtgtgacagagggctcacctcttgcattctcggtcacttctcacaacagcccttcagcacctgaccctatacccaccggttatttcttggttatattagtaatacaataaagagtaatattaaaagctaatgattaataatatctacactaatgattgataatgtccatgatcatctctgtatctaatttgtattataactattcttattgtaagtatattctttattatactgaaacagtttgtgccttcagtctcttgcctcagcacctaggtaatcctccgcccacatctctgaggggctgaactgccccccaccttctggaagctgggaggttggaagaggggatgcgtgcgatggactcagcacacagctgggaactcgaggcacacctaagccttcgcttgtgctgtgcggagtccacacttccttccccactggggtctcaaaacctcccctcactcaacagggtggtgctgctcaaagctctgggcacacattagggctggggagggggtggtggagagggggctccagcctgcccaaccaccaggcaacggggcacctgcccctctctcagctgggtctggacccgcgtcccaggctcaggctgcaatgcctttctctttctctttctcttctttttgcagttccgttgggtcctgcccaggacagataaagacagagcagcctgtctttatcggaggttcctctgccagtaggaggggcccggagaaaaccagaaagagggccagagccagagaaacatgaagcaccccggggcctcccacaccagtgcctgagcaggaatggggaggggccatgattcacaaggccctgggaggtcactttaaagagggctgctcaactgcaaggacgctgtaagcaggaagagaagccacagcgcttcagaaaagagtgggacagggacaagcatatctaagaggctgaacatgaatccacagatcaggtacctctgcacgctttgtccgccaggcccctcctgccacttcctgccaggcggtcctgctgggcctcagccctggcctccccctgccccagccccacctctgggctccctcccccctggttcccccgctgcccccactcccagccaagctccttgccctgctgtgtggtcccacgactgctgcttctgaatgggccaccttccccacttgccccagcccagtccgcctgctgagactctcccccgaaaatcatgcccgggctggtgcttcccgccctgggagggtgcttcctctgtgtgcttcccactattcctgggagctctggaactgggagaattgaaccaaaggatgatttgagcaatcaggcattttgttctcagcgctttggtgcaatttctgtaagatttactttgtttcaatacaaagtcttaggagagggtgtgggggagggaatggtctctgtaccagaaaataagtcacttcttccaaagatgcctccactgtgagcagagtaggatgcacacgaccccagacacaggctcctcctctgtgagcaccgttcacctttcagaatgacacctgcaacatggagtgtaggaaaaaatatgatgatcaggagaaatgctcttattttaggccaggcacggtggcttatgcctgtaatcctagcactttgggaggctgaggcgggcgggtcacttgtggtcaggagtttgagaccagcctgactaacatggtgaaacctcgtctctactgaaaatacagaaaattagccaggggtgctggcgggcgtctgtaatcccagctacttgggaggctgaggcaggagaatcccttgaacccgaggggtggaggttgcagtgagctgagattgcaaactccagcctgggggacagagcgagatgccgtctttaaaaaaaaaaaaaaaaaagtagcagaaaaactgggaggttgagggtgttccattggtagccccagagctggggttccagctaggagaggtcaccccggccctgctgcccctgccagcgtcccctcctctttctctctccccgtcttcctgcctgggaaagcagcagacattctcagggctgtggagggatgggggaggcccagagcccagggacgtccaggcagctgtgttcagtgggcatcagccctgaggactccggtgcgggggtctctgcattggggtttctctcttgtgccttcagaaacccgatgaaggcaatgtatccaggcacattctacttccaatttaaaaacctatgggaagccaacgatcggaacgaaacttggctgtgcttcaccgtggaaggtataaagcgccgctcagttgtctcctggaagacgggcgtcttccgaaaccaggtagcaccaaagtcctagttacaccctaaataggagctaagcagctgggaatgcagaaaacgcaacaataagtgatgtgcccggcgtgggctctcctgtgtgcactttcctgccacatttctatttttttttttttttttttgagatggagtctcgctctgtcacccaggctggaatgcagtggtctgatttcagctcacggcaacctctgctttccaggttcacgcgattctcctgcctcagtctcccgagtagctgggattacaggcacctgccaccatgcccagccaattcttttgtatttttagtagaaacaggattttgccatgttggccaggctggtttcgaactcctgacctcaagtgatccaccagccttggcctcccaaagtgctaggattacatgcgtgagacaccatgcccctggcctcctccccacattatttatttatttatttatttattttgagacggagtcttgctctatcgcccaggctggagtgcagtggcacaatctcagctcactgcaagctccgcctcccgggttcacgccattctcctgcctcagcctcccaagtagctgggactacaggcgcccaccaccatgcccagctaattttttctttttttctttttttttttttttttagtagagacggggtttcatggtgttagccaagatggtctcgatctcctgacctcatgatccgcccgccttggcctcccaaagtgctgggattacaggcatgagccactgtgcccggcctccccacattttttaagtccatggcccagatcttcctccctgactctcctgtgatcagatcgtggagggggtttgcttcctcccaaaaggccttgtttagcgcccagcaccctcactcttgactttgtttcccaaaatcttgttatggagctgtgcgtccggcagtcctcgggaatcagcagctgtgggaagcggggggtgttgtgtccagcgctgtgtctgggccagtgactgcgggctggtggggccgcccccgccactgccctgattcctcagcagaaggcaggcagggaacaaagctgaccccagagagccaggccatagcaggggctgaggatgcctggtgaatggatgcctgggagaaaagatggcagaattcacacatgagtctatgagacagggaaagaatcaataaaataaagaaggaaggggccgggcacggcgcggtggctcatgcctgtaatcccagcactttgggaggctgaggcaggcggatcatgaggttgggagttcgagaccagcctggctaacatgatgaaacccagtctctactaaaaatacaaagattagccaggtgtgggggtgcatgcctgtagtcccagctactcaggaggctgaggcaggagaattgcttgaacctgggaggcagaggttgcagtgagccgagattgtgccactgcactccagccttggcgacagagcaagactccatctttgaaaaaaataaaaataaaagaataaagagagaaggagaaggatagaagaagggaaactcaatgaataaaacaccctggggcctactatgtagccagaaaaatgaaaagtaaagaaataaaataaggctgtgcatgtggtttatgctcatagtcccagagctttgggagggtgaggcaggaggatcgcttgagcccaagagttcaagatcagcctgggcaacatggtgaaaccccgtctctaaaaaaattatttaaaaaattaggcaggtgtggcggcatgcacctgcatcccagcttatcaggaggctgaggtgggaagattccttgagcctgggaggtcaaggctgcagtcagcccagatcccaccactgcaccccctaacctgtgcaccagagagagaccctgtctcaaaaatgagtaaataaggaaacggcccggggctccaggcccgccctctgctcccatcgccccacccctgcactcctcctgctcctggtctgagctcccctgtcctcctcctcctccttcgccaggtggattctgagacccattgtcatgcagaaaggtgcttcctctcttggttctgcgacgacatactgtctcctaacacaaagtaccaggtcacctggtacacatcttggagcccttgcccagactgtgcaggggaggtggccgagttcctggccaggcacagcaacgtgaatctcaccatcttcaccgcccgcctctactacttccagtatccatgttaccaggaggggctccgcagcctgagtcaggaaggggtcgctgtggagatcatggactatgaaggtgagacgtggggggctgaggagagtgggtgcaggagggacagcatgaggggcagatggttctccaatgctgtggggcgggtcagtgtcccctgggtgtctgtggggaccgggccagcgcccactgcaactggcagcctggatacctgggctgggaggggagggcccagggccaggagagaggcctgctgggccctcactgttttctccttgttttttctcagattttaaatattgttgggaaaactttgtgtacaatgataatgagccattcaagccttggaagggattaaaaaccaactttcgacttctgaaaagaaggctacgggagagtctccagtgaggggtctccctgggcctcatggtctgtctcctctagcctcctgctcatgctgcacgggcctcccctccaccctggacccgctctgtttctgcctggtcatcctgagcccctcctggcctcagggccattccacagtgctcccctgcctcaccgcttcctcctcgctcttccagactcttcctgcagaggctcctttctgcctccatggctatccatccacccccacagaccccgttcctccagcctgcgtgcccctaacctggcttttcccatctccccagcataaccaaatcttactaaactcatcctaggctgggcatggtgactcacgcctgtaatcccccagcaatttgggaggcaaaggtgggagaatcgcgtgagcccaggagttccagaccaggctgggtcacatgacaaagccccatctctacaaaaaaaaaaaaaaaaaaaaaaaaaaagccagatgtggtggcatgcatctgtagtccaagctacttgggaggctgaagtgggaggattacttgagcccgagaggtggaggctggagtgaacagagatcgcgccactgaactcgggtctgggcaacagatagagaccctgcctgaaaataaatcgataaataaactcaacctaaacaggtgtgaatatatgtaagttgaaaacccgaagttttgagaaacatcctttgtaaatttcatcctatgaattgggtcattcatgtcctacccagctaaaacagaggccaggagccagggaggaaaagcagtcaggccacacaacattgtttccgaaatggacttctctgcaagcctgactcctgagactgtgcattgtaccctgaaaccagctttatccatagcttctgcgataaatggctgtaagtcttggactccttgctccaaacgcagcgactcagcaatagaacctcccagctcccagcccttcctagtgcccatgggctttacatagggcaagagaacatttctccttctataattgccatctctttgctctctcaacatggtgaacaccatccggactccgtgtatgtctcaaattacaattctttctttgcaaatgaaatatgaaatttagaggctcttctaaacactttaaatttgatttgacattttcaaagcagatgtaagttttagagaatgagattctccataaaaatgaccctttcatgctgtggcctccatagaagatgtcccaggccaggtgcccacatggcaggcatttattttctcacagatctggaagctgcaggtccaacttcgaggggtgggtggggttgtttcctctgaggccgctccttctggctggcagggagtctcttccagccgtgtcctctgtggcctttcctctatgcacacgcacctctgggatctctctgcctccaaatatcatcttttttttttttttttttttttttgagacagagtgttgctcctcttgtccaggctggaatgcaatggcacaatctggactcactgcaacctccgcctcccgagtttaagcgattcttctgcttcagcctcccgagtaaaaggcatgcatcaccacacctggttaattttgtagttttagtagagatggggtctcaccatgttggccagactggtctcgaactcctgacctcaggtgatccgcctgtctcagcctctccaagtgctgggattacaggcatcagccactatgcccggctgggatcatatgttccacacatgtttgttcaataagcatggactgcaaccacctacatgaatattcatagctcctcctgtagcctgttgaatatgtatgtttagccaacctcttcagcataaagctcctgcccaaacccctcctgctcctaaatgtctgtctctggtgttaaccagaggctgctcttcccaggctgctggatggctaccttgcaggctgtcacccttaacaagaaataaagtgtcctttgcaaatgcatcccttgtgtaatttgtaggtcaccgcgccatgggaacacgctaccatgggaagggagctgtgagacgcgcagggaggctccagacaggctggcctgggacaccagccgctgcccttccataacatggggacaagagagggcaaaagttcagcccaacacggaggatcttcgggcaggagatggggaagaaggagaagcaggaaggaaagagctcagtgtgggggcgcgcatggcatcccggtgggacatctgaggcccacacccacctgctgtccctccctcccacggtggccaccgagggtgaaggcctggggggaggcagacgcctggccctttactctccctccctgtccccatggccgctgggtgggggccgtctctgggatgatccccgagggcaggatccgggagtccctgcagaggcatcagcctgtctgtcttgatggtggagtggcggctccagctgggcgggaccaccaggggaggggcttgtgctctgctggctcagcctggtgtggacccacctcccgggcgctggctgcaatgactttctctttccctttgcaattgccttgggtcctgccgcacagagcggcctgtctttatcagaggtccctctgccagggggagggccccagagaaaaccagaaagagggtgagagactgaggaagataaagcgtcccagggcctcctacaccagcgcctgagcaggaagggggaggggccatgactacgaggccctgggaggtcactttttttttttttttttttgagaggaagcctcgctctctcacccaggctggagtgcagtggcaggaacttggctcactgcaacctccgcttcccaggttcaagtgattctcctgcctcagcctccagagtagctgggattacaggcgcacgtcaccacacctggctaatttttgtatttttagtagagacggggtttctccatgttggtcaggctggtctcgaactcctgacctcgtgatccgcccgcctcggcctcccaaagtgctgggattacaggcgtgagccaccgtgcccggccgggaggtcactttaaggagggctgtccaactgcaaggagccgcaagcaggaagtgaaaccacagcacttcaaaaaaagagggagactgggacaagcgtatctaagaggctgaacatgaatccacagatcaggtaccgctgcccactatgtccgcagggcccctccggccccttccttctggtggtcctgctgggcctcagccctggcctccccctgccccagccccagccctggacttccttccctctggcttccctgccgcccccactcccagccagactccttgccctgctgtgtggtcgccccactgctgcttctgaatgggccaccttccccacctgccacagtccaggccccctcctgagactcttccctgaaagtcatggccaggccggtgctccctgccctgagagggtgctccctctgtgtgcttcccaccattcctgagctcaggaactgggagaattgaaccaaaggatgactggggcaatcaggcattttgttctcagtgctttgatgaactttctgtaagatttactttgtttaaatacaaagtcttaggagagggtgtggggagggaatggtctctgaagcacaagataaatcacatcgtccaaggatgactccacagtcagcagatgtccccagacaggttccactccaaggtcactcttcatcttttagaacatgaccagtaacatggaatgtgagaaagaacgcgatgatcaggagaaatgctcttattttaaatttagtgaaaagagagcccagtccccaacagctttctcctgcagggcccgtgatgcagaggctgcacagggctggcctggaaaggggcccctgctccaactgtccccagctctgtggcctgggcaggttaccccacctctctgtgcctctgacccctcctctgtaagatgggaatggtccctgcaggcctagggcagcctcacatgagcccacccccacgcagcacttagaagagaggcctgggcctcagaattcggttctaccatgattttaaaataatgttaacacgcagagtgaaacatcaggaaggaattgagctgaaaggttaaaagctatcttttaagggtgaagagttttattctcttttgcattttcctaatgggttggggagtgggtgggcagaaatactgagagggtggggaatatacccctggaaaggccagagttgggcccgagctgggagagatcaccccagcccccctgccagcatcccctcctcttcctctcccctcagtcttcctgcctgggaaggcagcagaaattctcagggctgtggaggggtgggggaggcccagggccgtcccgggagctgtgttcagtggacatgagccccgaggactccaggagggctccctgcatgggccggtttctctcttgtgccttcagaaatccgatggagcggatgtatcgagacacattctacgacaactttgaaaacgaacccatcctctatggtcggagctacacttggctgtgctatgaagtgaaaataaagaggggccgctcaaatctcctttgggacacaggggtctttcgaggcccggtactacccaaacgtcagtcgaatcacaggcaggaggtaagcagctgggaatgcagaaaacacataagtaaaatgtctggcggcgggctctcaactgtgtattttttccccacatttatttattttttctatttatttatttatttatttattttgagacagagtctccatctgtcgcccaggctggagtgcagtggtgcgatctcagatcactgcaacctccacctcttgggttcaagcgattctcctgcctcagcatcctgagtagctgggactacaggcgcgtgctaccacgcccggctaatttttgtattttcagtagagatggggtttcactgtgttgagcaggctggtctggaactcctgatctcaggtgattcacctgccttggcctctgaaagttctgggattacaggcataagccaccgtgcctggccacttcctatatttcttttttcttttctttctttctttttttttttttttgagacagagttttactcttgttgcccaggctagagtgcaatggctcaatcttggctcattcaacttccgcctcctgggttcaagcgattatcctgcctcagccacctgaatagcagggattacaggtgcacgccaccgtgcccagctaatttttttgtatttttaatagagaagggatttcaccatgttgtccaggctggtcttgacctcctgacctcaggtgatccacccaactcggcctctgaaagtgctgggaatacaggtgtgagccactgcgcctggcctccacttcccacatttcttaagtccgtggcccagaccttcctgcttgaccgccccggccaccgcccggattcctccttggcaaagatgcctcatcacagtttggtgaaccctcactcctcaccctgccacccccactggggacactaagttccccgccttgtcccacccatccctacggccccctccacccagggaggagacttttcagagtgtgtttggggagggagtcgtctgtatgctgggcagtcctggcctacagcggtgctggccacggaaacacccaggactcaggaatgaagcacaagtgtttccagtccccacacgctaaaaaggcgacaagaaccggtgaaagtaattttaatattctatttaatccagtgtagctaacatattacttcaacgctgattaacataaaattcttcgcgagatagtgaagtttctttttcttctcacactgaaatgagtggtgtatttttgatgtgccgaggtctctcatcagagccctgtttcagatgctcagtagcgcccttggccagtgccccccaatatgggacagcgcaggtccagtggcctccccagtggggaacaaggcggaccccagagggccaggacacagtaggggctgaggatgcctggtgaatggatgcctgggagaatggatgccagaattcacacacgaggccatgaacagggctgggaaaacttccaaacacagggaagcacgtgtcttggtgcaccttgtgatgcttcaacagcaggactgagacggggacatttacagtgaacagaaatgtgttggctcgagttctggactccaggaagtccaacgtcaaggcaccagcaactttccagggcctgcgagctgcacagtcacatgggggtgaaggttgttgccagaagctcaggggatgctccagacagagtggcctgggatgtcgagtcactggtgctccgtgacatggggacaagaggaagcagtttagtctgacatactgcccccccagctagagggcaagagacagaaagaggggctgaggtcacctttgaataaccacagcagtggcacccacaaaggtgcagtccccacagcctcatagcctcttctaggtgccacctcttaaggccagtaccatagcaattaacactgaaggtcagcttggagcagacaatcactcaaaccaaacaggggggatggaggaaaggagcttcaatggcaagatcccctgggctcctgtcctggcccctcctccccctgccccaccccgcacccctcctgttcccccgtcccagagcttcccctgcccctgctcctctcccaggtgtatttccggtttgagaaccacgcagaaatgtgcttcttatcttggttctgtggcaaccgactgcctgctaacaggcgcttccagatcacctggtttgtatcatggaacccctgcctgccctgtgtggtgaaggtgaccaaattcttggctgagcaccccaatgtcaccctgaccatctctgccgcccgcctctactactaccgggatagagattggcggtgggtgctcctcaggctgcataaggcaggggcccgtgtgaagatcatggactatgaaggtgagaggtgcaggggtcaggggagcatgacggggaggaacagcctcagagatggatggatctgcaatgccatggctgggggtgttccagggcagcctgcaggggtggggctggcactgattgcaactgacagccaggagaccaggcctgggagggcaggcccagggtcaggggagagcctgagtgcttcccacctcttcatctcagactttgcatactgctgggaaaactttgtgtgcaatgaaggtcagccattcatgccttggtacaaattcgatgacaattatgcatccctgcaccgcacgctaaaggagattctcaggtgagggtctccctctggcctcatcgtctctctcctctcgcctcctgctcatcctcctgaggactcccctggctgggccctcctgccctccgtcctgcccccctgcctgccctcatggttacaccccctcacccacactcctcatgctccctccaccttggtgcctcccccctgctttcctgggctcttcctgtgagtgagaggccccttctgcctccagagcgacctccatccacccccgaggctgccctccccacagcctgggagccccaacctggctccttctatctccctggcataaccgaatttgtcataaaactggacgtagtaagtgggcatgaatagtcacaagcccgacagtcggaagctttgagcaacatccttcaaggccgacctgagcccctgagaaggagccgccaccatggaaacagagcttcaggcttccgcggccatagaagatgcccccgggccgggtgcccacagggcaggcatttattttctcacagatctggaggctgcaagtccaaggtggaggggtgggtggggttgtgtcctctgtggccgctcctcctggctggcagggggtcccttccagccctgtcctctctggcctttcctctgtgcacctgcactcctggggtctctctgcctctaaatgtcctccttgtttatggaccccagtcagacaggattagggcccaccctaagggccatgagttaatttaatcaccactttagtgtacttgtctccaaatacagttatcctgtgaggaggtggggttgagggcttcgacatgtcaatgtagggaagatacaatttagcccatgacaatgacccagggggcttgggtcaagcttgggtggggtgtgcaggggtccccgttctgtgtgtctgtctcccaggcgagtcctgccctgactcccacagcccctccctccagaccatggcttccccacctaacagcacctagctgggcctccggctcacgcctgtcccttctcaaatccctcccacagggatggagatgcagaaagagtcaagcaaacactcagtgatcaaggtcccatttgagtaaggtttttttgtttttttttttttgagacagcgtctccctctgttgcccaggctggagtgctgtggtgcgatctcggctcactgcaacctctgcctcccggttctagcaattcccttgtctcagcctcccaagtacctgggattacaggctcatgccaccatgccggctaatttttgtatttttagtagagacggggttttgcaatgttggccaggtgttgagtaagattttacaaaagagtaggcttggatcatgggaggcttgagatgctaggagctctccaggaagcacaacagaaaagggcaaccagggaccagagaggccctagaaagagatctaaggccctcgggagagatgggaactgagcacctgggtcttagaccggaggagcaaactgcaagacagggtggccggggacaccagcctccgcccttctgtgacatagggacaagagctcagcctgccagggaacaactctgggcaggagatgtggaaggaaggagctcagtgtgggggcacgcatggcatcctggggggacatctgagggcacccccacccactattcctccctccaatggtggcctctgagtgtgaaggcaagggggaagcagacacctgcccctcactctccctccctaccacatagctaccgggtggggggcgtccctgggatgattcctgagggcaggatccaggggtccctccggaggtcctcccatccaggtgagaaagcagcataaagtgaggcctgcactcagatgggcctgggaggtcactcacagcgcaggtgtctcctggaacaagggccctggacgatagaaatagaacccaagcccaggactaaaatcagggccaggacaagcctgccagggaggctacacatgaagcctcagatcagggaccactgcccgttctgcccatggggcctctgctgccccttcctgcctggtggccctgctgggcctcagccctggcctccccctgccccagccctgggctccctcccctctggttcctctgctgctcccactaccagccaggctctttgccctgctatgtggtcgccccactgctgcttctgaatgggccatctcccccacctgccccagcccatgccccctgctgagattctcccctgagagtcatgcccgggctggtgctccccgccttgggagggtgctccctctgtgtgcttcccgccattcctgagctcaggaactgggagaattgaaccaaaggatgattggagcaatcaggcattttattctcagcactttggtggaatttctgtaagatttactttgtttcaatacaaagtcttaagagagggtgtgggggaggaaatggtctctgtaccagaaaataagtcatttcttccaaagacgcctccgctgtgagcagagtaggatgcacacgaccccagacacaggctcctcctccgtgagcaccattcaccttttagaatgacacctgcaacatggagtgtaggaaaaaatatgatcaggagaaatgctcttattttaaagtttagtaagaagacagcgtggttgcctacagctccccaccgcagggcctgcgatgcagaggctggacagggctggcctcgaaaggggccccagctccatccaccgccccagctctgtggtgtgggcagattatctggcctccctatgcctctggcacctcctctgtaaaatagggatggcccctgcaggcctcaggcacatgccatgagctcagacatatgcagcacttaggagagtagcctggaccggccgggctcagtggctcatgcctgtcattccagcactttgggtggttgaagcaggcagatcacgaagtcagttcaaaagcagcctggccaacatggtgaaacatgatctctactaaaaatacaaaaattagggccaggcgcggtggctcacaccggtaatcccagcactttggtaggccgaggtgggtggatcacaaggtcaggagttcaagaccaccctggctaacgtggtgaaaccccgtctctactaaaaatacaaaaaattagacgggcgtggtggcatgcacctgtagtcccagctacttgggaggctgaggcaggagatttgcttgaaaccaggaggcggaagttatagtgagccgagattgcaccactgcactccagcctggtgacagagtgagaccgtgtgcaaaaataaataaattcgctgtgatcccgatataaaaataatcatcatcatcatcggacaggtgaaatgtgaggaaggaattgagctgaaatgttcaagcaattatttcagggtgaagagttttattctctgttgcattttcctaatgggttgggagatgtgtggcagaaaaactgggaggttgagggtgtcccattggtaggcccagagctggggttccagctaggagaggtcaccctgtccctgctgcccctgccagtaccccctcctctttctctctcccagtcttcctgcctgggaaagcagcagacattcccagggctgtggagggatgggagaggcccagactccagggacgtccagggagttgtgttcagtgggcatcagctccgaggaatctctgcactggggtttctctcttgtgccctcagaaacccgatggaggcaatgtacccacacatattctacttccactttaaaaacctactgaaagcctgtggtcggaacgaaagctggctgtgcttcaccatggaagttacaaagcaccactcagctgtcttccggaagaggggcgtcttccgaaaccaggtagcaccaaagtcctatttacaccctaaataggagctaagcagctgggaacgcagaaaacacaatacgtgacgtgccccgcgtgggctctgctatgtgtactttcctcttacatttctttcttttttttttttttaagacagagtctccctcatgcaacctctgcctcccgggttcaagcgattctcctgcctcagcctcatgggtagctgggattacaggtgcccgccaccacactcagctaatttttattttatttatttatttttttagtagagacggggtttcaccgtggtggccaggctggtttcaaactcctgacctcaagcgatccgccccgcttggcctcccaacgttctaggattacaggcatgagccaccacgcccaacttcctcccacattttttaagtcggtggcccagatcttcctccctaactttcctgggatcagattgtcgaggggttttgcctcttaccaaaaggccttgtttagcgcccagcgccctcactcttgactttgtttcccaaaatcttgtcatggagctgtgcgtccggcagtcctcgggaaacagcagctgtgggaagcggtgggtctggtgtccagcactgtgcctgggccagtcactgtgggctggtggggccgcccccgccactgccctgattcctcgatgtcaaggacacatcctcacagggtggtgaaccctcgctcctcaccctgccgcccccacagcagccactgacctcccacccaccctgccgtgtcccacccaaccctgcggccccctcctcccaggcaggagattttttcagagtgtgtttggggagggagccgtctgtgtgctgggcaggcctggcctacagcagtgctggcctcggaaacacccaggactcaggatggaagcgcaagtgtttccagtccccacacgctaaaaaggcgataagaactcgtggaagaaattttagtgtctgcattagctcaattatctcacataggatttcaacatatacttaatataaaatgcctcatgagagagttaaagtttgtctattctcacaatgagattttgaaatgcgctgtgtattttacacgtgccaacgtttctaatcagagccccatttcaagtgctcagtagcccctttggccaaccttcaactccatgggacaatgtgggtccaatgaccttcccagcagaaggcagacaggggacaaggcagaccccataggaccaggccacagcaggggctgaggatgcctggttaatggatgcctgggggaaaggatgccagaattcgcacttgagggcatgatgagacaggaaaagactcaataaaataaagaaggaaggggccaagcgcggtggctcacgcctgtacgcagtagctcacgcctgcaatcccaacacatcgtgaggcctaggcgggcggatcataaggtcaggagttcaagaacagcctagctaacatggtgaaaccctgtctctactaaaactacaaaaattagccaggcgtaggagtgcgcgactgtaatcctagctactccggaggctgaggcaagagaatcgcttgaacccaaggggcagaagttgtggtgagctgagatcgtgccgttgcactcccgcctgtgcaacagagcaagactccatctcagaaaaaaataataaaaaaataaagaggaaggagaaggatggaataagggaaactcaatgaataaaacgccctggggcctactatgcacccagaaaaatgaaaagtaaagaaataaaataaggtcgtgcatgtggtttatgctcatagtcctagaaatttggtaggctgaggcaggaggatggcttgagcccaagatttcgagatcagcctgggcaatgtggcacgactccgtctccacaaaaattacaaaaaaattagccgggcgtggcagcacacacctgcagtcccagctaatcaggaggctgaggtgggaagattccttgagcctgggaggtcaaggctgcagtcagcccagatcgcaccactgcaccccagcttgggcaacaggagagaccctgtctcaaaaataaataaataagaaaatgccctggggcttcaggcctgccctcttctcccatcgccccacccctacactcctcctgctcctggtctgagctccccctgccctcctcctcctccttccccaggtggatcctgagacccattgtcatgcagaaaggtgcttcctctcttggttctgtgacgacatactgtctcctaacacaaactacgaggtcacctggtacacatcttggagcccttgcccagagtgtgcaggggaggtggccgagttcctggccaggcacagcaacgtgaatctcaccatcttcaccgcccgcctctgctacttctgggatacagattaccaggaggggctctgcagcctgagtcaggaaggggcctccgtgaagatcatgggctacaaaggtgagacgtggggggctgaggagagtgggtgcgggagggacagcatgaggggcaggtgggtctgcaatgccgtggggcggggcagtgtccccgggaagcctgcagggatggggccggcgccagctgcaactggcagccaggagacctggcttgggaggggagggcccagggccgggagagaggcttgctgggccctcactgctttctccttgtttttttctcagattttgtatcttgttggaaaaactttgtgtacagtgatgatgagccattcaagccttggaagggactacaaaccaactttcgacttctgaaaagaaggctacgggagattctccagtgaggggtctccctgggcctcatggtctgtctcttctagcctcctgctcatgctgcacgggcctcccctccatcctgcaccagctgtgcttttgcctggtcatcctgagcccctcctggcctcagggccattccatagtgcccccctgcctcaccacctcctccccgctctcccaggctcttcttgtagaggctctccatccacctccccagtcctgttcccccagcctgggtgcccctaacttgactcttcccatctccccagcataaccaaatcttttttttttttttttttttttgagacggagtttcactctgtcgcccagactagagtgcaatggctggatctcagctcactgcaaactctgcttactgggttcaagtgattctcctgtctcagcttctgagtagctgggattacagatgcctgccaccacgcccagctaatttttttttttttttttttttttttttgtatttttagtagtgactgggtttcaccatgttggccaggctggtcttgaactcctgacctcaggtgatctgcccatctctgtctcccaaagtgctgggattacgggcgtgagccacccggctcggccgcacaaccaaatcttattaaactcaatctagtctggccctggtgactcacgcctttcggaggcagaggtgggagaatcgcttgagcccagaagtttgagaccagcctgggccacacgacaaagccccatttctacaaaaaaaaataccaaaaaaaagccagatgtggtggcatgcacctgtagtttaagctacttgggaggatgaagtgggaggactgcttgagccggggaggtggaggctggagtaaactgagatcgcgccacagaactccagtttgagcaacagatcaagaccctgcctgaaaataaatcaataaatacactcaacctaaatggatatgaatatatgtaagttgaaaaccagttttgagaaacatcctttgtaagtttcatcctacgaattgggtcattcatgtcctacgcagctaaaacagaggccagcagccagggaggaaaagcagtcaggccacacaccattgctcccaaaatggacttatctgcaagcctgactcctgaaactgtgcattgtaccctgaaaccagctttatccatagcttctgccataaatggctgtaagtcttggactccttgctccaaacgcagtgactcagcaatggaacctcccagctcccaacacttcctagtgcccatggtgggctttcccacagggcaagagaacatttctcctttttttttttgaagtggagtctcgccctgtcacccaggctggagtgcaatggcgcagtctccgctcactgcaacctccacctctgttgttcaagtgattctcctgtctcagcctcccgagtagctgggattacaggcgtgcaccaccacaccgggctaatttttgtattttcagtaaaaacgggtttcatcatgttgcccatgccaggcttatttttatttttttcagatgaagtcttgctctgtcacccaggctggagtgcagtggtgcaacctgggctcactgcaacctctgccacccgggttcaaactattctcctgcctcagcctcccgagtagctgggattacatgggtgtgccaccacgcctggctaatttttgtatttttagtagagatggggtttcagcatcttggctaggctggtcttgaactcctgacctggtgatccacccgtctcgggcacccaaagtgctgggattacaggtgcgagccacctggccaggcttaggctggtcttaaactcctgacctcaagtgatccgacctccttggcctcccaaattgctgggattgctggtgtgagccacagcgcctagcccatttctcctttttataaaacctgttgctgtctctgttctcccaacatggtgaacaccacccagactgcgtgtatgtcccaaattctttctttgcaaatgaaatgtgaaattagaggctcttctccacactttaaatttgacttgtcattttctaggcagatgtaagttattagagaatgagattctctataaaaatgaccccttcatgctgtggcctccacagaacatgccccaggccaggtgcccacacagcaggcatttatttcctcacacatctggaggctccaagtccaagttcgaggggtgggttgggttgtttgctctgaggctgctcctcctggctggcagggaatcccttctggctgtgtcctctgtggcctttcctctgtgcacctacctgcacctctggggtatctctgcctccaaatatcatcttttttttttttttttttttttgagacagagttttactctcgttgcccaggctggagtgcaatggcataatcttggctcactgcaacctccaccttcagggttcaagcgattctcctgtctcagcctcctgagtagctgggactacaggcatgcgccaccacgcccggctaattttgtagttttagtagaggcgaggtttctccatgttgctcaggctggtcttgaactcgtgagctcaggtgatccaccctcctccacctcccaaagtgctgggattacaggtatgagccaccgtacccggcctttttgttttgttttgtttttgtttttgtttttgtcttgagacggtgttttactctgttgcccaggctggagtgcaatggcatgatcactgctcactgcaacctccgcctcccaggttcaagcaattctctggcctcatccttctgagtagcggcgattacaggcgcccagaaccactctctgctaatttctgtattttttagtagagatggggtttcaccatgttggccaggctggtctcgaactcctgactgcccacctcggcctcccaaagtgctgggattaaaggcatgagccagggcacttggccacccttctccttgatggacccccgccaagtgaatttgtgcccacactagaggtctcgtttaaattaatcatcttggccgggcgtggtggctcacgcctgtaatcctcccactttgggaggctgaggctggcagatcacttgaggtcaggagttggaaatatgcctggtcaacatggtgaaaccccgtctctactaaaaatacaaaaaaattagcagggcgtggtagtggatgccagtaataccagctactcgggaggctgaggcaggagaatcgctggaacccgggaggcagaggttgcagtgagctgagatcgtgccattgcactccagcctggaagacacagtgacgctgcatctcaaaaaaaaaaaaattaattaattagttaatcatctgttggctgggtgcggtggctcacgcctgtaatcccagcactttgggaggctgaggtggcggagttggaggtcagcctggccaacatggtgaaaacccacctctactgaaagtgcaaaaagtagctgggcatggtagtgggcacctgtaatcccagctactcgggaggctgaggcttgaatcacttgaaccagggaggcagagtttgcagtgagccgacacggtgccactgcactgcagcttgggcgacagagtgagactccatctccaaaaaaattaattaattaattaactaatcatctgttgaaaaggacctgtctccaaatacaaccacacattgaggtagaggggttagggcttcagtatattgatttttgggagaaacagggcaacatggcaacaagccacagtcactgtgggcgggcctgagtggggagtgcaggggttcctgtcctgtgtgtctgtctcacaggggagtcctgacctgaccctcacagcccctccacccagaccttcctgcatgttccacccagcccaccctcctgcacccaagagcacccagccctcccttctgctcatgcccctcccttctcaaatccctcccagcagtgcagctctgggctaggacacagcctagggaacgtgactgagaaagagccaagaaaacttgatcagtgatcaagttggtgtttaagtaagattttcaataaaaagtagaattgggtactacatggaggcttgagatgctcagagcttttcgagaaagcagaacagaaagtagaagggcaaccaggaaccagaggtgccagagaactggaagcgcgggccctccgaggagacagggagtgggcacctgggtcttgggcctgtcgacaaaaagagtcaaactctgtaaaatatttgaagagacgtattctgagccaaatacgagtgaccatggcccgtaacacagggctcaggaggtcctgagaatgtgtgtgtgctcaaggtggtgtgggtgcggcatgactccccagaccccttagataggaatttggttttatatattttagagaagcatcagctatcaatcaaacacatttaagaaatacagaagctgagcgtggtggctcacgcctgtaatcccagcattctgggagactgaggcagatggatcatgaggtcgggaattctagaccagcctggccaacatggtgaaaccccgtctctactaaaaatacaaaaaattagccaggtgtggtgctgggcacctgtaatcacagctactcgggagactgaggcaggagaatcacttgaacccaggaggcagaggttgcagtgagccaagatcacgccactgcactccagtctgggcgacacagcaagactccgtctcaaaaaaaagaaaagaaatacttcggattgctccagaaaggtcggacggctcaaagtgagggcaggagtgctggggggcttccaggctacaggtaaatttaaacattttctggttgacaattggttgagtttgtctagagacctggcatccatagaaaggaaacgttcaggttaagataaaagattgtggagatcaaggttcttttgaagtctcatagtggctgcccttagagacaatagatgacaaatgtttcccattcaggcctttaaaaggtgcaattagttcatctgtttaggaccgggagggcctagaagaaaaagatccagctatgttaatagagattctttacagatacaaattttgccccacaaaggacaactttgcagggccatttcaagatatggcaaagaaacatgttttggggtaaaatattttgtctttttactttgtcacataatgttgtgcctgagtcagattggaaagtaactcacaatatatagggttaaataaaacccatgtgggccgggcgcagtggctcatgtctgtaatcccagcactttgagaggcctaggtgggtggatcacctgaggtcagcagttcaagaccagcctggccaacatggtgaaaccctgtctctactaaaaatacaaaaattatccaggtgtggtggcgggcacctataatcccagctacttgggaggctgagacaggagaatcgcttgaacccgggaggcgaaggttgcagtgagccgagaccacaccattgcactccagcctgggcaagaagagtgaaactcggcctccattaaaatacaataggaaaaaaaaaaaaaaaaatagaacccctctgatgaggatgtacgggttgtaaggcatgactccccagaccccttagataggattttgggcaagattaaataaaaacaaatcagagcttagtccaaaggcctatgaactaaaaataaagtctttagcccccaccgatcccccccaactttggcccccagtggccaggggtatctcagaaaaaccttaaaactgagttcccagccatgatgggaggggaggtcaggcacgcctcattatcaccccgcccttttgcagtttagacacaactgaccagcagtaatgttaaaacagaatcataagatgggcagaaccagaacagactcttcatggcaatcagataccaaatcacaaccaggacctcaggccgtgccaggcaagggtgagatcacacaccccacacttaaacagtcaactctgttctgcctgccccaaggttttttttttttttttttttttgctctagcagctaaacaagcactgcctccagataaagatgaaaacaatcacagctcacccagcgcccggacgcggagcaacagagcccctgctccacagccctaattccaggtttccctggacaagagactgatttcagtaactttctccagatcggaagaccacggaccacggactagttctgaatggtttacagacctggcaaattttggtgccttcatgtcctgaaaggaccttttgacatacaggcttaattgtggtacatttaaatgttgtctccaccgcaatgtgaggacggattatacggttgctttttttttttttagatttttgtttgtttgttttttgttttgagatggagtctcactctgtctcccaggctggagggcagtggcgcgatctcggcccactgcaacctctgccttctgggttcaactgattctcctgcctcagcctcccgagtagctgggatttcaggcacgtgccaccacacccggctaatttttgtagttttagtagagaccaggtctcaccatgttggccaggttggtctcgaactcctcactgtcatgcgtgtctgtatagaaaaccacctaaacaggctttgtgtaagcaataacgccatttattcacttgggtgcaagtgggctgagtctgaaaagagagtcagcgaagggagataagagaggggcagctttataggacttgggtaggtggtggaaagttacagtcgaaggtggtcatctgttgtcagcaggggagggggtcaccaggtgcatggtgggagaccatgagacccattgtccagaagaagaatgtcataaggtcgattgatcagttagggtagggcaggaacaagtcctaatggtggaatgtcttaaggttggttaatcagttaagggagaaactggctgtttcacttcttttgtgtttttttggctgctccagacttcttggctgctgcaggccatctggatgtatatgtgcagttcacaggggtcacaatggcttagctccggctcagaggcctgacactgacctcagatgatccacctgcctcggcctcccaaaatgctgggattacaggcgtgagccactgtgcctgcctgggatcatatgttacacgcatgtttgttcaataagcatggagtgcagccacccacatgaatattcatagctcctcctatagcctgttgaatatgtatgtttagccaaccccttcagcataaagctcctgccccaacccctcctgcttctaaatgtctgtctctggtgtttcccagaggctgctcttcccaggctgcgggatggctaccttgctgcctgtcacccttaacaagaaataaaatctcctttccaaatttatacattgtggccaggcgcggtggctcacacctgtaatcccggcactttggtacgccaaggcgggcggatctcctcagatcgggagttcgagatcagctgaccaacatggagaaaccctgtctctactaaaaatacaaaaattagccaggcatagtggtgggcggctgtaagcctgaccaacatggagaaacactgtctctactaagaatacaaaaattagcctaggcgtaggggtgggtgcctgtaatcgcagttacatgggaggctgaggcaggagaatcttttgaacctgggaggcaaaggttgcggtgagctgagattacgccactgtactccagcctgggtaacagagcaagtctccgtctcaaaacaaacaaacaaacaaaaaaacacaaaaaaacaaaagcaaacaaaaaaaccaaatgcatcccttgtgtaatttttaggtcaccgcgccatgggaacacgctaccaggggaagggagctgtgagacgcgcagggaggctccagacaggctggcctgggacaccagccactgctcttccatgacatggggacaagaggaggcgagagctcagcccaccagggaggaactccgggcaggagatggggaagaaggagaagcaggaaggaaagagctcagtgtgggggcgcgcatggcatcccggtgggacatctgaggcccacacccacctgctgtccctccctcccacggtggcctccgagggtgaaggcctggggagaggcagacacctggccctttactctccctccctgtccccatggccgctgggtgggggccgtctctgggatgatccccgagggcaggatccgggagtccctgcggaggcatcagcctgtctgtcttgatggtggagaggaggctccagctgggcgggaccaccaggggaggggcttgtgctctgctggctcagcctggtgtggacccacctcgcgggcgctggctgcaatgactttctctttccctttgcaattgccttgggtcctgccgcacagagcggcctgtctttatcagaggtccctctgccagggggagggccccagagaaaaccagaaagagggtgagagactgaggaagataaagcgtcccagggcctcctacaccagcgcctgagcaggaagggggaggggccatgactacgaggccctgggaggtcactttagggagggctgtcctgaaacctggagcctggagcagaaagtgaaaccctggtgctccagacaaagatcttagtcgggactagccggccaaggatgaagcctcacttcaggtaccgctgcccgctctacccgctgggcccctctgctgccccttcctgcctggtggctctgctgggcgtcagccctggcctccccctgccccagccccagccctgggctccctcccctctggctcccctgcccccgccactcccagccaggctctttttcctgctctgtggttgccccactgctgcttctgaataggccgcttccccacctgccccagcccaggtgccctgctgagactctcccccgccaccgaaagtcatggcagggctggtgctcccggccctgggagggtgctccctctgtgttctttccgccattcctgaactctggaactgggagaattgaaccaaaggatgattagagcaatgtggaattttgttcacagtgctttgatggattttctgtaacatttactttgcttaaatagcaagtcttaggagagggtgtggggagggaatggtctctgaagcacaagataaatcgtatcttccaaggatgtctccactgtgggcagaggaggatgcagatgaccccaaacacacgctcctcctccactatcagcattcactgtttataaatgacacgagtaacatggaatatagtggccgggtgcggtggctcacacctgtcatcccagcactttggtaggctgaggtgggtggattgcctgaggtcgggagttcgagaccatcctgatcaacatggataaaccctgtctctactaaaaatacaaaattagccgggtgtggtggcgggcgcctataatccagctactccacaggctgagacaggagaatcgcttgaacccaggaggcggaggttgcagtgagccgagatcgccccatcgcactccagcctgggcaacaagagccaaatttcgtctcaaaagaaaaaaaaacaaaaacaaaaaacatggaatatatgggaaaaaaactcaatgatcaggagaaatgctattattttaaaatttagtaagaagagagtctggtccccaatggctccctcctgcaaggctggtgacacagagactggacagggctggtctggtaagaggccccagccccatccgtccccagctctgtggcctgggcaggttaccccatctctctgcgcctctggcacctcctctgtaagatgggaatggcccgtgcgggcctagggcagcctcacatgagctcacatccgcgcagcacttagaagagtggcctgggcctcagaattcggttctaccatgatttaacaatagtaatatacagaggtgaaatgtcagaaggaactggctgaaaggttaaaatctattattttggggtgaatagttttattctctctctcttttttttttttttttttgagatggagtttcgctcttgtagcccaggctggagtgcagtggcacgatctcggctcactacaacctccgcctcccaggttcaagcgattctcctgcctcagcctccacagtggctgggattacaggcacccactaccacgcttggctaatttttatatttttagtagagactgggtttcaccatgttggtgagactggtctcaaactcctgacctcaagtgatgggcctacctcggcctcccaaagtgctgggattacaggcatgagccataatgtccagccaagaactttgttctcttttgcattttactaatgcgttggagaatgggtgggagaaatactgggaaggtggggaatgtactcctggaacgaccagagctggaccctgagctggaagaggtcagcctgcccctgctgcccatgccagcatccccttttcttgctctctccccggtcttcctgcctgggaaggaagcaaaaattctcagggctgtggaggggttggggaggcccagagccatgcagggggctgtgtttagtggacatcagccctgagggctcccgggagcgctctctacattggctggtttctctcttgtgtcttcagaaacacagtggagcgaatgtatcgagacacattctcctacaacttttataatagacccatcctttctcgtcggaataccgtctggctgtgctacgaagtgaaaacaaagggtccctcaaggccccgtttggacgcaaagatctttcgaggccaggtaccacccggacttcaatcactttgcaggcaggagctaagccagctgggaaagcaaaccacgcactgataagtgaagtgcccggcggcgggctatccagtgtgtccttctctcccacactttccaagtccgtggccctgaccttcctgctggaccgtcctgggatcggatcgtggagggggtttgcctttgcacaaaaggccttgtgtttttttttttttttttttgagacagagtttcactcttgttgctcaggctggagtgcaatgacgcgatctcggctcacagcaacctctgcctcctgggttcaagcgatgctgtcgcctaagactcccgagtagctgggattacaggtgcccaccaccacgcccagctaattttttttttttttgtatttttagtagagacaggattttaccatattcaccaggctggtctcgaacttctgacctcaggtgatccacctgcctcggcctcccaaagtgttgggattacaggtgtgagccacagcgccggcctaattttaatatttaattaatccaatgtggctaacatattacttcaacattaattaacataaaattcttgacaagataatgaagtttctttttgtcacactgagtctttgaaatgagctgtgtaggccacgcttggtgggtggctcgcgcctgtaatcccagcactttgggaggccgaggtgggtggatcacctgaggttagatgtttgaaaaccagcttggccaacatggtgaaatcccgtctctactaaaaatacaaaaaaaaaattagcccggtgtggtggcagtcgcctgtaatcccagctacttgggaggctgaggcaggagaaccgcttgaacccatgaggcagaggttgtagtgagccgagattgcatcattgcactccagcctgggcaacaagagtgaaactacgtctcaaaacaaaaacaaaaaacaaaaaaagataaatgagcggtgtatggtgtatttttcaggtgcccaggtctttcatcagagccccatttcaagtgctcagtagcccctttggccagtgcgccccaccacatgggacagcgcaggtccagtggcctccccagctgaccgcaggcagggaacaaggcagaccctagagggccaggccacagcaggggctgaggatgcctggtgaatggatgcctgggagaatggatgccagaattcacgcatgaggctctgaacagggctgggaaaacttccaaacgaagggaagctcatgtcttggtgcactttgtgatgatgcttcaacagcaggactgagatggggacatttacaataaacagaaatgtatgggctcgagttctggcctctgggaagtccactgtcaatgcaccagcaactttccagggcctgcgagctgcacagtcacgtgggggtaaaggttgttgccagaagttcaggggatgctccagacagagtggcctgggatgtcgagtcactgctgctccatgccacggggacaagaggaagcagtttagtctgacatactgcccccccagctagagggcaagagacagaaagaggggctgaagtcgcccttgaataaacacgccagtagcacccacaaaggtgcagcccccacagcctcatagcctcttctaggtgccacctcttaaggccattacaatagccattaacactgaacgtgagctttggagcagacaatcactcaaactaaacaggggggatggaggaaaggagcttcaatggcaagatcccctgggctcctgtcctggcccctcctctccctgccccacccctgcactcctcctgctccccctctcagagcatcccctgccccctgctcctctcccaggtgtattcccagcctgagcaccacgcagaaatgtgcttcctctcttggttctgtggcaaccagctgcctgcttacaagtgtttccagatcacctggtttgtatcctggaccccctgcccggactgtgtggcgaagctggccgaattcctggctgagcaccccaatgtcaccctgaccatctccgccgcccgcctctactactactgggaaagagattaccgaagggcgctctgcaggctgagtcaggcaggggcccgcgtgaagattatggacgatgaaggtgagaggtggaggggtcaggggagcgtgagcgggaggaacagcatgaaagatggatggatctgcaatgccatggctgggggtgtcccagggcagcctgcaggggcggggccagcactgacagcaactgacagccaggagaccaggcctgggagcgcgggcccagggtcagggcagagcctgactgcttcctgcctcttcgtctcagaatttgcatactgctgggaaaactttgtgtacagtgaaggtcagccattcatgccttggtacaaattcgatgacaattatgcattcctgcaccgcacgctaaaggagattctcaggtgagggtctccctctggcctcatcgtctgtctcctctcgcctcctgctcatcctcctgaggcctcccctggccaggccctcctgccctccgtcctgccccctgcctgccctcatggttacacccctcacccacactccttgtgctccttccccttcttgcctcctccctctttcctgggcccctcctatgagtgagaggccccttctgcctccagagcaacctccatccaccttcgaggccgccctccccacagcctgggatccccaacctggctccttccatctccctggcataatcgaatttgtcataaaactggacgtaagtgggcatgaatattcacaaggccgacagccagaagctttgagcaacatccttcaaggccgacctgagtccctgagaaggagcagcctctgtggaaacttcaggcttcgactgccatagaagatgcccccgggccgggtgcccacagggcaggcatttattttctcacagatctggaggctgcaagtccaaggtggaggggtgggcggggttgtgtcttctgcagctgctcctcttggctggcagggggtcccttccagccctgtcctctctggcctttcctctgtgcacctgcacccctggggtctctctgcctctaaatgtcctcctcgtttatggaccccagtcagacaggattagggcccaccctaagggccatgagttaatttaatcaccactttagtggacctgtctccaaatacagttatcctgtgaggaggtggggatgagggtttcaacatatcaatgtggggaagatacaatttagtccatgacaatgggtcaagcttgcgtggggcatgcaggggtccctgttctgtgtgtctgtctcccaggcgagtcctgccctgactctcacagcccctccctccagaccttgctgcaccctgggccccaccccatggcttccccacccaacagcacccagcccggcctctgctcacgcctgtcccttctcaaatctgcccccaacagggatggagatgcagaaagagccaaacaaacactcagtgatcaaggtcccaattgaataagattttttttttttttttgagacactgtctccctctgtcgcccaggctggagtgctatggtgcgatctcggctcactgcaatctctacctcctggttctagcaattctcttgtctcagcctcccaagtacctgggattacaggctcatgccaccacactggctaatttttgtatttttagtagagacggggttttgcaatgttggccaggtgttgagtaagattttgcaaaagagtaggcttggataatgggaggcttgagatgccaggagctctccaggaagcacaatagaaaaaggcaaccagagaccagagaggccatagaaagggatctaaggccctcgggagagacgggaactgagcacctgggtcttagaccggaggagcaaactgcaagacagggtggccggggacaccagcctccacccttctgtgacatagggacaagagctcagcctgccagggaacaactctgggcaggagatgtggaaggaaggagctcagtgtgggggcacgcatggcatcctggggggacatctgagggcacccccacccgctattcctccctccaatggtggcctttgaatgtgaaggcaagggggaagcagacacctgcccctcactctccctccctaccacatagctaccgggtggggggcgtccctgggatgattcctgagggcaggatccaggagtccctctggaggtcctcccatccaggtgagaaagcagcataaagtgagacctgcactcagatgggcctgtgaggtcactcacagcgcaggtgtctcctggaacaagggccctggaagataaaatagaacccaagcccaggactaccatcagggccaggacaagcctgccagggagggtgcacatgaagccccagatcagggaccactgcccgctctgcccacggggcctctgctgccccttcctgcctggtggccctgctgggcctcagcctggcctccccctgcccctgccccagcgctagtctctctcccctctggttcctctgctgctcccactaccagccaggctctttgccctgctatgtggtcgcccctttacagcttctgaatgggccatctcccccacctgccccagcccaggccccctgctgagactctcccccgaaagtcacccctttgctattgctccccgccctgggatggtgctccctctctgtgcttctcgccattcctgagctcaggaactgagaaaattgaaccaaaggatgattggagcaatcaggcattttgttctcagcacttccatggaatttctgcaagatttactttgtttcaacacaaagtcttaggagaggatgtgggggagggaatggtctctgtaccagaaaataagtcacttcttccaaagatgcctccactgtgaacagaggaggatgcacatgactccagacacaggctcctcctccgtgagcaccattcaccttttagaatgaaacctgcaacatggagtgtaggaaaaaatatgatgatcaggagaaatgctcttattttaaagtttagtaagaagagagtccggttcccaacagctccctcctgcagggcctgtgatgcagaggctggacagggctggcccggaaaggggccccagctccatccatccccatctctgtggcctgggcaggttaccccgcctctctgtgcctctggcacctcgtctgtaaaatagtgatggccccctgcaggcctcaggcacataccatgagctcagaccctcacagcacttaggagagtggcctaggctggccgggcacagtgactcacgcctgtcatcccagcactttgggaggctgagtcgggcagatcacaaggtcaggagttcaagaccagcctggccaacatggtgaaacccagtctctactaaaaatacaaaaactaggtctggccgcgatggctcacacctgtaatcccagcactttgggaggcaggcgggcagatcacaaggtcaggagttcaagaccatcctggctaacatgatgaaaccccatctctactaaaaatacaaaaaattagccgggtgttgtggcacgtgcctgcagtcccagctagttgggaggctgaggcaggagaatcgcttgaaaccaagaggcagaggttgcagtgagccgagattgtgccactgcactccagcctggcgacagactgagaccccgtataaaaataaataaataaataaaagtacaaaaatcagccggacgtggtgacacaagctcgtaatcccagctactcaggaggctgaggcaggagaatcacttcaacccgggaggtgcaggttgcagtaagctgagatcgcgccactgcactccagcctgggcagcagagggagactatgtcccaaacaaaaacaaaaacaaaaaaaacaaaaagagtagcctgggcctgggaattcggtgtgataccaacgtaaaaagaatcatcatcatcggacaggtgaaatgtgaggaaggaattgagctgaaatgttcaagcaattattttagggcgaagagttttattgtctgttgcattttcctaatgggttgggagacgtgtggcagaaaaactgggaggttgagggtgtcccattggtaggcccagagctgtggttccagctgggagaggtcaccccggcccttctgcccctgccagcatcccctcctctttctctctcccagtctttctgcctgggaaagcagcagacattcccagggctgtccagtgagtggtgttcagtgggcatcagctccgaggaatccaggggggtctctgcattggggtttctctattgtgccttcagaaacccgatggaggcaatgtatccacacatattctacttccactttaaaaacctacgcaaagcctatggtcggaacgaaagctggctgtgcttcaccatggaagttgtaaagcaccactcacctgtctcctggaagaggggcgtcttccgaaaccaggtagcaccaaagtcctatttacaccccaaataggagctaagcagctaggaatgcagaaaacacaataagtgacgtgcctggcgtgggctttcctgtgtgtactttcctcttacatttcttttttttttttttttttgagacagagtctcactcagtcacccaggctggagtgcaatggcgtgatctctgctcactgcaacctctgcctcctgggttcaagcaattcttctgtctcagcctcctgagtagctgggattacaggtgcccaccaccacacccagctaatttttattccatttttagtagagacggggtttcaccgtggtgaccaggctggtttcgaattcctgacctcaagtgatccgcccccctcggcctcccaaagtgctaggattacaggcatgagccaccacgcccaacttcctcccacattttttaagtccgtggcccagatcttcctccctaactttcctgggatcagattgtcgaggggttttgcctcttaccaaaaggccttgtttagcgcccagcgccctcactcttgactttgtttcccaaaatcttgtcatggagctgtgcgtccggcagtcctcgggaaacagcagctgtgggaagcggtgggtctggtgtccagcactgtgcctgggccagtcactgtgggctggtggggccgcccccgccactgccctgattcctcgatgtcaaggacacatcctcacagggtggtgaaccctcgctcctcaccctgccgcccccacagcagccactgacctcccacccaccctgtcgtgtcccacccaaccctgcggccccctcctcccaggcaggagattttttcagagtgtgtttggggagggagccgtctgtgtgctgggcaggcctggcctacagcagtgctggcctcggaaacacccaggactcaggatggaagcgcgagtgttcccagtccccacacgctaaaaaggcgacaagaacttgtggaagaaattttagtgtctgcattagctcaattatctcacataggatttcaacatatacttaatataaaatgcctcatgagagagttaaagtttgtctattctcacaatgagattttgaaatgcgctgtgtattttacacgtgccaacgtttctaatcagagccccatttcaagtgctcagtagcccctttggccaaccttcaactccatgggacaatgtgggtccaatgaccttcccagcagaaggcagacaggggacaaggcagaccccataggaccaggccacagcaggggctgaggatgcccggttaacggatgcctggggaacaggatgccagaaatcacacatgacctatgatgagacaggaaaagactcaataaaataaagaaggaaggggccgagtgcagtggctcacgcctgtaatcccagcacttagcgaggctgaggcgggcggatcatgaggtcaggagtttgacaccagcctgcctaacatggtgaaatcccatcactactaaaactacaaaaattagccaggcgtgggggtgtgcccctgtagtcccagctacttgggtggcttaggcaggaaaatcgcctgaacccaggaggcagaggttgcagtgagccgagatcttgccactgccccccagcctgggtgacagagcaagactctgtcactcaaaaagataaagaggaacggccaggtgcagtggttcacgcctgtaatctcagcactttgggaggccaaggcgggggatcacgaggtcaggagcttgaaaccatgctcgctaactcggtgaaaccccatctctactaaaaatacaaaaaattagccaggcgtggtggcgggcgcctgtagtcccagctacttgggaggctgaggcaggagaatggcgtgaaccccggaggcggagcttgcagtgagcggagatcgcgccactgcactacagcatgggtgacagagcgagactcagtatcaaaaaaaaaaaaaaagaaagaaaaagaaaagaaaaaataaagagcaaggagaaggatggaagaagggaaattcaatgagtaaaaagccctggggcctagtatgtacccaaaaaaatgagaagtaaagaaaataaggccatgcatgtggtttatgctcatagtcgcagagttttgggagggtgaggcaggaggatggcttgagcccaagagttcgagatcagcctgagcaacatggtgaaacccagtctctacaaaaattacaaaaaaattaggcaggcgtggtggcacgcacctgcagtcccagctaatcaggaggctgaggtgggaagattccttgagcctgggaggtcaaggctgcagtcagccccagatcgcaccactgcaccccagcctgggcaacaggagagaccctgtctcaaaaataaataaggaaacgccctggggctccaggcccgccctctgctcccatcgccccacccctgcactcctcctgctcctagtctgagctcccctgccctcctcctcctccttccccaggtggatcctgagacccattgtcatgcagaaaggtgcttcctctcttggttctgtgacgacatactgtctcctaacacaaactacgaggtcacctggtacacatcttggagcccttgcccagagtgtgcaggggaggtggccgagttcctggccaggcacagcaacgtgaatctcaccatcttcaccgcccgcctctactacttctgggatacagattaccaggaggggctccgcagcctgagtcaggaaggggcctccgtggagatcatgggctacaaaggtgagacgttggggggctgaggagagtgggtgcgggagggacagcatgaggggcaggtgtgtctgcaatgccgtggggcggggcagtgtcccgggaagcctgcagggatggcgccagtgtccactgcaactggcagtcaggagacctgggcttggaggggagggcccagggctgggagagaagcctgctgggccctcactgctttctccttgttttttctcagattttaaatattgttgggaaaactttgtgtacaatgatgatgagccattcaagccttggaaaggactaaaatacaactttctattcctggacagcaagctgcaggagattctcgagtgaggggtctccccgggcctcatggtctgtctcctctagcctcctgctcatgttgtgcaggcctcccctccatcctggaccagctgtgcttttgcctggtcatcctgagcccctcctggcctcagggccattccatagtgctcccctgcctcaccacctcctctccgctctcccaggctcttcctgcagaggcctctttctgcctccatggctatccatccacccaccaagaccctgttccctgagcctgcatgcccctaacctgccttttcccatctccccagcataacctaatattttttttttttttttgagacggaatttcgctctgtcacccagactggagtgcaatggcttgatcttggctcactgcaaactctgcctaccaggttcaagcgattctcctgcctccgcctcccgagtagctggaattacagacgcctgccaccacgcacagctaactttttttttttttgtatttttagtagtgactgggtttcaccatgttggccaggctggtcttgaactcctgacctcaggtgatccgcctatctcagcctcccaaagtgctgggattacaggcgtgagccactggcccggcggcacaaccaaatcttattaaactcaccctaggctggccgcggtgactcatgcctataatcccccagcaatttgggaggcagaggtgagagaatcgcttgagcccaggaattcgagaccagcctgggccacatgacaaagccccatctctacaaaaaaattacaaaaaaaaaaaaaacaggtgtggtggcatgcacctgtagttgaagctacttggaaggatgaagtgggaggattgcttgagccggggaggtggaggctgcagtgaactgagatcacgtcactgaactccagtctgagcaacagatcgagaccctgcctgaaaataaatcaataaataaactcaaccgaaatgggtatgaaagttgaaatgggtatgtaagttgaaaaccagaagttttgagaaacatcctttgttaactttcatcctacaaattgggtcattcatgtcctacgcagctaaaacagagcccaggagccagggaggaaaagcagtcaggccacacaccattgctcccaaaatggacttctctgcaagcctgactcctgaaactgtgcattgtaccctgaaaccagctttatccatagcttctgcaataaatggctgtaagtcttggactccttgctataatcgcagctattcagcaatggaacctcccagttcccaacccttcctagtgcccatgggctttcccataggacaagagaacatttctccttttctttttttttttctttgaaatggagtctcgccctgtcacccaggctggagtgcaatggtgcggtctcggctcactgcaacctctgcctcccttgttcaagtgattctcctgtctcagcctcccgagtagctgggattacaggcgtccaccaccaaaccaggctaatttttgtatttttcataaaaacgggtttcatcatgtttcccaggctggtcttatttttattttattttttgagatggagtcttgctctgttgcccaggctggggtgcagtggtgcaatctgggttcactgcagcctctgccgcctgagttcaagctattttcctacctaagcctcccaagtagctgggattacatgcgcgtgccaccacgcctagctaatttttgtgtttttagtagagacggggtttcaacatcttgaccaggctggtcttgaactcctgacctcgtgatccacccgtctcggcctcccaaagtgctgggattacaggcgtgagccacctggccaggcttaggctggtcttaaactcctgacctcaagtgatccaacctccttggcctcccaaattgctgggattgctggtgtgagccacagcgcctagcccatttctccttttaataggacctgttgctgtctctgttctcccaacatggtgaacaccacccggactgcgtgtatgtcccaaattacaattctttctttgcaaatgaaatgtgaaatttagaggcccttctccacactttaaatttgacttgacattttctaggcagatataagttattagagaatgagattctctataaaaatgatcccttcatgctgtggcctccacagaagatgccctgggccaggtgcccacatgaataatgcgggccacaggcaggcatttattttctcacagatatggaggctacaagtccaaggtggaggggtcggcggggttgtttgctctgaggccgctcctcctggatggcagggatcccttctggctgtgtcctctgtggcctttcctctatgaacctgtactgtacctctggggtctctctgcttccaaatatcttttttttttttttcagacagttttgctcttgttttctaggctggagtgcaatggcacaatctcagctcactgcaacctctgccttccgagttcaagcgattctcgtgcctcagcctcctgagtagctgggactacaggcgtgtgccaccacgcctggctaattttgtagttttagtagagacggggtttctccatgttgctcaggctggtcttgaactcatgagctcaggcgatccactctcctcagcctcccaaagtgctgggattacagatataagccaccatacacaacttttttttttttttgagatggagtttcactctgttgcccaggctggagtgctaaatagcagaatcactgctcactgcaacctctgcctgctgggttcaagcaattctcccacctcagcctcctgagtagctgggattacagatgcccagaaccaatctctgctaatttttctattttttagtagagatggggtttcactgaggaaggagaccacctctctcattgtctcctatttcagaaggaagcaaaaagttagaaagatgcagaagtaagatcaatggccagactgtttggcgctgctacctgggcctggtagttaaagatcaactcctgacctgaccgcttgttttatctaaagattccagacattgtatgaggaagcattgtgaaactttctggtctgttctgctagcccccaccactgatgcatgtagccccccagtcacgtagcccacgcttgcacaatctatcacgaccctttcacgtggaccccttagaattgtaagcccttaaaagggccagggacttcttcagggagctccaatcttcagatgcaagtctgtcaacgctcccagctgattaaagcctcttccttcctaaaactggtgtctgagaggttttgtctgcaaccgttcctgctacatcaccatgtacattccaggcgaggctggtctcgaattcctgacgcccacctctgcctcctaaagtgctgggattaaaggcatgagccatggcacctggtcgaccttctcctttatggaccccagacaaattaatttgtgcccacactagaggtctcatttaaattaatcatcttggtcgggcgtggtggctcacgcctgtaatcctagcactttgggaggctaaggcaggcagatcacttgaggtcagtgtcacacgtgtccatgtgaagagaccaccaacaggttttgtgtgagcaacaaggctgtttatttcacctgggtgcaggtgggctgaaccagaaaaaggagtcagcaaagggtggtgggattatcattagttcttacaggtttgggataaacctatcccaaacctataagtgtacattcttaaaggcatacaaagtacattcttaagtgtgggggagaatattacaaagtaccttcttaagggcaggggagactatatggtatcagttggggtggggcaggaacaaatcacaatggtggaatgtcatcagttaaggctattttcgcttttttttgtggatcttcagttgtttcaggccatctggatgtatacatgcaggtcacaggggatatgatggcttagcttgggctcagaggccagacattcctgtcttcttatatgaataagaaaaaacaaaatagtggtgaagtgttggggtggcgaaaattttggggggtggtatggagagataatgggcgatgtttctcatggctgcttcaagcgggattaggggcagcgtgggaacctgtggtgggagagattaagctgaagaaagattttggggtaaggtgatattttggagttgttagaaggagcatttgtcgtatagaattattggtgatggcctggatgcggttttgtatgaattgagaaactaaacggaagacacaaggtctgaataaaagaaggagaaaaataggttggttttttttttttttttttttttttgagacagagtctcgctctgttgcccaggctggagtgcagtggcacgatctcggctcactgcaacctctgcctccctggttcagacgattctcctgcctcagcttcctgagtagctgggactacaggtgcacgccaccacgcccgactaatttttttgtatttttagtagagaagggggtttcaccatgttagccagatggtctcaatctcatgacctcgtgatccgtccacctcagcctcccaaagtgctgggattacaggcatgagccaccacacccagccagaaaaataggtattaaaggactaagaattgggagtacccagaacatctaattagacagtgtccaagggggttcaacataattatttgcttggttggtgagtttttggcctctatccttgaatttttttatgttgtcatatacctgtccagattgatttaggtaaaaacaacactcttcgtttaaaaatatacagagtcctcttttttttagcagtgagtaagtcgatgcctcggcaattttggaggaaagagaaatgcaaagccagcaattgttcatttaagaaggattagaaatggctaagagagagtttgatagtgtggtggagatagctggggagaggtagagggtagcataagaacggaaccagaataagagtgagtataaaagtaaagaataggacttcatcagggtgaaagtactggagggtaccttgccactgaagatcttctatcgacttcaagagcgacttaagggtggtgatttgaagtaaaaccaggagcctccaaataccaagagcctgagaaccttcttgggtgatttgactaataaaggccggtgcgttatcagactgtatagaggtgggaaggacaaacccaggaattctgtctaaaagaaaggaagaaatgatcacggtggacttctcagaccctgtgggaaaggcctctacccatccagtgaaagtgtctacacagaccaagaggtattttagtttcctgactcagggcatgtgagtagtcaatttgccagtcctgggcagggccaaatcccagagcttgatgtgtagggaagggagggggcctgaacaatccctgaggagtaatagaatagcagatggaacactgagaagtgatttccttgaggatagatttccacaatggaaaggaaatgagaggttctaagaggcaggctagtggcatgtaacctacatggaagaggttatgaaaggacgacagaatagactgggcctgtgaggctggaaggagatatttttcttggtccaagaaccatttgccttgtgtgggaagagattgataggtggaagtttcggtgggggagtaggtgggagtgactgatgagaaggagaaaaaccggccatgagggacagaagttggaatgctagctgcttctttagcattgccctgagcgatgggatccgatgccttttgatggcccttgcagtgaatgactccagcttcctttggaagtaaagcagctttaagaagactttttattaaggaggcattgatgatggaggacccttgcgtagtgaggaaacctctttctgcccatataacagcatggtggtacaggatatggaaggcatatttagagtcagtataaatattgatgtgtagtccctttgcaagagtgagggcctgagttaaggcaatgagtttggcttgctgagaagtagtggagtggggcagagtggtagcctcaaggataaatatggaagatactatagcatagcctgcctttgctggtgagtggcaattaggcctgatggaactgccatcaataaaccaagtgtgatcagggtgaggaacaggaaagaaggaaatatggggaaatggagtgaatgccaggtgtatcagagagatacagtcatgggtgtcaagtgtggtatcaggaataatgtgggaggccagattgaagtctgggccaggaacaatggtaattttgggagactcaacaaagagtgagtatagctgaaggagccggagagcagaaagtatatgcatcaggtgtgaggaagaaaatagattttggaagttataagaactgtagagagtgagttgagcacagtttgtgatttcaagggcctctaaaagtattaaggcagtggcagctgctgcacagagacatgatggccagcctaaaacagtaaggtcaagttgtttggacaaaaaggctacagggcacagtagccttgtgtaggaatcctggtccttgtgtaaaaattccgactgcacagccctgtactttggctgtgtgtaatgaaaagggttgggatgagtcagggagagctagtgtgggagcagtctctaaagctgtcttcaaggaacggaaagaggagtagggaaaggatttaggatctatggggtcagctaggtttccctttatgagtttacattaggttttgttagtacggcaaaaccaggtatccaaagatgaaagtatccaaccatgcccaggaaggaaagaagttgtttttttgtagaaggggttggagtttgagagattagccagacatgattggcagggagaacatgcatgttttcatgaagaattatgctgaggtaggtaacggatggggaagaaatttgagctttggaggggggatacctgatatcctctggagaataaatgttgaaggagcaggagggtatcttactgagaagactcaaaggagggactacaaagtaaaaggtcatccatgtattgaataaggtgggaagcagaggggtggaaagaaagtaaatcacgagaaagggcttggctgaagtaatgagggctgtccctgaagccttgtggcactatagcccaggtaagctgctgggactgacgtgtgtcagggtcagtccaggtaaaagcaaagagaggctgggatgaagggtgcaaaggaatagtaaagaaaccatgtttgagatccaggacagaataatgggttgtggagggaggtattgaggataggagagtatatggatttggcaccatagggtggataggcaagacaatgtggttgataaggcacagatcctgaactaacctataaggcttgtccagtttttgcacaggtaaaaggggggaattgtaaggagagtttataggctttaaaaggccatgctgtaacgggtgagtgataacaggctttaatccttttaaagtgtgctgtgggataggatattggcattgagcagggtaagggtgattaggttttaatgggatggtaaggggtgcatgatcagtcactaaggagggagtagaggtgtcccatacttgtggattaaggtaggaagacacaaggggaggacgtgaaggaggctctgaactggggaaaagggcggcaatgaggtgtggctgtagcccaggagtagtcagggaagaagaaaatttggttaaagtgtcctgacctaataagggagctgggcaggtggggataaataaaaaaagagtgcataaaagaatgttgtccaagttggcgccagagttggggagttaagaatgttgtcccagttggcgccagagttggggagttttaagaggtttagaagcctggctgtcaatacccacaacagttatggaggcaagggaaacaggcctttgaaaagaaggtaatgtggagtgggtagcctccgtattgatcaagaaggggacagacttaccctccactgtaagagttactcaaagcgtccgtgatggtccaggaggcttctgaggcaatcggacagcgtcagtcttcagccactaagccgagaagatccgggaaggagtcagtcagagaaccttgagccagagttcgaggggctctgggactgtctgctgggcgagttggacagtccgatttccagtggggtcctgcacaggtggggcatggcttaggaggaatcctgggctgtgggcattccttgccccagtggccagatttctggcacttgaagcaagatcctggggaaggcagtcctggaggaatgcctgacccttgcagtttaggcgttctgaagttcttgtgtgctggagatgtggctggggtttctctcacagaagaggcaagtaatcgcaactcttctctattattgtacaccttgaaggtgaggttaattaagtcctgttgtggggttgagggccagaatccaatttttggagctttttctaatgtcaggagcggattgggtaataaaatgcatattgagaatatgacggccttctggcccctctgggtctagggcggtaaagcatctaagggttgttgccaaacgggccatggactgagcggggttttcatatttgatgaaaaagagcctaaacactaactgatttgggagaggttgggtaaagaaaaaggagcattaaccttggctatgccttcagctccagccacctctctaagaggaaactgttgggcaggtgggggagggctagacgcagaacaaaactgtaagccagacccggtgtgaggaggggaagtgatagaaggattatagggtgggggagcagaggctggcgaagagttgggacctggctcagcctggcgaggagcagcctgaggagaagaggagaggtcagatgagtctgtggaaaaggaggattcaaaggactcagagcttggggtggagactgaaggaacagacaggagagaaagaagaaagttttgggatgagtctcatcaggagcagagattaggaagggactgaagtgtaaaagaatgcctggacatcagatacctcagaccatttgtccattttatgacaagaattatctagatcttgtgggatggagaaattgaaagtgccattttctggctatttggaatcattgtcgagtttgtactggggccaagcggtgttgcagaagaaaataagacgcttaggtttcagttcaggtctgagttgaagaggttttaagtctttgagaacacaggctaagggagaagaaggaggaatggagggtggaaggttgcccatagtgaaggaggcaagcccagagaacagagagggtagagacacggagaagagggggtagtgagcagccctgggctgcaatgtgggtgagcagccaaagcaggcatccccacaattgactgaccaccaagggaatgtgggtgaataatcaggcaggcgtccccgtggagatcagacaccaatggagtgtgggtgaataatcaggcaggcgtccccgcggtgattaaacaccaaggaaaggctgtcttcccgagtccgtgactggcgccggagttttgggtccatggataaaatgtgtctccttgtctctactagagaagaaaaagaactggaattggaaggacaggaagattgaagggtagcgagagaggaaggctggagggtagtgagagaggctggagaagagcgaaaagaccacttacctgatttgaaattggtgagatgttcctttggctggttggtctgaggacccgagttgtaggtggatctcctcacccagtgaaggtgaggacaggggaccggtctcccgaaggagtcctcccgtcccgagttttggcaccaaacgtcacgcacgtctgtgtgaagagaccaccaacaggctttgtgtgagcaacaaggctgtttatttcatctgggtgtgggcgggctgagtccgaaaaaggactcagcaaatggtggtgggatcatcattagttcttataggtttgggataggcgtacaaagtacagtctcaagagtggggacaatattacaaagtacattctcaagactggggagaatattacaaagtaccttcttaagggcgggggagaatatatcatatcagttagggtggggcaggaaaaaatcacaatggtggaatgtcatcagttaaggttattttcacttattttgtggatcttcagttgcttcaggccaggtggatgtatatgtgcaggtcacaggggatatgatggcttagcttcagctcagaggcctgacagtcaggagttcaaaacaagcctggtcaacatggtgaaaccccgtctctactaaaaatacaaaaaaattagccaggcgtggtagtggatgcctgtaatctcagctacttgggaggctgaggcaggagaatcgctggaccttgggaagcagaggttgcagtgagccgagatcatgccattgcactccaacctggaagacagagtgagactgcatctcaaaataaaaataaaaataaattaatcatctgttggctgggtgtggtggctcacacctgtaatctcagcactttgggaggccaaggtaggcggatcacctgaggtcaggaattcaagaccagcctggccaacatggcaaaaccccgtctctactaaaaatacaaaaagtagctgggcatggtggcgggcacatgtaatcccagctactcgggaggctgaggcttgaatcgcttgaaccagggaggtagaggttgcagtgagccgagatggtgccactgcactccagcttgggcaacggagtgagactccgtctctaaaaaaattaattaatgaattaattaatcatctgttgaaaaggacctgtctccaaatacaaccacacattgaggtagaggggttagggcttcaatatattgatttttgggagaaacagggcaacatggcaacaagccacagtcactgtgggcgggcctgagtggggagtgcaggggttcctgtcctgtgtgtctgtctcacaggggagtcccgacctgaccctcacagcccctccacccagaccttcctgcatgttccacccagcccaccctcctgcacccaagagcacccagccctccctcctgctcatgcccctcccttctcaaatccctcccagcagtgcagctctgggctaggacacagcctagggaacgtgactgagaaagagccaagaaaacttgatcagtgatcaagttggtgtttaagtaagattttcaataaaaagtagaattgggtactacatggaggcctgagatgttcagagctttttgagaaagcagaacagaaagtagaagggcaaccaggaaccagaggtgccagagaaccggaagcgcgggccctccgaggagacagggagtgggcacctgggtcttgggcctgtcgacaaacagagtcaaactctgtaaaatatttgaagagacgtattctgagccaaatacgagtgaccatggcccgtaacacagggctcaggaggtcctgataacatgtgcccaaggtggtgggggtgcaacttggttttatatattttagagaggcaagagctatcaatcaaatacatttgagaaatacaggagctgggtacagtggctcatgcctgtaatcccagtgctttgggaggctgaggtgggtggatcatgaggtcaggagttcgagaccagcctggccaacacagtgaaaccctgtctctactaaaaatacaaaaaattagccggtgtgatgatgtgcacctgtaatcccagctactcaggaggctgaggcaggagaatcacgtgatcctgggagacggaggttgcagtgagccgagatcacgcaagggcactccagccagggcgacggtgtaagactccatctcaaaaaaaaaagaaagaaatacattggtggctggacacagcagctcacgcctgtaatcatagcactttgggaggccgagccaggtggatcacgtggggtcaagagtttgagaccagcctggccaacatggcaaaaccctgtctccactgaaaatacaaaaattagctgagtgtggtggtgggcgcctataaccccagctacttgggagactgaggcaggacaattgcgtgaacccaggaggcagaggttgcagtgagccaagagcatgcaactgcattccagccttggagacagagcaagactctgtatcaaaagaaaagaaaagaaatacattggtttggttcagaaaggtcggatgactcaaagtaaggggagggggtttggggggcttccagggtacaggtaaatttaaatattttgtgggccaggcacagtggctcacacctgtagttgcagcactttcggaggctgaggcaggcggatcacgaggtcaggagatagagaccatcctgactaacacggtgaaaccccatctctactaaaaacacaaaaaattagctgggcgtggtggcggtcgcctgtaagcccagctgctcgggaggctgaggcaggagaatggcgtgaacccagaaggcagagcttgcagcgagccgagatcgcaccactgcagtccagactgggtgacagagcaagactccatctcaaaaacaaacaaacaaaaaacattttctggttgacgattggttgagtttgtctagagacctggcatccatagaaaggaaacgttcaggttaatataaaagattgtggagaccaaggttctttcgaagtctcatagtggctgcccttagagacaatagatgacaaatgtttcccattcaggtctttaaaaggtgcaattagttaatatgtttaggactgggaaggtctggaagaaaaagatccagctatattaatagagattctttacagatgcaaattttcccccacaaaggacaactttgcagggccatttcaagatatgtcaaagaaacatgatttggggtaaaatgttttgtcttctttgtcacgtaattttgtgcctgagtcagactggaaaatatctcacaatatatagggttaaataaaacccatctgggccgggtgcagtggctcatgtctgtaatcccagcactttgggaggcctaggtgcgtggatcacctgaggtcaggagttcgagaccggcctggccaacatggtgaaaccccatctctactaaaaatacaaaaattagctgggcgtggtggcgggtgcctgtaatctcagctacttgggaggctgaggaaggagaatcgcttgaaccagtgaggcagaggttgcagtgagccaagactgcaccattgtactctaggctgggcaagaagagtgaaactcagtcttaattaaaataaaatgaaataaaataaaataaaaatagaagccatctgatgaggatatatgcttggtagggcatgactccccagacctcttagatagtgtcacacacgtccgtgtgaagagagtccacagtaggctttgtatgagcaacaaagttatttatttcacttgggtgcaagtgggctgagtccggaaagagagtcagcaaagggagataggggtggggcagttttataggatgttggtgggcagtggaaaattacagtcaaagggggtttttctcttgtgggcaggggcagggcttacaaggtgcttggtgggggaacttctgagactcattgtccaggagaaataacttcacaaggtaatgtcatcagttaaggcaggaaccggcaatttttacttcttttgtggtttttcagttgcctcaggccatctggatgtatttgtgcaggcttgggctcagaggcctgacattcctgtcttcttatattaataagaaaaataaaacaaaatagcggtgaagtgttggggcagtgaaagtttttgggggtggtatggagagataatgggtgatgtttctcagggctggtttgagtgggattaggggcatcatgggagagattaaactgaagaaagattttggggtaaagggtgataaaccaagtgtgatcagggtgaggaacaggaaagaaggaaatatgaggaaatggagtgaatgccaggtggatcagagagatacagtcatgggggtcagatgtggtatcaggaataatgtgggaggccggatttaagtctgggccaggaacaatgataattgtgggagactcaacaaagagtgagaacaactgaaggagctggaggtcagaaagtatatgtgtcaagtgtgaagagaaaaatagattttgaaatttatgggaactgtagagagtaagtggagcatgagcatagcttttgattttgaaggcctctaaaagtataaagcagcggcagccactgcacagagacatgtgggctagcccagaacagtaaggtcgagttgtttggacagaaaggctacagggtgctgtcccggctcttgtgtaaattccgaccgcacagtcttgtacttcggctgtgtgtaatggaaagggttgggttgagttaagaagcgctagtgtgggagcagcttctagggctgtttttaaggcatggaaagaggagtggggaagaatttaggatctatggggtcacctaggtttccttttgtgagtttatgtaatggtttagccaggatggcaaaaccaggtatccaaaggcaaaagtacttaaccatgcgtaggaaggaaaggagttgttgctttgtagaaggggctagggtttgggagatttgccagacacaatcagcagggagatcacgcgtgttttcatgaagaattacagtgaggtaggtaacggatggagacaaaatttgagctttggagggggatacccgatatcctttggagaataaatgttaaaggagcaggagggtgtcttgttgagaagattcaaaggaggggctataaagtagaagatcatcaaaatattgaataatgtgagaagtagatggacggaaagaaagtaaatcatgagaaagaacctggctgaagtaatgagggctgtccctgaagtcttgtggcaggacagcccaggtaagctgctgggactgatggtgtcaaggtcagtccaggtaaaagcaaagagaggctggtatgaggggtgcaggggaacagtgaaaaaagcatctttaagatcaagaacggaatagtgagttgtggaggaaggtattgaggacaaagagtgtacgggttgggcaccaccgggtggataggcaaaacaatttggttgataaggcacagatcctgaactaacctgtaatacttgtccagtttttggacaggtaggacaggagagttgtaaggagagtttgtaggctttaaaaagccatattgtaacaggctggtgataagaggctttaacctttttaaagcctgctgtgggttgggatattggcattgagcaggataagagtgataggggtgggacagttttataggatttgggtgagtagtggaaaattacagtcaaaggggatttttctcttgcgggcaggggtgggggttacaaggtgcttggtgggggagcttctgagactcattgtccaggagaacggatttcacaaagtaatgtcatcagttcaggcaggaaccggccattttcacttcttttgtggttcttcagtgcctcaggccatctggatgtatactcgcaggctgggctcagaggactgacaggtaggaatttgggaaagataaaaaaaaaaaatcagagcttagtcctcacgcctataactaaaaatagaatcgttagcccccacttaccaactttggcccctagtggccaaaggtatctcagaaaaaccttaaaactgagttcctggccatgatgggaggggaggtcaggcacgcctcattatcacccctcccttttgcagtttagacacaactgaccagcagtaatgttaaaacagaatcataagaccggcagaaccagaacagactcttcatggcaatcagataccaaatcacaaccaggacctcaggccgtgccaggcaagggtgaggtcacacaccctacacttcaacagtcaactctgttctgcctgccacaaggtttttcttttgcttgtttagcagctaaacaagaactgcctcgagataaagaagatgaaaacaatcgcagctcatccagcgcgctgacacggagcaacagagcccctgctccacagccctaactccagctttccctgggcaagagactgatttcagtaacttcctccagatcagaagaccactgacaacagactggttctgcatggtttacagacctggcaaatttcggtgccttcatgtcctgaaaagaccctttgacatacaggcttaattgtagtacatttaaatattgtcctttaggaggccgaggtgggtggatcacgaggtcaggagatcgagaccatcctggccaacatggtgaaaccccgtctctactaaaaaggcaaacattagcagggcgtggtggcgcacacctgtaatcgcagctactcaggaggctgaggcaggagaatcacttgaacccagaatacagacgttgcagtgagccgagatctctccactgcactccagcctggtgacagagtgagaccccatctcaaaaaaaaaaaaaattcctcatgagagagttaaagttcgtcttattctcacactgagattttggaatgagctgtgtattttacacgtgccaaagtctctaatcagagccctatttcaggtgctcagtagcttctgtggtcaaccttcaactccacgggacaatgctgttccaatggcctccccagcagaagacaggcagggaacaaggctgaccccagagggccaggccacagcaggggctgaggatgcctggtgaatggatgcctgggagaaaggatgccagaattcgtgctcgaggacatgatgaaacagggaaagactcaatagaataaagaaggaaggggacgggtgcggtggctcacgcctgtaattccagcactttgggaggctgaggcgggcggatcacgaggtcgggagttcgagaccagcctggccaatacggtgaaaccctgtcgctactaaaaatacaacatttagatgggcatggtgtcacgagcctgtagtcccacctacttgggaagctgaggtaggaaaatcccttgaacctgggagacagaggttgcagtgagacgagattgtgccattgcactcgagcctggctacagagtgagactctgtctcagaaaaaaataaaaattaaaaataaagaaggaaggagaaggatggaagcgaatctcaatgaacaaaatgcactgggacctactatgtacccagaaaaatgaaaagtaaataaataaaataaggacttgcatggtggtttatgctcatagtcctagaactctggaactctggaaggctgaggcaggaggatcgcttgagcccaagagtttgagatcagcctaggcaacatgcgaaacccatctatacaaaaagatatgaaaacatacaaaaaaaattagccaggtgtggtggcacgcgcctgcagtcccagctaatcaggaggctgaggtaggaagatcccttgagcctgggaggtcaaggctgcagtgagcccagatcgcaccactgcaccccagcctgggcaacagagagagaccctgtctcaaaaataaataaataaggaaatgccctggggctccaggcccactctctgctcccatcgccccactcccgcactcctcctgctcctagtctgagctccccctgccttcctcctcctccttcccaggtcaatcctgagacccatagtcatgcagaaaggtgcttcctctcttggttctgcgacaacacactgtctcctaacaaaaactaccaggtcacctggtacacatcttggagcccttgcccagagtgtgcaggggaggtggcaagttcctggccaggcacagcaacgtgaagctcaccatctttgccgcccgcctctactacttccagtgtccatattaccagcaggggctccacaggctgagtcaggaaggggcctccatggagttcgtgggctacaaaggtgagacgtggggggctgaggtgactgggtgcaggagggacagcatggggggcagatgggtctcctgatatggtgaacaccacccggactgcgtgtatgtcccaaattacaattctttctttgcgaatgacatgtgaaatttagaggctcttctccacactttaaatttgactcaatattttcaaggcagatgtaagttattagagaatgagactctctataaaaatgaccccttcatgctgtggcctccacagaagatgccccgagtcacgtgcccacatggcaggcatttattttctcacagatctggaggctgcaagtacacgttcgcggggtgggttgggttgtttgctctgaggccgctcctcctggctggcagagagtctcttctggctgtgtcctctgtggcctttcctctttgcacctgcacctctgggatctctctgcctccaaatatcaacttttttttttttttgagacagagttttgctcttgctgtccaggctggagtgcagtggcacaatctcagctcactgctacctctgccttccgagttcaagcgattctcctgcctcagcctccccagtagttgggactacaggcatgcgccaccacgcccggctaattttgtagttttagtagagatggggtttctccatgttgctcaggctggtcttgaacttgtgagctcaggtgatccaccctcctcggcctcccaaagtgctgggattacaggtatgagccattgtatccaggctttttttttttttttttttttgagaggaggtttcactctgttgcccaggctgaagtgcagcggtagaatcactgctcactgcaacctctgcctcctaggttcaagcaattctcctgcctcatcctcctgagtagctgggattacaggtgcccagaaccactctactaatttttgtgttttttagtagagatggggtttcaccgtgttggccaggctggtctcgaattcctgactgcccacctcggcctcccaaagtgctgggattaaaggcatgagccagggcacttggccacccttctccttgatggacccccgccaagcgaatttgtgcccacactagaggtctcgtttaaagtaatcatctcggccgggcgtggtggttcacgcctgtaatcctagcactttgagaggctgaggccagcagatcacttgaggtcaggagttggaaacaagcctggtcaacatggtgaaaccccgtctctactaaaaatataaaaaaattatccgggcgtggtagtggacgcctgtaatctcagctactccggaggctgaggcaggcgaatcgctggaacccgggaggcagaggttgcagtgagctgagatcgtgccattgcactccagcctggaagacagagtgacgctgcatctcaaaaagtaaataaataaaaaataaaaagaaattaattatccgttggctgggtgcggtggctcacgcctgcaatcccagcactttgggaggccaaggcgggtggatcacctgaggtcaggaattcaagaccagcctggccaacacggcaaaaccccatctctactaaaaatacaaaaattagccgggcgtggtggcaggtgcctgtaatcccagctactcgggaggctgaggcttgaatcgcttgaaccagggaggcagaggttgcagtgagccgagatggtgccactgcactccagcttgggcaacggagtgagactccgtctctaaaaatattaattaatgaattaattaatcatctgttgaaaaggacctgtctccaaatacaaccacacattgaggtagaggggttagggcttcaatatattgatttttgggagaaacagggcaacatggcaacaagccacagtcactgtgggcgggcctgagtggggagtgcaggggttcctgtcctatgtgtctgtctcccaggggagtcccgacctgaccctcacagcccctccactcagaccttcctgcgtgctccacccacctcattcctcctacacccaacagcacccagccctcctgcctcctcatgcccctcccttctgaaatccctcccagcagtgcagctctgggctaggacacagcctagggaacgtgactgagaaagagccaagaaaacactcagtgatgaagttggtgtttaagtaagattttcagtgaaaagtagaattgggtactacatggaggcttgagatgttcagagctttttgagaaagcagaacagaaagtagaagggcaaccaggaaccagaggtgccagagaaccggaagcgcgggccctccgaggagacagggagtgggcacctggatcttgggcctgtcaacgaagagtcaaactcagtaaaatatttgaagagatgtattctcagccaaatacgagtgaccacggcctgtgacacagccctcaggaggtcctgagaacatgtgcccaaggtggtgggggtgcagcttggttttatacattttagaggggcatgggccatcaatcaaatacatttaagaaatacaggagctgggcgcggtggctcacacctgtaatcccagcactttgggaggctgaggcaggtggatcacgcgttcaggaattcaagaccacccttgccaacatagtgaaaccccgtctctactaaaaatacaaaaaattacccgggtgtggtggtgtgcacctgtaatcccagctactcgggagattgaggcagaagaattgcatgaacccaggaggcagaggttgcagtgagccaagaccacaccactgcactccagcctgtgggacagagcaagactctgttccaaaaaaaaaaaaaaaaaaagaaaagaaaaggccaggcgtggtgtctcatgcctgtaatcccagcactttgggaggccaaggcgggcggatcacgaggtcaggagatggagcccagtctggccaacatagtgaaaccgcgtctctactaaaaatacacaaaaagttagccgggcgtggtggtgtgcacctgtaaactcagctagtcagggggctgaggcaggagaatcgcgtgaacccgggaggcagaggttgcagtgagccaagattgccccactgcactccagcctgggcgacagagcaagacacaatctcaaaaaaaaaaaaaaaaagaaaagaaaagaaaaagaaaaagaaaaaagaaaaaaagaaacaaaaaaagtaaagaaaagaaatacattggtttagtcctgaaaggtcagacgactcaaagtgagggaagcggggttggggggcttccaggctacaggtaaatttaaacattttctggttgaggatgggttgagtttgtctagagacctggcatccatagaaaggaaatgttcaagttaagataaaagactgtggagaccaaggttattttgaagtctcataatggctgcctttagagataatagatgacaaatgtttgctattcaggtctttaaaaggtccaattagttaatctgtttaggactgggaaggcctagaagaaaaagatccagctatgttaatagaggttctttacagatgcaaattttcccccaccggggacaactttgcagggccatttcagatatggcaaagaaacatgttttggggtaaaatattttatctttcttctttgtcacataatgttgtgtctgagtcagattggaaagtaactcacaatatatagggttaaataaaacccatttgtgccaggcgcagtggctcatgtctgtaatcccagcactttgggaggccgaggcgggtggatcatctgcagtcgggagttcgagaccagcctggccaacatggtgaaaccccatctctactaaaaatacaaaaattagccaggcatggtggcggggacctataatcccagctacttgggaggctgagacaggagaatcgcttgaacccgagaggcggaggttgcagtgagccgagaccgcaccattgcagtccagtccgggcaagaagagtgaaactcggcctccattaaaatacaataagataaaaaaataaaaaatagaacccctctgatgaggatgtatgggttgtaaggcatgactccccagaccccttagataggattttgggcaagattaaataaaacaaatcagagcttagtccaaaggcctatgaactaaaaataaagtctttagcccccaccgatcccccccaactttggcccccagtggccaggggtatctcagaaaaaccttaaaactgagttcccagccatgatgggaggggaggtcaggcacgcctcattatcaccccacccttttgcagtttagacacaactgaccagcagtaatgttaaaacagaatcataagacgggcagaaccagaacagactcttcatggcaatcagataccaaatcacaaccaggacctcaggccgtgccaggcaagggtgagatcacacaccccacacttaaacagtcaactctgttctgcctgccacaagatttttcttttgctctagcagctaaacaagcactgcctccagataaagatgaaaacaatcccacctcacccagcgcccggacacggagtaacagagcccctgctccacagccctaattcctactttccctgagcaagagactgatttctgtaactttctccagatcagaagaccacagaccatggactagttctgaatggtttacagacctggcaaattttggtgccttcatgtcctgaaaggaccttttgacatacaggcttaattgtggtacatttaaatgttgtctccaccgcaatgtgaggacggataatacagctgcttttttttttttttttttttaatagattgttgtttgtttgttttttgttttgagatggagtctcactctgtctcccaggctggagggcagtggtgcgatctcggcccagtgcaacctctgcctcccgggttcaactgattctcctgcctcagcctcccaagtagctgggatttcaggcacatggcaccacgtccggccaactttggtagttttagtagagacgaggtctcaccatgttggccaggttggtctcgaactcctgactgtcatacatgtccatatagaagaccacctaaacaggctttgtgtaagcaataatgccatttattcacttgggtgcaactgggctgagtctgaaaagagagtcagcgaagggagataggagaggggcagctttataggacttgggtaggcggtggaaagttacagtcaaaggcggtcatctgttgtcagcaggggagggggtcacaaggtgcatggtgggagaccatgagacccattgtccagaagaagaatgtcataaggtcgattgatcagttagggtagggcaggaacaagtcctaatggtggaatgtcttaaggttggttaatcagttaagggagaaactggctgtttcacttcttttgtgtttttttggctgttccagacttcttggctgctgcaggccatctggatgtatatgtgcagttcacaggggtcacaatggcttagctctggctcagcggcctgacactgacctcagatgatccacctgcctcggcctcccaaaatgctgggattacaggtgtgagccactgtgcccgcctgggatcatatgttacacgcatgtttgttcaataagcatggagtgcagccacccacatgaatattcatagctcctcctgtagcctgttcaatatgtatgtttagctaaccccttcagcataaagctcctgccccaacccctcctgcttctaaatgtctgtctctggtgttaaccagaggctgctcttcccaggctgctggatggctaccttgcaggctgtcacccttaacaagaaataaagtgtcatttgcaaatgcatcccttgtgtaatttgtaggtcaccacgccatgggaacacgctaccaggggaagggagctgtgagacgcgcagggaggctccagacaggctggcctgggacaccagccgctgcccttccataacatggggacaagagagggcaaaagttcagcccaccacggaggatctccgggcaggagatggggaagaaggagaagcaggaaggaaagagctcagtgtgggggcgcgcatggcatcccggtgggacatctgaggcccacacccacctgctgtccctccctcccacggtggcctccgagggtgacggcctggggggaggcagacgcctggccatttactctccctccctgtccccatggccgctgggtgggggccgtctctgggatgatccccgagggcaggatccgggagtccctgcggaggcatcagcctgtctgtcttgatggtggagaggaggctccagctgggcgggaccaccaggggaggggcttgtgctctgctggctcagcctggtgtggacccacctcccgggcgctggctgcaatgactttctctttccctttgcaattgccttgggtcctgccgcacagagcggcctgtctttatcagaggtccctctgccagggggagggccccagagaaaaccagaaagagggtgagagactgaggaagataaagcgtcccagggcctcctacaccagcgcctgagcaggaagcgggaggggccatgactacgaggccctgggaggtcactttagggagggctgtcctaaaaccagaagcttggagcagaaagtgaaaccctggtgctccagacaaagatcttagtcgggactagccggccaaggatgaagcctcacttcaggtaccgctgcccgctctacccactgggcccctctgctgccccttcttgcctggtggctctgctgggcgtcagccctggccttcccctgccccagccccagccctgggctccctcccctctgactcccctgcaccccctactcccagccaggctccttgccctgctgtgttgtcgccccactgctgcttctgaatgggccgcctcccccatctgtcccagcccaggtcccctgctgagactctcccctgaaagtcatggctggggtggtgctcccggccctgggagggtgctccctctgtgtgcttcccgccattcctgaactctggaactgggagaattgaaccaaaggatgagtagagcaaggtggaattttgttcacagggctttgatggattttctgtaagatttactttgcttaaataccaagtcttaggagagggtgtggggagggaatggtctctgaagcacaggataaatcatgtcttccaaggatgtctccactgtgggcagaggaggatgcagatgaccccaaacacacgctcctcctccactatcagcattcactgtttataaatgacaccagtaacatggaatatagtggccgggtgcggtggctcacacctgtcatcccagcactttgggaggctgaggtgggcggatcgcctgcggtcaggagttcaagaccagcctgaccagcatggataaaccctgtctctactaaaaatgcaaaattagctgggtgtggtggcgggcgcctgtaatcgcagctacttgggagtctgagacaggagaatccattgaacccaggaggcggagtttgcagtgagctgaggtcgccccattgcactccagcctgggcaacaagagcaaaacttcgtcttgaaagaaaaaaaaacaaaaacaaaagaaaaaacatggaatatatgggaaaaaaactcaatgatcaggaggaatgttgttattttaaaatttagtaagaagagagcccggtccccaatggctgcctcctgcagggccagtgatacagagactggacagggctggcctggaaaggggcccccactccatttgtccccagctctgtggcctgggcaggttaccccgcctctctgcgcgtctggcccctcctctgtaagacgggaatggcccctgccagcctagggcagcctcacatgagctcacccccgcgcagcacttagaagactggcctgggcctcagaattcggttctaccatgatttaacaataataatatacagaggtgaaatgtcaggaaggaactgagctgaaaggttaaaagctgttattttggggtgaagagttttattctgtctctctctctctttttttttgagacggaatttcgctcttgtcgcccaggctggagtgtagtggcgcgatcttggctcactacagtctccgccgaaattctcaggggaggggagggatgggggaggcctagagccgtccagggggctgtgtttagtggacatcagcccggagggcccccaggagtgctctctacattggctggtttctctcttgtgtcttcagaaacacagtggagcgaatgtatcgagacacattctcctacaacttttataatagacccatcctttctcgtcggaataccgtctggctgtgctacgaagtgaaaacaaagggtccctcaaggccccctttggacgcaaagatctttcgaggccaggtaccacccggactccaatcactttgcaggcaggagctaagccagctgggaaagcaaaccacgcactgataagtgaagtgcccggcggcgggctatccagtgtgtccttctctcccacactttccaagtccgtggccctgaccttcctgctggaccgtcctgggatcggatcgtggagggggtttgcctctgcacaaaaggccttgtgtttccgtttttcttttcttttcttttttcttttttttttttgagacagagtttcactcttgttgctcaggctggagtgcaatgacgcgatctcggctcacagcaacctctgcctcctgggttcaagcgatgctgtcgcctcagactcgcaagtagctgcgattacaggtgcccaccaccacgcccagctgattttttttttgtatttttagtacagatggggtttcaccatattcaccaggctggtctcgaacttctgacctcaggtgatccacctgcctcggcctcccaaagtgttgggattacaggtgtgagccacagcgccggcctaattttaatatttaattaatccaatgtggctaacatattacttcaacattaattaacataaaattcttgacaagataatgaagtttctttttcttgtcacaccgagtctttgaaatgagctgcgtgggtcacgtacagtgggtggctcgcacctctaatcccagcactttgggaggccaaggcgggcagatcacctgaagttagatattcaaaaccggcctgggcaacatggtgaaatcccatctctactaaaaatacaaaaaaaaaaaaaattagccaggcatggtggcagtcacctgtaatcccagctactcgggaggctgaggcaggagaaccgcttgatcccatgaggcagaggttgtagtgagccaagattgcatccttgcattccagcctgggcaacaagagcgaaactccatctcaaaaaaaaaaaaagaaatgagtggtgtatttttcaggtgcccaggtctctaatcagagccccatttcaagtactcagtagtcccttggccatgtcaccccccccgacatggacagtgcaggtccagtgggctccccactgactgcaggcagggaacaaggcagaccctagagggccaggccacagtaggggctgaggatgtctggtgaatggatgcctgggagaatggatgctagaattcacacacgaggccatgaacagggctgggaaaacttccaaactcagggaagcacgtgtcttggtgcaccttgtgatgcttcaacagcaggactgagatggggacatttacaatgaacagaaatgtatgggctcgagttctggactctgggaagtcccctgtcaatgcaccagcaactttccagggcctgcgagctgcacagtcacgtgggggtgaaggttgttgccagaagctcaggggatgctccagacagagtggcctgggatgtcgagtcactgctgctccgtgacatgggggcaagaggaagcagtttagtctgacatactgcccccccagctagagggcaagagacagaaagaggggctgaagtcgcccttgaataaccacagcagtggcacccacaaaggtgcagttcccacagcctcatagctgcttgtaggtgccacctcttaaggccattaccatagcaattaatactgaacatgagctttggagcagacaaacactcaaaccgaacagggggatggaggaaaggagcttcaatggcaagatctcctggactcctgtcctggcccctcctccccctgccccacccctgctctcctcctgctccccctctcagagcttgccctgaccctgctcctctcccaggtgtattccgaacttaagtaccacccagagatgagattcttccactggttcagcaagtggaggaagctgcatcgtgaccaggagtatgaggtcacctggtacatatcctggagcccctgcacaaagtgtacaagggatatggccacgttcctggccgaggacccgaaggttaccctgaccatctttgttgcccgcctctactacttctgggacccagattaccaggaggcgcttcgcagcctgtgtcagaaaagagacggtccgcgtgccaccatgaagatcatgaattatgacggtgagaagtgggaggttcaggggtgtgggagagactgcttaagtgtctgtgatgggtccttcccacacatacctgtgggtctgctctgatgcctgcaaaggccaagtgtcccaggggagcctgtggggttgggtctggcgctgactgtaactagtatctagaatatgtctgggaggggagggtcccgaggtcacagaagagaggccagctgggcttgactgcgttctctcttctttttcttagaatttcagcactgttggagcaagttcgtgtacagccaaagagagctatttgagccttggaataatctgcctaaatattatatattactgcacatcatgctgggggagattctcaggtgagggtctccctccaggctcatcgcctcgctcctctcacctcctgctcatcctcttgaggcctcccctctgttccagaccaggtcctctcctggccaggccctcctgccttccctcctgccccctgcctgccctcgtggttacactccctcacccacactcctcgtgctccctccacctccctgcctcccacctgctttcctgggcccttcctgtgagtgagaggccccttctgcctccagagcaacctccatccacccccacagcctgggagccccaacctggccccttccatctccctggcataaccgaatttgtcgtaaaactggacgtagtaagtgggcatgaatagtcacaagcccggcagtcagaagctttgagcaacatccttaaaggccaacctgagcccctgagaaggagctgcctccatggaaacagagcttcaggcttcggctgccatagaagatggccgggctgggtgcccacagggcaggcatttattttctcacacatctggaggctgcaagtccaaggtggaggggtgggcggggttgtgtcttctgcagtcgctcctcctggctggcagggggtcccttccggccctgtcctctctggcctttcctctgtgcacctgcactcgtggggtctctctgcctccaaatgtcctcctcgtttatggaccccagtcatgtgaatttgggcccacactgaaggtctcatttaagttaatcatctgatgaaaggacctgtctccaggccaggtgcagaggctcatgcctgtaatcccagcactttgggagtccaaggcgggtggatcacctgaggtcaggagttcgacaccagcctggccaacatgttaaaaccccatctctaccaaaaatacaaaaattagccgggagtggtggtgggcgcctataattctagctactcggaaggctgaggcaggagaatcgcttgaacccgggaggcggaggttgcggtgagcccagactgcgccgctgcactccagcctgggcaaaaaagcgaaacttcttctcaaacaaacaaacaagaaagaaaggacctgtttccaaatacagccaccctttgagggagcgggggttaaggcttcaatacattgattttggggagaaacagtgaaggccacggcaagaagctgcagtcattgtgggcgggcctgggtggggagtgcaggggttcctgtcctgtgtgtctgtttcccaggggagtcctgacctgactctcacagcccctccacccagatgttcctgtgtgcttcacccaccccattccttctgcacccaacactcctgagcccctccttagctcccccgacaggctcccctgctcccccactcccgggctgctcctcttctcagcctctctctgggcctctctggggtccggacatgacccctcagctgatgcctgtggcttccccagccagaatcttcccagttccaggctgggctctgcagagtcctatcaaaggtggcatcctcccctctgtccactccagggtgaagatctggtgtttctggtttggaaatgcctctgcactgggtgctaataattcacttttacctttataattgtggttttgtaaggacaggtatttttggcaacagaagaaatcctgtgagttatttaaaaaaaaacaaaaaaactccctggcaggctcttctccccgctggtcccgctcaggagtgtctctgccctgatgctgggtgtggcaagagttaaccctgtaggcaggaggggtgccccagtgggtccacctccagcaaggactgagagcgagcagagccaggactggggtctatggtgaggccagggaagaagacccagctgtaccccagggagagggcctgagcacactgagctgaccctggggagaccctgacaaggcttagacaggccccagggctgccgtgatctcccagtgagccccagaaggggtcagagggggaggtttggaggctctagcaagtgagtgggagccccttctgacaggtgctaagggatgtggggagccgggggaaggaaggagggtggggtgcaagggaggaagcgtggagagggagggggaggtgggacagaccaggagggctcttactcctctgggcttttcccccactttccagacactcgatggatccacccacattcactttcaactttaacaatgaaccttgggtcagaggacggcatgagacttacctgtgttatgaggtggagcgcatgcacaatgacacctgggtcctgctgaaccagcgcaggggctttctatgcaaccaggtgaccaacccagccacccgcatccaggcagggccctcccaacccagggacacccatgggcagaaggttctgggtggtacctgtggtgtcctgcagagtgtctgtcacctgtgcttcctgtagctgctgctgcttggccctggggttgggggagacttcggcttcagtgactctccaggattggtggcttccagccccacacgcctaaccagccacatgtctcaggggctaacaccactagtccagagtcacccccaggtccaggtctcagccgtccccactcctgctgtgctctgagagggtcagggcagaggaaaagggtctgcaccagggccaagtgggatcaaagaaaaagcgcttccggccgggcacggtggctcatgcctgtaatcccagcactttgggaggccgaggctggcgatcacaaggtcaggagatcaagaccatcctggctaacacggtgaaaccccatctctattaaaaatacaaaaaattagccaggtgtggtggcaggcgcctgtagtcccagctattcaggagactgaggcaggagaatggcatgaacctgggaggcagagcttgcagtgagccaagatcgtgccactgcactccacctgggcaacagagcgagactccgtctcaagaaaaaaaaaaaaagtgcttcctgaggaccctcccaggatcccctcacagacacagctcccaccaggaatgattcagaactgtgggatttgaggatcagggcctacctgacctcacaaggccaggattccccagtgcctgctcctgggcttcatcctgcgggaaaagagactgaggcaggagaggccgaccagggattctgtcctgaccaggatggagcccacagcaaggccagaacaggccccaagtcaggatgcagggatggccagcatttgaagaagagctgggccaggccaggccgaggggccctgagcccgagggacgttcttccctcgcccttgcccagcacagcccctggctggagaggccaaattctgcttggctctggtgctggaaacggggttcctctgggctctatgagcttaatatgggccctgctgggcccacacacactgcttggaagctactttcaaaggcaccggtccccatcactgtctaaccagtgggatgggactcccccaggaatgacccacagccccttctcagcacaaatcgtgtcatccattctaccccgagtcctctctgcactggactcctgggcttgactagttcccagtcgaaatttggacaaaacaccatcattccttgggctcaacaaggacaatcaccccatgactggggcccttcccaatgtggggttagtcctgctgggggcccctcatccccacttctccctgcaaagggagccctctggcctcagtctatgtcactcgtgggcttaatacagggtaaagcacaatgtggaagctt

SEQ ID NO: 1100 - DNA, 64356 bp, Homo sapiens
  Genbank Accession No. AL031058
gatcagtgaagacagaaatctggacgtttttcttattctttagtctcccgtatacctacacctctatctgtagcagggaaacaatgtatgtgcaataactagctcatgatgataagaaacaaatggtttatgaaatttgttgttgctgatgcctaagattttgaaaggtggtcactttggaaaccaggttacatttcgttggcattacaatcatccaaagtcagatcatttatgtcttagtgtccattttgatttcatgatgtttagtatatgaatctctaatttcattttttcttaacaatggaagctacattcaaacaaaacaaaacaaaacaaaacatgcaaatacatgcactgtaatttgaggacaccaagaaaatcaccacagctttgggaatacaactaaaaaaaataagagtagctggatgtgggaagatcacttgagcccaggagtttgaagccagcctgggcaacatagtgagatctctaaaaatagataataaataaataaattcattaattcaataataactgtaatgcattttggtgtgacttctgcaaagcaggcttattactctagtggaggaaaataacaattgaggttgggtgtagtggctcatgcttgtaaactcagcactttggaaggctgaggcaggaggatcacttgaggccaggagttcaagacccgcttgggcaacatagtgagacctcacctctaccaataataaaaaaattagctggatgtggtggcacatgtctgtggtcccacctactcaggaggctaggtgggggaatcgcttgagcctagacagttagggtgtagtgaatccggattgccccattgaactccagcctgggcaacagagcaagaccctgtctccggaaaaaaagtaagaaaataacaattgatgggataatttcttggtttcaagttgataccaaatcattgctcagaaatgtgttctttcatgactgatgggacaggaattttgacataatggaaagggcatgagactagaaacagatggaattctgctattttaggtatcaagtaactcacggacgtttcttaacttctccaggactcactattttctctttattaaaaggtgagttctggtttatatagtgcttacattggggacatgctttcctggacagagcacgtgtggtccaggtgcagcgggtgggaagtgtcctacaaccactctggcaccaccatgatctgtttccactggtggccatgctcagggggtttcatttggagaatgagttctgaggctttaccagtttttaaataactggtgcaaaaatgttttaagcaagcttctgtttctgaaattctctatggaatataaatgttgagtgccttcagtaaaggatgattagctattcaaaagtttcttcacgtaaccattagcacattatatctccatgtggtgtttgctgataactgggtttactagcaataatctgcatcttgcatttgtatatatataagtttgagtaagtgttccaatcctagcatgttctatagattgagagtccctcacaatcatgataagcttagaaaattacttccaaagtattttcaaaaggtaaacttacttggctgttgtattatatttattgactgtgtggcttacccactaaagtaagtgggagttattgtttagctttagatgtcacttggccatgggtgtgagtggctcctctgtggtccatagcggtacttgccctcaccgggaactttaacctccagcctcgcatcttgcaaatctgggtgctacatgaaaacaggatcaggcaggaaagtatggatgaatccccaatatccatgctatccaatgaaaagcagtcaaaaacttactctattttttttctttttggagacagggtttcactctgtcacccaggctggagtgcaatcgctcaatcttggctcaccgcagcctcgacctcctaggctcaagcgatcttcccactctagtctccccagtagctggtgtatacggccatgccaggctaagttttgtattttgtatttttgtaggaagggggtctaactatattgcccaggctggtctcaaactcctgggctcaagttatcctcctgcttcggcttcccaaagtgctgagcttacaggcatgagccaccgtgcccggcccaaaaaacatattcttaaagcacaatggatagcacaatttacctgtgccaaacacaaaccaaatggcaacaacaataacaataaaaactcatcacttcagtgacaaaaaatgagaagttcctttgagctatttaatttccacaaagttaagtaccctcccccagcaaaaatgaaaaatcactgcaaacagacaaactcccctgttcctgaatgacacttaaaccaagtaaaccaaagatagtttggggttaatgtatatattttacaaacattttcctatttttgaaacgagctttgtcaaacagctttcttcattttgacaattttaattaggagagaccaatcttatttttgtgataattcagatcctagattcattatttctggaggattctaatttattcagacaaatggaagagaaaagaaagagtaaaatatacatatccattttattattaagattttaattgtctgacattttaacaggcattttcttttccttcacattatggttccaatcctagcttctgcctgtaattttgacttattaaaatactactccttggccgggcactgtggttcatgccggtaatcccagcactttgggaggccaaggtgggtggattgctcgagcccaggagttccagatcagcttgggcaacaaggtgaaatcctgtatctacaaaaaatacaaaaattagtccagtgtggtggtgtgcgcctatagtctcagctactggggaggctgaggcaggaggatgacttgagctcagaaggcagaggttgtagtgagccaagatcatgccactgcactccaggctgggcgacaagtgtgagactctgtctcaaacaaaacaaaacaaaacaaaaaccccagaactactcctctgttaggcagaacagttattttaactcatgggctataaatcttcttgtgatgaagaggtatcatttaccaacacaaagatatagagagttcccatgggattttgagcaagtaaatgattcttcttaatctcactgaaatcaaagtgtcgttttcttttaaaaatctgctctgaatatgactgattcgtctttcctaactgcaaggtgatttctaaggtcagccagagagaaagttgcctgtcagtgatctgttttatcagtacaaggggagctatctatgagtggcagggaaaaaatagctgaccttaggtcagccagtgaagactctgccagactttggattctgattttttaaaccaagttgtaagaaaacaagctacttttaaacctctttgctgcgctttcaaaattctataaatataccttcattatagcatacttaatgttgtattgtaattatttgttttactactgcagactttgatatcctgcagaaaaagagtcatgctttattcatcttcatgtgtctagcattgaatctgttgtgtaacatggtagatgttcaataactgctttctaaatgaatgcatcttaaatgtgtccaagagggaggtttactgatttacatgtgggataaagacaggaacattaacggttaaaatttcgcatccagcaaagaacttttggcttaacaggtggtaccttaagctttatatgtttcacagtgttcaagaatgttcacgtattttatctcatttgaccctcactgtggatttggaaggttggcagagcaagtgttatttccattatacacatgaagaaattgagctcttgcataagtaaattgtagcactaagattataactatgggcaagttatcctcgctcttcactgtgtgatgagccaacctggacaactgatgtgtgtgtgtgtgtatgtgcatgtgtgtgggtgtgtgttgaggtggggggtgttccatctgtcgggcatgtcaatctgtttattttatcctcttatctttctttatcacccttagagaaagataaatgaaagccactgtcttcctagagcaggcatgtttggtagctggaagccgttcgtgttcttggggatgcctggaaaagcccaggaagcagtaagatgggtgaggaagcaacgcagccagaggtgtgattggtggcgtgggctcttcgcctcctcctctgttttgcctgcagattgaacagttttgtgagtctgggtggtgtttgggtctgtgtggagcctggttcctatgaccgtaaggggacccttggctaacaagagcttttgttaccactgggggggtggttaatagatatgtgggttttttttaaaaggataattctaccgtgcaattgtgtagcctctttattacacattagggaagaataatccctgaattttttttttttttttttttttgagacagagtcttgctctgttacctgggctgcagtgcaatgacacgatctctgctcaatataatctccacctcctggattcaagtgatactcgtgcctttgcctcccaaacagctaggattacaggcgcctgccaccacacccagctaatttttgtatttttagtagagatggggtttcatcatgttggccaggctggtctcgaactcctgacctcaagtgatccacccgcctctgcctcccaaagtgctgggattacaggcatgagccaccgcacgggcccctgaatttcttaaatcaaagttttactataatatatttaagggcagtgactggaccctatttatctttgtatgttgcagagtatttccatatcctaggttataattatttgctgaacaaatgagatgcatagagggaaaacatcctaaatgaaatgttgtacattatgcactgacattttccctccatgcatgtctttctctcctccaccaatggatattatgggctgtttgtgcagaggctgacttccagccattgattctgtttgagaaaaaccaccgtcttgtctatagatcagtgtttgtacaggttgagcatccctaatctgaaaatctgaaatccaaaatgctcccaaatccaaactttctgagcactgacatgatgaccacaagtggcgaattccacacctgacctcatgtgatgacttgcagtcaaagtgcagtcaaaactttgtttcatgcacaaaattatctaaaatattgtataaaattaccttcaggccatgtgtataaggcatatagaaaacataaataaatttcatgtttaggcttgagttccatccccaaagatctctcgttacgtctatgcaactattgcaaaatccaagaaaatccagaatccaaaatatttctggtcccaagcattttggataaggggtactcaatctgtataatcatttaaacacttgaccactttggttttattaaagattcgaggaaattgagactacgatgcaaattattggttgtgctaacagtgataaacttttatctcattatatgtgtttactccttgaatttaagacgttcagctgtaaaaagaaaaagaacaagacattttgtcaaaaattatgcctaaagggtcaagttgtcatgagaagtgctataatacgacaaattttagaaagtcccccccactccctttacaacataaaaatgtagttttttatttttgttttcagttcataaacattttggaaacgcactgtatcagaaggtaattagcggcattgtttggaaagatgaaaaatttattagaaaagatctttaaatggcttttactaaagcgtcatttaacaatttttcatattatagaaacagcttttcatggatggtgtgactgggtctgtatccaaacccggttcggttcctggagccaacggcgtagttaacactcagcctcttgcagttaacactcagcctcttaactgggagtggccctggagcaagtcgctggaatgttcaagctccgcgtcactcatcggtaccaagttgatgatctctgcctagggttcttcgccaccctcaggctcaagtcccaggaggcctcctccgctgacttgggtgaacagctctgagttccggagagggttcggtctgcggagaagcgcgcgagagacaagcatcctcaaggttctggtacaaaatttggaaaatggacctggcgttgaaatctttactcctcgtttaaaaagaccatcgaaagggaaaaaataaaagaaattgcagtttatatttttgttatcccatgaaaaattagctgcagtgttttcctcttcatgccaaagagattaatatttacggtgaagacttttccaggaagtcgtggttttctgtaaaaaaaggttttacacatcagaaatcggacttctggggcaatttcctgaattcctggaataaaacaaaacaaaaaaaagcccccaaacaaaactctatcatctaaagcgttccctcctcactgtggtcctagtcaatgcgtggtaggtagcgtttccagtgatcaacaaaagtaaatatttgaccagtaagtctccaatcgagaggcccctccattccagctatttccgcccggggaccgaggaaatcctcaaaagccgggccacgcattcccagcccgagaggccccagcgcagagcgcagcagcccccgcgagcgcaggtcctccccgcggtggcttcgcccagggcgcttgggtctcggggaccccgcccccgccccgcccggtgttactcaggcctcggtggcgcagggcggagtcgcgggcggcgggcgcaggtggggaggggcggccggagcgcgtcggtgacacccgcgggggggcggggaaggcgcggcggccgcaccccaccctgggaagaaaccggccaggtgtggcctaggcgcccagtgccagcggggaggagactcgctccgccgccgaccaacaccaacacccagctccgacgcagctcctctgcgcccttgccgccctccgagccacagctttcctcccgctcctgcccccggcccgtcgccgtctccgcgctcgcagcggcctcgggagggcccaggtagcgagcagcgacctcgcgagccttccgcactcccgcccggttccccggccgtccgcctatccttggccccctccgctttctccgcgccggcccgcctcgcttatgcctcggcgctgagccgctctcccgattgcccgccgacatgagctgcaacggaggctcccacccgcggatcaacactctgggccgcatgatccgcgccgagtctggcccggacctgcgctacgaggtgaccagcggcggcgggggcaccagcaggatgtactattctcggcgcggcgtgatcaccgaccagaactcggacggctactggtgggtacctgcccggagagcgcgggctgcggggctcgcgggacagggagggaccgtcctcctctggacgactgggagactcgggtcccgaaggtggaaaggtttttttgccccaggtcccgaaagaacttcccggccgcgctgggagcaggaccgggtgtcctgacgcgtgcggggacaggttggcccctgtcctgcgaacagggactcggtcgtacctttctcccctcccgcgagcccgggcgggtggtcagagggggcgtcgggcccgcgcggggctgtcccctgcctgctggacacggctgcagccgcctttgtcccagcccgcgaatgggaggtcaggcgaggtggggctgcgaccacaaaacccaacctctccaaccgtaatcaaagtaaaagaggaaaggagcggggccccggtcctgtctggtggccgagtggtgctcggggctccgcagtctctaccggctcacccccaatccccagtaaccccgagaccacgactgcaacgactcctggactcctcggccacccaaggacgtttgtatcaaggctgcgcgtcccggcggcgcggggtcctgtcccgaggaggcgcttcggcttcccctgtccgggaaacgaaacttccccgccggggcggctgccgggcccgggtctcgaagttcggccgggacgtgcctgttaccttcggtcgtccgcgccgcagcccccgcgggcgagcgcacctggggccctgcctctgagccttttgtttcctcctttttaaaaacaccggatgaaagaccccagtgtgccttggatcgcagagcgccggccgcatgtctgctttgatccagaatgtgtgggcaggggagtgggggggtgggagaggacgacgctgggggcccgccctggcctaggcgccccgggaagaccccccggtgagagggtcagcttctccggatcccagcggaaacagaccgagggcgtcatttgggtgggtggggaagagatcctgtccctgctttgaccgggtctcgggagctggactctagatgcccacgtgagccgtgcgcgttttgcagcccgccccacctccccgccccctgctagttgttcccacgtcgggcttttgggaaagaggccctgagcgccgggacgttatttaccaggcgttgtggccctaggcctgggaggagcaacctgaatgcgctccagggagttttgttttgcaagcagttttgaaggcagggactactcgagttgcaacctgttttctgcttagattcatttatttatttatggggcatcctgaaaatctattttcgcttttttttttttttttttttttgagttagcaaagaattgtctcaatcttggagttctttgtttcctgaacaaaatgtgtctggggatttccagggaaaatgtgccaagcaatagaaggaatgaaaacttgggttttcattacatttgttttaaaattttgccagccatttaaatctgaaatttaaattttctcccgcagtcctccaggatttgagatgcacatcctttaaatgtgtgggttacacacagtttaaatccaagtcagaatagaatgcgaaggactctttagtagctctttttggcgttttcatgaaccaagtatttattttgattattatttataactatgcttttgctagcttggatttcttatcttttaaatagacaataatcagtactattaatcgaatatttcactcccttggcttcttataccttttgtaggggagtaaaactttaataaattaagtggttaatgaactgcatcaaggtacatgttttattaggattccccattgaaacatttaattttgggcaggctccatgttttttccttgtgtagtatcatcccgtgctctgtttttccaacttaaagcctacttacaaacttgtcaagtctcacatctctctgggaaggggaaagagacccaagtgaaaaattacctgactttgaggaaggatgttttttcttctcattaatgttgctctgcccggcagcagggcgtcaagctcagggcttgagtcgggaggcggtcattctttccggggatcctggcaatggaggttcctctcgagcctgacccagcctgcagtggtgctactgactacaaaatagcccacaaatgctgacttctgcgttttcaaataatagcgaccgcctgaaggcagggcatgtcgcagtttttctggtggcattctggttttgtgtggagggatatgtttggctgtggcgtgcactttgtagaagcagggtgccctctgtgcccaagggagccactgctctctgctaagtgaatgatgattaagaatttcataagtatttttctgacccgaaggttttctaaataaaggtttttgtggttttcttttctttctttctttttttttttttagcatgaaaactagtataaaaactattggttgactttaaactcatttatttcaaaaactgctactttatggctgaattattaatagattggtgatttttgagatgagtgttttgtatctagcccttccctgaataaagaaatttgaatgtgtggagggcccaactcttagttttcctttgaaaatgactttaaaacatctctctctctctctgtcctttccacgaacagcacttacccgtttttaggacagtattagatctcattgtatcctaattccctctttttcccccgaccacctgcctgttctttgtgtctttgttttagattgaatggaatctgcaactacttaattttgttaacatttggtaaatgttacaaccttgataatgaaataatagacatgtacatgttttgaaatgtaaattttggattcttcttggataggacattatattaatactgttttcaattacagcagaattactctagtcttattcctgtcattaaaacaaattataaatagtgaaatttgttaccaaagtaacaaagtctcacagttagatctttctttcacccatcaaagggtgaatttgtgggaggattaaaagcagaaaatagtcattaagtttcagaaatatgtggttataatattaatgcttatttttcttcagatctcatgatttcaaaactgagatacgtgtgatcattatttcatatacattttaaagttagtcttaaattaggttttaagagaagcttatttcttactatgagacaaacaggtcaatttgcctgaattttagagcggggggacccctaaggatcacttagcctaggcagaaaccccacacgcacacttcagagacaggaagctgaggacgtgccgaagatcctagaatccacttagggctgggttggcctgaggacccaaggatcctcaccttggttttccctgtgccttcacagcctgacttttagaatggacaggcctgtaattacaccatgcaagtatctcaaattccattaattccttaattcagcaagtatttaccgagcattgactgcattctgtgttaagtgtcaggggagatcaaggtggaaatctatagccttgaaaggagtgtaggcccttccaaggaagataagtacacgaagactagcacgcaaaagcggaatgcacaggaggggtgtacgtgacttcagagacttcacaaggaggtgagagaacatctgtcgtgggggcactgggaagactttataaaggaagtggtgtcgaactagactttggagtatttcagctgtgtcaggatgggtgggcagagagccttccagagggagagaagagcatgagaaaagtctgcgaagcctgtggagtgatctccttttagagcattctctctgagcagggaggcagtaagatgaaaggaagaagcatccttttttgaccaaggcattggagaccttgaatgccccggagagggatttggataggcagagggaagctggtgcaggttttcactgaagccattgaaagtctcctccattggaggagcagggaagtgagacgatcataactgagcttctggactgtttaggcgttggcttaaggaagccattgcaccagtgaaggagggagggaatgaaagtctgaaccagggtgagggcagtggatggaaaagtaggtattgccaaggtggagtgacagcttcagctaagaattggatgcgagagacaagggagagtctgagaaaacaggcccagagctcgagtgactcatagcgtagatagtctaaacacttttctgggaaattattgcaaagcaagatttagtttagcttaatatacggcaggtaacatttacatggttattaaatttaacttgtatattttataaaaatatcaggtctgtggttaataatagttaccattacccagcaaatacctgtgatgtgccttgtataggatgtttgttatctcaagcctcataacaaacttcccagtttacagatgggaagctgaggttaaaatatttaaatggcttgcctaaggtcacacagctagttaagttgttaagctagatttgaatccagtataccacaatgacgcaagagaagattaaacctgcagtgtgagaattcaccttttctacttgtaaacccttttctatctgagttattacttatttttaatctgttgaattcctcagtctgcgttcctgtgaaatatttcataatcattgtattctttcattaatactcttgtagagtttctatctgcttaggaaaaaagaaactcaatttgattctgcattaagccaactaattgttagtcagatctatttaatgggacaatacagctttcaacagtcatttttttctctaaatatgggcataatttcattgttcaggtaatggaagtgtcttggaaagggaaaaactgctgatgcccctgatgcctcagtgctgacttcttagggtggagcaaaggagggcttgggtgtgagacttggagagtgtgtcttgactctcagctaaccagtctttccagaccaggaggttctagaaggagtggtttcagtctggaggccttgttgctgcagctgggagcagtgcctcaccccttgattttctccatctccctcccgctgggctggtcccagtggccctgccgcttgaaaacgttcagatgtggttctgattttgaagtcacggccccacagatcctaagactcagacatgagctgctcatttgaggtgacatcttgtaaaatactagtgcagtccaataatttatggctcaccaccgacaccttgggctggaagggctcatgaatgtgaaatctacatttcatgaaaatgaagacagtttagtgagaagctgcagcaaacagatcaaaggttctgcttggaattacattttgtttgtttgtttgtttgttttgagatggggtgttgctctgtggctcaggctggagtgcagtggcatgatcatagctcactgcagtcttgaccactcaggcttaagtgactctcccacctcagcctctcgagtagcttgggaccacaggcgtgcgccaccatacacaactaattaaaattttttttttttttttgtagagacaaggtctcgctatcttgcccaggctggtcttgaactcctgggctcaagtgatcctcccaccttggccttccaaagtgctagaattacaggcaagagccagtgcacctggcctttgaattttcttaccctcaataagtttctttcatgctgctaaagtgtatcactctctgtgaattgtctcagttatttttgagtcttgtagggaacctgaggaactcctgaaatgcctcacacttaatacccaatccatttcttccttttcctctttctcttttttttcttatcaccccgcctccattttgctgcaggacatccttaaagttatggactggggcaaagacaaaacacaaaaacgaaatttctgccgggcgcggtggctcacgcctgtaatccagcactttgggaggccgaggtgggcggatcacaaggtcaggagttccagcccagcctagccaatatggtgaaaccccgtctctactaaaaatacaaaaattagctgggcgtggtggcgggctcctgtagtcgcaactgctcaggaggctgaggcagaagaatcgcttgaacccgggaggcagaggttgcagcgagctgagatcatgccactgcactccagcctgggcaacagagcgagactccgtgaaaaaaaaaaagaaagaaagaaatttcagaaccataacaacagcagcagcctccgcaagtaagagctatcactaagtgaggtctccgcctctgcagtgcccctctgagcctcacctcagccccaggaggggggtgttctacctgtcacagaggcagaagctccaggcactgccagtggatgtcactttaagttgctcaaggtcacaggctgtataactggaagtggctgagctgggcgtggactccaactgtgccctacttcaaagtccttctgaagttaatgatatgtgatcagttttccactatcccacaaacacaatctgccaaacacacagtgtgaaaatcgagaaaaccgcctggaaaagaagcagaacttttattagagtactgtttctgtagctgctgggcgaagacaaaatgcaggatcaaaggaggctgtctttctaaaatctatagagacaaaaaatccaccatgtttgctcactgctggagtgggaatggggaggggagagctgtgctctctggttgagcttttgaaatcagggtaatgagatgagccataataccctcagatgggtcttttgtttgcctttgtttttcttccactttactaagccaaacaaacattcattaagtaccttctgtgtgccgaaccttatttatgttgttaggttaagtgtttgtaggagtccaagatgactaagacatgggactttgctctccaggagcaggtagccaggtgtgtttaaactaatgcaagagaggagaggatgcagaggtgtgatatggaaaactccttgcagaaggctgtaacttttgaagttctgaacttttgaaggatggctaacacagcatttcagctgatgtatatagagagtgtttaatgaattttttttttttttgagacggagttttgctcttgttgcccaggctggagggcaatggcgcgatctcggctcactgcaacctccacctcccaggttcaagcgattctcctgcttcagcctcctgagtagctgggattacaggcatgcgccaccacgccaggctaattttgtatttttagtagagacggggtttctccatgttggtcaggctggtctggaactcccgacctcaggtgatcctcccgcctcagcctcctgaagtgttgggattacaggcgtgagccaccgtacccggctagtgaatcttagaggtaaagtatcatccttaaatgaagtattaaaaatatatttttctttttatgaaagatcctttcaagaaactcaaacaaaatagtatatgtgaaaaatgctttgaaaattataaagagctaagcaaataggcctcacggtcaatattaaagcattatataactatcataattcctaacacacatttcctgagtttttcctaggtaattattctgtgaacctgaaaacagagagacatatgagtctttctggcatatgtacaagagcctgtgttgactgaatgaacaaaagaagaggagagagaggaagggagagatggaaagaggaaggaaggaaaggagtccagttagagagaaaatatataaacaaaaagaaaggcaaagttagggggcatggtccaagtgtctaatgagcaacatagttattataaaagtatttttataaaacaaagagagtaactcttcatttaaaaactttgtttttgcctataatgtccctctttgaaatatttgtcttgtttttttgtgttttttctttatctttttgaaagtatgaactttttttcctttatctttctgaatatttttatttttttaagacaaggtcttgttctttcgcccaggttggagtgcagtggtgcaatctcggctcactgcagcctctgcctcccaggttcaaccatctcatctcagcctcccatctcagcctcccgagtagctgggacttacaggcgtgtgccttcatgcccagctgttttgtttttgtttttttttctgtagagatggggtttcgccatgttgcccaggctgatcttaaactcctgggttcaagcaatccggcggcctctgcctcccaaagtgctgggattacaggcatgagccacggcacccaaccttgtcttgtatttttaaaaataatatttttggcaacacatgtaaagctaatgccttaggacagctagttttggagtcctatttttaaagaaaaatgtttttttaaaggtagtaaaataaaaccttgaaatcttggtaatattgttcacatattcatgtggtccgtctttggattagaatccagaacttgttttctttttaaccaccgatgaagggctctctatgcaaatatttggaatccttacttgtttaaacaagttttaggatgaacttaaaaaaaaagtatgtgcaggtaggttctttgtaatatgactcatttatctctcagaagagttaaaaacttttaaggatgagttatttttttcaagggcacctattaattttggtttggaagtcaatattcttttgataaatttgacccaaatgagttgttttctttttctttttttttttttaaaaaagcacatgacatctgccatcttctgtgccactgaaatgggatttaaaaatcgaacttcatggcttgttaatttaattcctaacatgatttgaaaatctttcaacccctaacacccatatgtagcagtattaaaaatttctttgagggtagggatttaaaaaaatgtgtatacgcttgtaagtacatcattttaaaattatttctttatccattatagaattttgcattttcccaaactgcactatatgaattaaatttaattcaattagcatgaataaatttatttaccatgaacttaacatagacatttgtattattttcagtaaggaagaatgagtttggtcatttcctaaaattgagttacagaatgaatgaggtgaagaaatcttacataccatttagcccaacagatggagatagaaatttctgagattaaaaaaaaatctaaaattgtgtagtcaataacatatatatatataatctgacttagaaaggtttgaattacagcttttaaaaaaatgcatgtttcctggctgggagtggtgcctcccatctgtaatcccagcactttgggaggccaaggcgggtggatcccttgaggtcaggagtttgagaccaggctggccaaaatttggtgaaaccctgtctctactaaaaatacaaaaattagctttgcgtggtggcagtgtgcctgtaatcccagctacttgggaggctgaggcagaagaatcacttgaacccaggatgtggaggttgcaatgagctgagattgtgccactgcactccagcctgggcgacagagtgagactccttctcaaaaaaaaaaaacaggcatgtttcctgaagcaagctctcctggctctcgtgctgaagaatccagtgctacacatacagctggtgtatgtctgacatcagactgacccgatgggtcgaaatcatttccgctgaacttcctccctgattaagtacagcgagttctgtgtggattcttcattgggctaagacaagcaaactgacctggcaaggtggattccctataccttagttggcctgagtctccctctatcttgttttgatggaccgagccattcacaaggtatatacctagttccttttctcgcctcggtctgtttccaaagggaattcttggccacacctaagactgaagttggattcttacagatgaaagatagaagtagaccttgttttaaggatcagacgcggtcttgaaaagttgtgtatatgatgaaatttcgttaatcagatcacacttcccaatagacaaataatgatatcaaagattctttatttcattgttccaacacttaagctttttattttttcaacccttcaaaggattagatttctgtgcattccccattcctatacagttgttaatttatttactaagatgctgtgcaaaacatgtaagttttttagtggatatcaggaacatatgagacagggcgcggtggctcacgcctgtaatcctaacactttgggaggccgaggtgggcagatcatttgaggtcaggagtttgagaccagcctgaccaacatggtgaaaccccatctctattaaaaatacaaaaaaaaaaaaatagctgggcgtggtggtgcatgcctgtagtcccagctactccagaggctgaggcaggagaatcacttgaacccaggaagtggaggttgcagtgagccgagatcatgccactgcactccagcctgggtgacagagcaagactccatctcggaaaaaaaaaaaaaaaaagaacatatggaaatggaaatcctttagaaaagcacgaagaatttatttggtattattagcagcatataaagttacctgttgtttttttttttttttaagttcaaatatgggtaggcaagggaaggcaggcaaggtgtcttctctttataggatgtcaactgatctctagagaaataggaatgtcttctaaaactagggggagggaattaaaaaacagagcaaacccaccaatgttttaagccaatgtttggttgccttacctcctttatcctggatgtaattcgtttctaactgtggtataactaatcagtctagttcttgggtaaaaagaagttggcaagttttatattttgtggtcaaatgaatttgatctcataaattcacttttaaaaatgtgtatgtacacttcggtgcgttcattcacaattgtgtttgtcctccctgtctctgttttttaatacattttaattctagaatagttttagatttgcagaaaagttacaaaatagtacaaagtttgtgtataccctcacccagtttcccatgcctccatcattttatttttttttaacagcggggttttatgctgtgttgcccaggctagtcttgaactcctgagctcaagcaatccttttgccttggcctcccaaagtgcggggattacaggcgtgccccaccctcatcttatagctcagtttgtgattgtttttacagtggcacacattattaaatcatttaggaaactctgactttccattgtgctaagagacaactctttcatttatctgcttgggactggcattctttgtgggaatcaccttcggagccaaattgctgaacagaatttcttaatgtttcagaataaaggtattcctatgccccttcaatgaagaaaataaagataattacacaggaccttcctaattttttaattcatcctagggttctaagtgaggttgctgggcttcttaatgttttcctttgtctcttgaatttctttcctctgtttgataacaggtacgttttggaaggtgttctaagtcagttggaattctgcacaagttaggacaacaaatgtgatcttgcttgtatctcagcagtatgagaaacggacctcatttcctgtataattcggagtggaagacagagactggttgcattggtggtgggtgggggcagtcttggtttcgagagctggatggctctggcaccacctcccctgggcctgcctggaggagcctgtgtcttcttctgggagtagttcccagggaggtctgggctcctcacccacattcatctagtcctggcttgttggggagccttgcctgcagggaggaaccccaaatgggtggccaaaaaagaaatgctttcccatggtgagacagtgcagccaggtgcttcgggagaattcccacattactgtgatcttatcccatctatgcataatgcaaccattgtttgtcaaacatttttttttaaacagtgaaattctttctttaaaacacacacacacacacacacacacacacacacacacacacacacccagttggttagacaggcatcagataaaagcaggctcaggctggccctggctgaaggtaggaagagccaacttcttgtagcacatccgtgaggacttttcacagacattaaataatcacttggtctgctttaaatctctctgaaaccaaactacagtaggctgtgctgtggcataatatatcttggtaaatttaaaagccagactttggttataccttgcttgaagagcaaatgaaactctgtcatctcgttctttaagatacagaccatctgcaacattttccgccaacaccaccgttgttttaaggtttctgctaggtgtcttccagaaaagtgcctcatttgaaatgtacattgaatgagcttcattgtagagaaaaataggtattctaggaacatcttgaaaggagaatgggtttgttttgcgataaagacaatgtatttaaattttccatcactttcttcacaccatgatttttaaaaaaaacattattgtcttttacaggaattacagaaaatatatatatatatttttacagacagggtctcactctgtcaccgaggcaagagtgcagtgctgtgatcatagctcactgtagcctccaactcgtgggctcaagtgatcctcccacctcagctgcctgagtagctagagctacaggcatgcatcaccatgtttggctaatttaaaaacaatcttttttttttttgtaagacagggtcttgctatgttgctcaggctggtctccaactcctagacttaatcagtctgcctgccttggcttcccaaagcactgggattacaggtgtgaaccactgtgtccggccaatatttttgtagagtaagcttttttctcctctcctacctttccttcagcccgacttgccagtgaaatcttcatgctctgtgtctgacaccatgaggtcttcctgcagagggacttgtggtgttggggactgtcattagggaccgctgtgggatgaagcaggagtgaagctgaaatagctgtgtgtcattgtcattgccagaagtgtgtttttataactcagagagatatatttctggattggatcctggacctgggaggggaaaacttgctgtgaatgacattattgggctaattggtgaaatctgaacaagttctataaattagaaaatcatttgtgtcaattgtaaattttctgcttctcatcattgtattgtggttatatataagtgaatgtttttattcttaggaatgatatgctaagatatttgggggttaaaaagccatgttctcaaatgattcagaaaaaaataatatgtatacatagataaatatatgctgaaatatttgggggtagaagggcatggttattctcaagtggttcagaaaaaataatatatacacacagataaatacacacacatctatggagaggggagaagggggataaaagaaacacaacaaaatgttaacaattgggattccgggtaaagggtctcacaggagtggttttgtcccgtttttgcaacttttgcaagtttgaaattatttcagaattgaaataggttatttgatgtctggtttctctgtgtttgcctccttagtcaaaccggcacgatgtccaggcaccagaaccagaacaccatccaggagctgctgcagaactgctccgactgcttgatgcgagcagagctcatcgtgcagcctgtaagctttccctgttcccatcgcttctcccaaagccttggccacacccgactgtcctctggttagcttctgctggccggggcctattcactgacctctttcacgtagtgtttagagacacgctttttcagaacagactacagagagatgtgtgtcttcttaacctatttgtaatgttggtttaacaatgagaaccagctttcagacagttccccgtccccctcccaacaaatgtttacactacagattgccacctttttggaaataaagcaatttatgatttacgtgactttttgatactttcccttctgagaaatgcaacctggcatgtttctgttcctgggttgggatggatcttcatgtgcaccatcaatttagtatgattttttttttcagagaaaatgactatattgagataacaattctatctgagaaacagaaaaatggggaaaaataggcaatggaaaattgaggagaaatggtaacatttctgagaaccttgcgatgtttcttaagataactgagacatcctaggatctcatcgaatccagattagaaatcatggagttcgtggtatttgctgtgtgaagtcttcattttaaaacactagcattcacctttgctccgagtttgctaaaaacagaatagagaatggtggggccgtagccatcttttctatccctttcctgagtcactgaatcttttcagcgaagtctccctaatgccgacactggtatcaaggttacatctggcatctgcctcttcacaaagtaccccttctaaatagcctacatttgaaacagattttaaccagatgaatttacgggctctgtttagataacattttaatattctaatttcttaatttagatattgtgtgggttctagttctgaatttcttcatccagttaaaaaaagaatgtcacgttagtccatgttcagagatatttggggctcagcaaactagcttggctccagttctagttgtttcgagtgtctgatttgaaacatactccttgaaatgttcctcgcagtggcccgattcctttacacaaaacaaaatagcagacaccagtgacttaatagtgaacatacacacacacacgtcatttgtagtgactatggatacgttttacatgtagctctgaaaattttgcatggcctcatgttctcagtttatttttgcttatatgcatcaacgtgcaataaataaaaacaggttagggaaatagtgtcatatttgctaacatttctgtttagagaaaagaggttcatttgactaaagccaagtaaaagcagcaaatataaaattccagagaaagatcagtaggtgttactgaagcagaggaggaagctttctgtttttgtttttctgaatacaaaagcctttttaaattttgaagtagttatagactcataagaagttgcaaaaatagtacaaaggggtctctacccagcacccagcttcgcccagtagtgacatcttatatgattatagcgcatcatcaaaaccaggacattgattggcccaatacagttaaccaggcagaagccttctttttaagaactaaaacgttggccaggcgtggtggctcacgcttgtaatcccagcactttgggaggccgaggcgggtgtatcacttgaggtcaggagttcaagaccagcctggccaatgtggtgaaaccctgtctctattaaaaatacaaaaattagcctggcgtggtggcacatgcctgtagtctcagctactcaggagcctgaggcaggagaatcacttgaatccaggaggcagaggttgcagtgagctgagatcgtgccactgcactctagcctgggcaacagagcaaggctctgtctcaaaaaaataaaaataaaaataaaaaaagaactaaaacattatgttctcataaggtataggaaaaactctgtgcataagaggccccatctgtaccactgtaccataatggtacagtgtccttgtcacaatgagattcccattatatgagacttgtgtgtaaatatgaaagatcagcatttaacatactgaagcaaggggaaggttagcattcagcaaatgtgactttaaaagccaagtgcaaatttaaaagacagtccacaaactttggttcatgaatctccgtctgtttaccttcttatctcaataagatcattttcactggcgaaacttacagtttttgtcatgtttacagtggaagctcttgcttccattaatgcccatgaaggttttcttcctggtagtatgtgttttccttcatgtgagtgttttctttcaggaattgaagtatggagatggaatacaactgactcggagtcgagaattggatgagtgttttgcccaggccaatgaccaaatggaaatcctcgacagcttgatcagagagatgcggcagatgggccagccctgtgatgcttaccagaaaaggtattgtccacagagcatggatcgggcagtccccatgaaaaagaacaccacataaccagttacactcaattccatgacccagggcttcctttgaaggcagcacaaatgttcccaaggaaaggtttgcttacttggtattttgcaactttattatgtatctctaatacaaagtgaccatttcattataggtgttaactgtacctccctttagaggacagaaagccctttggcatggcatttgactttttttttttttttttttttttttgagacagggtctcgctctgtcacccaggctggagtgcagtggcacaaatgtggctcgccgcagcctcaacctcctgggctcaagcaatcctcccacttcagcctatcaagtagttgggctatcggcatgtgccatacctagcaaattaaaaaaaaattttttgtggagacagggttttgccatgttgcttaggctgatctcgaagtcctaggctcaagcaatcctccgtcttgtgcttcccaaagtgctgggattacaggtgtgaatcacttaagggtctaatatcaagtcaagcttagtttaataaatataaaaatgagacccttagagttggaaacaaagactataaggcagaaaaatgtagtctgaatttgttctactactacctggggcccagggtactaggaaaactcccaggacaaaacgcaagagaaaatgaaagttgctcccaggttaggcaaaggcagtgacgctttctatgctgttacgcactttgaacctcttcctaagatttaattttttgtatgtgattaagacttaagtcctggggtaaagaaaaaaaaatcttcaaataccataaaacatttgtagcttctctattgacacaaaagactcagaaaaggggaaatttgcccagaacgggttttcataggctgttttcctgcagtggtttaaaggtttttttctttgcaggcttcttcagctccaagagcaaatgcgagccctttataaagccatcagtgtccctcgagtccgcagggccagctccaagggtggtggaggctacacttgtcagagtggctctggctgggatgagttcaccaaacatgtcaccagtgaatgtttggggtggatgaggcagcaaagggtaagcagcttcttgaacagcccaaacctgtgcaggccagacgttccagcacgatggggtcagcccatgtgtttgtgtgacaaagagtcttctagacctcaggtggcggcagcagcttgctgtttgcaggattttcctcctatacaatttgaaaagtggtcttctattttggaatgaatgagatttcagtgtggcttggggaatcagcctcattgctttatagtcatcctttatcacacaggtcatatttaacatgtgtaatttagttagtagactttgaatatccagttcttatattgaccaccggaaagatctgttgtgggagtttatgtgctaaataacttcattgttctatgtgagtggcaactgacctcatctgttttactcataggtacttgaaaaaaagcccattgtggcagttcatttaaaatggtcatagattggaggagctggaaacagtgaaactagccattctggtttaggctcattggttgcttaccttagacttttgaagtctcagttgtctcattgtgcaaccatcacgtcaccagtgtgggagtgaagcaaaataatgttggaaggatatgctgatcctttccctagaactggagtttctgcaaagtatttttcaagactaatgattgttgtgttgtttcatgtagtcattatgtcctataatgaacaggtggtggtagaaatatgccacaatcatgtagatgggaattttataatgaaaacctactcctaacccttcccttgagaatgtggatgtgttagagtgataagttgtggagagattgttatgcaatttagatgtggttgtaagaaagcttggtttgattagttgttagactaattcagcagtggttctaaaatttctcaactcctttaaaatttttgtgtattctttcctaagtagtgaggacttcagtgactaaacatttattcattcattcagttacctttttctcccatttattataaagaatataagctattacagaaggtaaggcttagaaagaacaaaagtcagttaaaatatcagaaacctaaatacaaatctatttgtatgtttttcaaatttccttctaatcttcgagcacatttcttgaggattttatatgtagtgccacccaagggtacaaagattatggtccctagtcctgaaaatgaatgttatcgaagaaaacaagatgcatacgctcaaatgccaaatttctgtctagatcagctataatacattcttgcttagttagaggggagggtggccagctcctgtggagtggaacagtcacaggaagacatagcggagctgatggggcttaactacatcttaaggatccacaatgatgggcaaaacagccttccaatcaaattagtttgaaatgtcatatctcctaaagttttcttagtatgacagttataaaaaaagacagcctgtaatttgtcatttttttgtatttatgttgggtgtagcttaagaatgtagtaaatgctcaatgtctttaaattttggaaaagtattaccacatgaattcagttttatgtcattttcttttttttttttttgagagggagtctcactctgttgcccaggcaggagtgcagtggcatgatctcgtctcactgcaacctctatctcccgggttcaagcaattctcctgcttcagcctgccgagtatctgggactacaggcgtgtgccaccatggcaagctgattttttgcatttttagtagagacgggggttttgccatattggtcaggctgatctcgaactcctgaccttgtgatccgcccgccttggcctcccaaagtattgggtttacaggtgtgagccaccacgcccagccagttttatgtcgttttctaacagaagcaattgataagcgatgctttccgggttaggcacgcagccctcatggttgcaaacaaactaaaagctgtttgattgcttactgcaggttcgctctgggatttgctgtggctcctttcctcttatcgcttgttcccctgcatgctttacctcattcccaggagactgagctgcagggcccagctgataagggaactgttgccccagcagccagtcaggaggcaggcactcctgagccaggtttttgttttgttttcccgatttgtgtttgccgatggacaggtcagatacgatacacctggctggtaatgagacgcctgagctggagcctggtcacgttgctaatgtcccactgcacgcacctggctgtctctggtttaaagccgagacagctgtgggagagaagggtcaaagtcccgggtaaccttctgttgtctgactctgaaatggctcccctttctgaagccttgccaagtgtattagaacatggatgtggcttagaacaatgtgttttatgttcttgctgcaatcccagattggaatgtttgcccttggcatgtccaagagatgacacaggtgatttggaaatttacatgtactcatgcaaaagaagggtgagataatggacttgccccagtgtggaactggcggaacagtgtgtgtgattcttattgtgaaacattcttaaatttgaggctcaaataataaatttagtcagatttaattttttaaaaaaggtaacttaagtccacaatcctaatattgccaacactcatggaaattgaatccttgagtagatatagtgacttccctttgaagtggcccatagggagttttgcatcctaaaagggaatggtatatcctggattttaaaaagccaataattacatccatcaagacaatataaagaaataaacaatgaaagatgcttttaggttgactatttagtttggggaacagtgtatgattgcatttatttaatgatttttttatgcacatttaagaatgattaaatgagtattttataacatatcatacatatatatgcacacatatgttctgtgcacatgcttgcttgcctgtgcacaggtagatttggttttttttttttttcagaagacatgatcttggttttcaggttcccatttctaaatttccttctctgcccatcttgagctggggtcaagcaagttgagggaagtatttggcaaccctgcattagccatttgggaacctttaaaaaatattctggcttcaaaaatactccatatttacatctttggttctatctgaagtaaagccgtgatggtgtgcgtaagtgaaacaggtgcaaaggggcaacaacaaagggcgcctctctttgtctttgtgtcgcaggcggagatggacatggtggcctggggtgtggacctggcctcagtggagcagcacattaacagccaccggggcatccacaactccatcggcgactatcgctggcagctggacaaaatcaaagccgacctggtacttgtctgtgtttcattttagagtcttcaaaatatctaccgaaggatcgtgtaattactcaatcccagggagtttcttctgaaacattgctattatttctttcccagaagactggaaatgtttagaaatcccacttcttaaatggggaagtggaatcagtagccctattagagattatgttaacacttgaagaggagttaaaccagaggctgaggttgtgcaaacactcatttgcagtttgtgaataagtctctttaggggtggcagtttgtttctgcggtaagcagaacatctttttgaataggggaaatgcaacagtcttatacagtagtttgtgtcattggtgaatcctttcctaggtggtaattaaaacattatttctactgagcaaagccatatgtcatcccgacacccgctcccatgctgaaaaaagtcagacttgaaactgggttgagaattacagcataaaatcataactgatcttaagtgcttagtttcccgcaggtctctacacttgtaaatcactaaactttttttttttttttttacctgagaccatagcttctcatcctcatttcttcttctggctttttggggcttacttttgtccacctgagcccctgaccaactttctccttcatttctctaagacctagggaatcctaaatgatgtctttaaactttaagacaattttctaacacgtgagtctttaagtgaccctgatctgggctttcctttgtggagacggtgctgccaggccagcaagggtttgctttccaaccgcctaggaaaaagtccccatgggtgaaatatctcatagagctagtaattctttctttctatggagggatctgaggccagtatctgaagaaaaggaggcttagaagggccactcttttctatacaatccacaaggggatttatatctacctgctttttgttgtcttctagcgcgagaaatctgctatctaccagttggaggaggagtatgaaaacctgctggtaagctgatttatttctcaagtgcatcgactttctgttgtttccaattcaattcagttcaagaaatatcaagcacatcctggcggggaggcacctgttcatcgatgctaatgttgttgctgctgctgagtttcctttagaagtgaattttaaaagttgttttcttttctttttttcttttaagtagagacagggtttcaccatgttcaccatgttaaccagggtggtctcaaactcctgacctcaagtgatccgcccgccttggccttccaaagtgctgggattacaggcgtgagccactgcgcccggcctaaaagttgttttcagaagtcagtccctactgctgttctgttttcaagttgtgtcacataaatggcacttgttaagtacttgcagttgaagcaagaaaacgttgccacttgtgaattgtggtcttttttacgaagtgtaagcaaaaataaaagttatttttctcaagatagaggtctaccagatcgtcatcacaattttatgacactcagtcatatcagttacttgattcataagaggagagatttccattcttttgcctatttgtgtcatcatatctttactttttaatgtttccttgttggcaatgatactttttaaataatgtcactcgtggtgacacagtgattttcctattgggctggggtgtgacttatggcactttgaatttttggggagaaggtaggaaaagcttgatttctctaacagtccattttcccccttatagtccaaaactaattattgatgggtacaaaaatacagttagatagaaggagtaagttctaatatttgatagtacaatagggatattatagttaatgataatttattgtatatttcaaaatagcttgaagaaaatatttgtaatgttcccaacacacagaaaagataaatgttcgaggtgatggatatcccacttatcctgatttgatcattatacattgtatacatgtgtccagatatcatgtgtacccccaaatatgtacaactatatcagtaaaaaataccaaaaaaagaccttatttagaagaataaaaaaaatttaaggccaggtgtggtggctcacgcccataattccagcactttggggggccgaggtgggcggatcatctgaggttgggagttcgagaccagcctggccaactggtgaaaccccgtctctactaaaaatacaaaaattagcaggacgtggtggtgcatgtctgtaatcccacctactcgggaagctgaggcaggagaatcgcttaaacccgggagggggaggttgcagtgaaccgagatcgctcatgccactgcactccagcctgggagacgagagcgacagtccgtctcaaaaaaaaaaaagttgctgccttcttgttcattgcagatttggatgggtcttttcccataccaggtggtcagtgaatgcacaaggttaacatttttcctatccgtgtgattttttttttaaagggaccacaggtttaatctttaaacctgcagagaacaccagtcactgcatattgttattttaatgctgcctttgaacctcctgtgcagaaagcgtcctttgagaggatggatcacctgcgacagctgcagaacatcattcaggccacgtccagggagatcatgtggatcaatgactgcgaggaggaggagctgctgtacgactggagcgacaagaacaccaacatcgctcagaaacaggaggccttctccgtaagttcaccccacgcggctgtagatgcttgtcttgagcctgttgccttgaagagctggggtctcggggaatgattggtctattaataatttaatcagccacttgcaattcagccttctttgaaatggtcgtgaaaaatccttccttcctgaaaacttctccgtgtggaggccattatccttagcaaacttatgcgggaacagaaaaccaaataccacatgttctcacttaggagtgggaactaaatgatgagaatacatggatacatcgagggcaacaacacacactggggcctttcggagggcagagggtggaggtggaaggagggagaggatcaggcaagataactaatgggtactaggcttaatcgtgggtgatgaaataacctgtacaacaaatccctgtgatacaagtttacctgtgtaacaaacctgcacatgtatccctgaacttaaaataaaagttaaaaagaaaaagaggggcaataccttgtttaatatcccagaagaccgtagtttgtttagagaggataagaactggtacgttcagataacccaggatgtgtgtggcactgcaggagggtgggtggaagcctgggattagaaaacctcaggatggatgtagctcttctttcctcctgtgtcatcttgagtaagcctctgccacatcctctcctgtagcaaacatccttttcagccttaaaaatgctgtgattcttgaggaaaacagcgtgattctttggcattgttcatttccaaaatgcagttttgtatttcacttttaaaaagtactgtgggggtgatggaagtttaatgatgacttgctgcaaaggatttcttatttcttcattcacagatacgcatgagtcaactggaagttaaagaaaaagagctcaataagctgaaacaagaaagtgaccaacttgtcctcaatcagcatccagcttcagacaaaattgaggtaggcttcatgaggtttatatttttgttagaaaaaaaaaaacttttcataaagtaagactaaccaaatgagtaattcttatatgacttaaagccgtgccaactttattttctattttgggatcaataccctacaccaggggttggcaaactcttttcaggaaaggaccagacaatcagtattttagactttcaggccatttggtctctgttacaattacttaaccctgctattatagtgcagaaggaggcatagacactgtgtaaatgaatgagtgtgcctgtattccaataaaactttatttacaaatagaagtgggccacatgtggcccttgagctatagtttggtgaccgctgccctagactgccatctttgggccacgctcaaggctgacattagctggtaccactggtatggccatactgcttgttaaaaaacacagaaagttccatatcagttggtaagaatcactgtcttgagccccctaagccctttgcttggatgcctcgaacctccccatgattcagcaatcctccaggaacagggctcggtgtggcaaagggatgccactccagtgctagccccagtgacagttctgattggtcagtatctctgctatttgggtgatacatattttgactaagactcctcatggtgtctatttgtgaaagctgattttaaaatttagttttgaccataccaagagatatatggtgagaaattctctttccaacttttagaaaaatatctgcttgacttagaatgagataaaaactgcttactagctttcatgcaggctcacctatctcttggtgttcatgcatctgtacaactgagctaggctaagacagctgacattttcttgtttcaggcctatatggacactctgcagacgcagtggagttggattcttcagatcaccaagtgcattgatgttcatctgaaagaaaatgctgcctactttcaggtttttatatttagtgataattttgttgttatttaggtcttaatacctaatcttttgagtgtgttttataaagcactgaaaataatcttcaaaatgttgcataaatcctcttcattgattttgagtgcagagtagcatagatttgcaaccttgccatcagtcctacaaatagtttcccgctgccacatacctaaatactttctgcacgaattttttcctttagccacctgtcaaagagatgtttagggatgacaatccttgaaacagaactactagatgaaattgctcattgagttgctgttcattcactgatcactctcatccttcacagttttttgaagaggcgcagtctactgaagcatacctgaaggggctccaggactccatcaggaagaagtacccctgcgacaagaacatgcccctgcagcacctgctggaacagatcaaggagctggaggtatcgtctcagacccagaacctcagcagctgtgcctgatcagggagataaaacacatgccttggatgcagttggctctgattagtattattgtacaatgcacgcccagagccaagcaagcattttcttcagcttccagtggcttttctcaaaattaacttctttacatgcccaactactcttgacagttacttttgcttcagtctgggcaattggttgaaaataagaacagagagaacattacttcacatgacaattcctttgggaacgcatacttcaaattttatcagcatagccctttcacacaaggatgttcttccctgcccacttaattcctgcctgcatagcttctggagagtgttgtcatgaaaggttctcatgtttcctgccgacgaatttgtgattttttacaattgatgcaactgcagtgatactcagtgtgtcatgtagctacattaatgcaggttgaaaatctcctctaaaactcacagggtatctatgtttaagtatgattttattcaccattgcagaaagaacgagagaaaatccttgaatacaagcgtcaggtgcagaacttggtaaacaagtctaagaagattgtacagctgaagcctcgtaacccagactacagaagcaataaacccattattctcagagctctctgtgactacaaacaagatcaggtgtgtactcatttagaatgatacaaaagttttccctgtctttacacacaaatttttgtccatcaagaaagcaacatttaatctagagttcaataatcaccacagtcaatgtctttgatctatgaaatcagcagctatggaacaaaagcagcagctctgttctgaatcatatggtagttgtcaataacaaggacagtagttatttttagaacttttaaaaattcgcaaggcttaatacttttcttctagtatgtcaaagttgtctgtgatcactctcatctttaaatttctgataaaagaaatgagaaatgatgcttttatgttgcatataaagtgaatgtctctcactatgggtgacacagtgagaccaaataaataaataaaatgtagctcacttcatgtataccttttaggctcacatgtattatttaaagcatcggtattgttgggttgtatgatgatcagcttcatttgaggggaaaaacgtaaaagctttaataattcgcatgtgttcatctctgtttccatcattgagaaaaaaaataaaaacacatacttatgaataaagccaaaccctggggttgcttgccttacagaaaatcgtgcataagggggatgagtgtatcctgaaggacaacaacgagcgcagcaagtggtacgtgacgggcccgggaggcgttgacatgcttgttccctctgtggggctgatcatccctcctccgaacccactggccgtggacctctcttgcaagtaagtcatccaagttcccaaagccacgcatgcacgcatgaatgtgagggcagaggaagagggcaggtgtttatacctgaagcttagacacacgatgccttgccataataaacaccttctaaaaaaaggaaccttgtgaaggtcaccttcactttgtcttgcaattttatgttgaatagacagtcgttattgaagaataaaagggaatatctggccgggtgtggtggcttatgcctgtaatcccagcacttggggagaccgaggtgggcggatcacctgaggttaggagtttgagaccagcctgaccaacatggagaaactctgtctctactaaaaatataaaattagccaggtgtggtggtacatgcctgtaatcccagctactcgggaggttgaggcaggagaattgcttgaacctgggagggggaggttgcagtgagctgagatcgtgccactgcactccagcctgggcaacgagagcaaaactccatctcaaaaaaaaaaaaggaatgtctgactgtagtggggccagagtgaataatacttgtcatgcacttcaaaggcatcattttaaggttctccttttcttagaaaatcagttgttatacatgtagctacaaatataaaatgcctttaatatcaatattcactcattgtaggaagaacattcgtttaacaggttgtccatggcagattcctttaaaccatttagtatcgaaatcttcaaccacacactgaatagggagagtagtgtagtaagctgctgtgtgctcatgaccaagctttgggtcattggcatctaatgcacctgccatcctgccttagacctctgtcaattacaaagttgccgaaaaacaagacaacaacaaaaagttgtagtatatatgtcagccaataatgtagataattcagaatgtacttttggggagtaaatgaatccaaatccatgaactgttttcaaagttatacctctacctgttactttatcagtgactgttgtaggtttttgtgcagtggtgtgagcgtgtccaggtttcccatttgggatgaagtgtgaaagcctggctctagcatgttttccctttgtgcctcttaggattgagcagtactacgaagccatcttggctctgtggaaccagctctacatcaacatgaagagcctggtgtcctggcactactgcatgattgacatagagaagatcagggccatgacaatcgccaaggtatgtcctcagggccacttaggctgcctggagggagggcagcgctgccccccgcagtgcctgtgtccaacagttcaaccttcttgctgtgtagcagtgcttttgtgtctcgtcaagcaagtcagctcagccctccttagaggttctggtctgtccaatagagaacaggagggattagcatatggctgattatgagagaaagaagcaatactaattcaggtggcctgacaagcaagccagaagtgcctgtggaaaagtcatgcactcctgtaagattctggaccctatgctcctttgatgtaatggaaagttaggtcataaaggattaactgggtatcacaaaagtaaaaggtgggatagaattcttggaagagcacccaaagcattacttactctaaatcagttgttttcagatcatggtctgaagaatcctagcaggagagggagatcctttaggagtgacagggatggaagtgaggagaggggcacagaaagtaccttttggggtcccccgagccctttttctctttgtagttggagcagctttgctgggctctgctttacatttagggcttctgaataatatttcgttgaagaaaaatattctgtaggcaaaaaaaaaaaaaaaaaattagcaacccattcctgtggctcttgggaacaatgtctaaaacctaaaagaccttttatatcttaatgagcctgtgatgagtgttgctttgagtcccatctagtgggtggcattttttggccaactcttcttgattgcattgtggggcagtcataaatcccaaatcacttctgcctgtctcctttcagctgaaaacaatgcggcaggaagattacatgaagacgatagccgaccttgagttacattaccaagagttcatcagaaatagccaaggctcagagatgtttggagatgatgacaagcggaaaatacagtctcagttcaccgatgcccagaagcattaccagaccctggtcattcagctccctggctatccccagcaccagacaggtcggcttgggacatctttctctttgtatcaaccatccataccattttaaaaagaagggagtttgcataaaactggtttcagaaccatttctctgaatgctatatagccagtgttcttcgtgcactaaattttcagaattgattctgaaattcaaaggaagaaggtatacttttaggtagtatggatgttttttgaggcctagcaccttgatacctaggtattctctgatttttgtggccctaacttctttttacagtgaccacaactgaaatcactcatcatggaacctgccaagatgtcaaccataataaagtaattgaaaccaacagagaaaatgacaagcaagaaacatggatgctgatggagctgcagaagattcgcaggcagatagagcactgcgagggcaggatgactctcaaaaacctccctctagcagaccagggatcttctcaccacatcacagtgaaaattaacgagcttaaggtaggtatctgctagtattttgcctggttaccctgtatatttttatttacctgtaaatgaataaaaaaaatcctggtttaaatgtttgtaggcaaaaatattaactttcaagaaaacaggcttctggcaggatttccttatgtattatgtttccaaatttgtagacggttatcaggctgggggttaaactgttcgtttgtgtgttgttgaatcaggctaccgtccatctcaaaagttttcacaaccattaatttggcttcttgcagagaacaacctatgatatgggttagacagggggaatgatctttatttgtagacatgacactgacatgaagagatttggttggtgagatacgatctcaaagccatagacagagtgtgactatggcccaggtgtgtcagctcctaactcagtgatgttttctgctcaaccaagcctgggcacactgcactggaaggcctaaatagagatattctaagaggatcacatttacagtgctaatgaggccatactcaagaaagaaatagaaggtcaactcctctctcttccttgaatcctttacttttagtggactttttaagggcaaaaatgatcataagattcacacagctacaatgcagagtactaacctctgtgtgatcagtatgccaaaattggaatgtagttgtgttgcttaatgaccggggcacattctaagaaatgcatggttaggcgattttgtcatgcaagcgccatagagcatacttacacaaacctagatggtatagcctactatacacctaggctacaaacctgtagggcatgtgactgtcctaaatactgtaggcaattgtgacacaatggtaagtgtgtatctaaatatatctaaacgtcgaaaagatacaataaaaatacagtattataatcttacgggggctggatgcaggggcacatgcctgtaatcccagctacttgcttgagctcaggagttggaggctgcagggagctatgattgtaccactgtactccagtctgggcaacagagcaagacccttctctttaaaaaaaaatgtgtgtgtgtgtgtgtgtgtttatatgtatgtatgtacatatgtgtgtgtgtatatatcttaagggaccaccattgtgtatacagttcatcattgaccaaaacatcattagtagacacatgactatacacacacacagtggggtactatttacctttaaaaaagaaagagatcctggggccaggtgcggtggctcacgcctgtaatcccagcactttgggaggccgaggcgggtggatcacaaggtcaggagttcaagaccagcatgaccaacatggtgaaaccccatctctactaaaaagtacaaaaattagctgggtgtggtggcgtgcgcctgtaatctcagctactcaggaggctgaggcaggagaatcgcttgaacccaggagatggaggttgcagtgagctgagatcacgccattgcactccagcctgggcgacagagcgagactctgtctcaaaaaaaaaaaaaagaaagaaagagatcctgccatttgcaaaagcatggatgaatgtgggggacattatgctaagtgaaatacaccagacacaaatactgcttgatttcacttatgtgtaaattctaagaaaaaagttgaatgcagggaaacagagagtaggatggtgattaccggggtggggagggaggaggaaatgggaagatgtaaaggatacaaacttgcatttgtgtgggatgaataaatctagagatctaaattcagcgcaagactacaggtagtaatcttgtagtgtatattgaaattttgctgagagtagattttaggtgctcttaccacacatacaaaaaaagataaccatggaagttgactgatgtgttaatttacttacctgatgtaatcatttcactgtgtctatgtgtattaaaacagcatattgtacaccttaaatatatacagtaataaaaagaatcagctaaatcaaaagagctttccttcatttttgacagagtgtgcagaatgattcacaagcaattgctgaggttctcaaccagcttaaagatatgcttgccaacttcagaggttctgaaaagtactgctatttacagaatgaagtatttggactatttcagaaactggaaaatatcaatggtgttacagatggctacttaaataggtaaactcagctaacactaatctcatattttccttttctcaagcttctttttctgggtcttcatttgctttagatgcttgccttacagtttctctgttactagagatttacttacatccttctgtggtttggagagcatgttaattccgctagcctcgcatgttaattccactattctgaactataatgttatcttagaactaagttatgctctaagggccagaacttgagaattcttcagcgaatacaaaatgttggtctgaatcacaatagaccaaaaaacagacaaaataaatttttatctgctttgacgttgttccctttcattactagctgtgagaggcaaatcttcacagactaattatgtcactggcaattttatgtgcttcttttgctctttccagcttatgcacagtaagggcactgctccaggctattctccaaacagaagacatgttaaaggtttatgaagccaggctcactgaggaggaaactgtctgcctggacctggataaagtggaagcttaccgctgtggactgaaggtaacttgaaagcttataacagtggcccaacttacaggaactaattcagatctgagctcccaattataaagcctcactgggttttcatgagttttgaggattattgggtttcagtggccacacaggttgacatcagttgtcatctctgtaactctgttttccagactgtgttagcaggaactatataagaaagtaattcgtgatgggattagtttggggaatgctgagttaaactggtttctttactgtgggacttcttagaaactttaatatgttcatattattattataacaggatagcacaaagaacaagattattggaacaaatactgggaaatgcaattcagtaaatatatttccctggattgactgttaacactttaaattatgaatattctaaagtgttttataaactttgccgcccaatttggtgacttgtagtgtagcatacaatgggagaagggattaatttgcaatctttttttttttcatcttgcagaaaataaaaaatgacttgaacttgaagaagtcgttgttggccactatgaagacagaactacagaaagcccagcagatccactctcagacttcacagcagtatccactttatgatctggacttgggcaagttcggtgaaaaagtcacacagctgacagaccgctggcaaaggatagataaacagatcgactttaggtatgccagcctcctcccgctccttccccatcttctccccttttggttgttcacaagataatgtcacttgaagggaaccactgaagaaaacagaggttttgttttttgtgtaagttaggcgtaacagatgctcttttcatggactgcctgtatgcagctttgttagaaatggaaggagaatgcatcacgatagccaaccctgtgcaggccaggtgccatccagggtcttagagaaacggcagaagccctttagccagctcttttgtgtcctataaactcttgttatgactcttggaaggagtagctgccttgagttagcattctccaaaagtttatgaaaattaaatcttagaccaaaaaaaatgcctttctgcaaataagagtttaaaaaatctctggaatatgaatctgcctattctggaaattttatatgactggaatcatacaatatgtagtccattgtgactggcttctttcacttagtatcgtgctttcagagttcatctgtgttgtatcatgtttcagtacatcattttctatttttttcatgtgtttttatgattgaataatattccattgtttggcagtgccacattttgttgatcttttcatcagttgatacctgagttgtttccagtttttggctgtgataaaaagtgctgctatgaacattcatgtataagtttttatgtgggaatatgatcagttttcttgggtatatatcaagtgaatttctgggtgattctatgttacatattttaggaactaataagataatgattttattgtatctatttccccccaggttatgggacctggagaaacaaatcaagcaattgaggaattatcgtgataactatcaggctttctgcaagtggctctatgatgctaaacgccgccaggattccttagaatccatgaaatttggagattccaacacagtcatgcggtttttgaatgagcagaaggtataagccaactttttgttccatagctgttttgagattaattgggtgtaattcatgttttcctctggtttttgtatcagtgcctaggtttgaaatgatgaatatttaatattactaacccattttgtgaaggcttaaagaatgcccagaggaaaagcaactgagatgtttacaaggaaatgcaaattatgaacatagaaataacgtgatattgttctcttcatgttatcataaattatctttataaattgaggggataggcccagaaaacaggctgactagaaagtaacctcttacagatagtaagttaaagggcttgcttctcttctctgaatggaaaaaatgctcatctcctaagctgtaactataaaaatatgagacaagtacatgtagtaataaactgaaaaaagggtacaaataacagtggtaaaagagtgaaatcacatttatttaaaaatatttgtatgcattaacattggtaaatatttcactttttgtatagaacttgcacagtgaaatatctggcaaacgagacaaatcagaggaagtacaaaaaattgctgaactttgcgccaattcaattaaggtatgttggtttcataaagaatgttggtatttcaccaagattattattaactgcatgacttgctgatttgttgtaaagcgtatacacttcctgaggatagcaattacggtctgtatatattcttttctgaacaaaccataaaaattaaaaatctattagcttgaattcattccacattggcagtatccatttgaatggctggtttctattctttgactggtggtaggtgctgcattctccatttagcatacaaagatgtactgcttggtttaataatggtgtttgtttgtttgtttgtttgtttggagagagtttcgctcttgctgcccaggctggagtgcagtggtgtgatctcggctcaccgcaacctctgcctcctgggttcaagtgattctcccgcctcagcttcctgagtagctgggattacaggcatgcaccaccatgcccggctaattttatatttttagtagagacagggtttctccgtgttggtcaggctggttttgaactcccgatctcaggggatctgcccggctcggcctcccaaagtgccaggattatgggtgtgagccaccacgctaatgtagtattagttgcttggccactagtggcgcaaagtctttggagtgggcaattagacgtgcagcccaatgatttaaaactgtggaactgtagctgttagtgatgctttttaagtctatgaaggacacttttcttaaacttcattatgctgcaggattatgagctccagctggcctcatacacctcaggactggaaactctgctgaacatacctatcaagaggaccatgattcagtccccttctggggtgattctgcaagaggtatatatgtcatcacatatctcttaaaacctgcccctccttctgcttcttcccttttccctgtctcctgcctcttcccttttccctgtctcctgcctgtcttccttaccattgctgatttcatcccattacagggtaccactttaagaggtttaatagcaggttatgtgccctccagtgtgagtcattgatgtatgatacattttcagaaatgatcaggaatgtgttatttagagtctttgtagaaattgggcttaaatttctgggtttgatgagagagacttctaaaaagtggaaaatacagaaatttctaaaagacagcctcttctcaaagatgtcagagactatcgtacctgtcagatggtttaggggaaacagcctggagagatgagaatgggatacatttttggccctttgttttgctgtactttcttttgctgattttggaatgaacacactaaagaagagaattcactctttataatttcactattttagaaaacaaaatcggtcaaattacataggactttttttttaatgcaatatctttttctttctttccttccttttctccaaggctgcagatgttcatgctcggtacattgaactacttacaagatctggagactattacaggttcttaagtgagatgctgaagagtttggaagatctgaaggtaatttatactgtcttttcttgtagcgtcaaaaaagaaaatagaatagaaccttattattacttccacattataacatggatttggacacatcctggtgaaactgtatttcctctaaaggtttagtgtaatactgcttgtttgtaagtctggggttacttccatgctccaatacgctgctttaaatgaacttaagtaatagtcataatattgcaacaactttgccaaacaaaagtcacttgatttaatgtttggttaaggaatttgctttatttctctgtgttaaagataacatcttggactaggtatatttgaattttttatattcagtgattgttccctttattcctcatttatgatacttaaattgagattatatgtaaacttattttaatgtaaacttgaaataaagggaatataatttatgaaatcataagcttttgattttgaaagaaattacctcattttacagatgaggtagctcagactcaaagataatatatcatttgctaagagcatatgagcagctggtgcaagaattatgatgagaatccagatttcttgaatatttgcctagtcactctttgcatgtatgtccatgtgtgtaaagagaaataagaatgcacattggtctgggaggggaaaagtactgcttctttcttggaatgtgaggtgtttttcttttgacataatctctgatttcattccacagctgaaaaataccaagatcgaagttttggaagaggagctcagactggcccgagatgccaactcggaaaactgtaataagaacaaattcctggatcagaacctgcagaaataccaggcagagtgttcccagttcaaagcgaagcttgcgagcctggaggagctgaagagacaggctgagctggatgggaagtcggctaagcaaaatctagacaagtgctacggccaaataaaagaactcaatgagaagatcacccgactgacttatgagattgaagatgaaaagagaagaagaaaatctgtggaagacagatttgaccaacagaagaatgactatgaccaactgcagaaagcaaggcaatgtgaaaaggagaaccttggttggcagaaattagagtctgagaaagccatcaaggagaaggagtacgagattgaaaggttgagggttctactgcaggaagaaggcacccggaagagagaatatgaaaatgagctggcaaaggtaagaaaccactataatgaggagatgagtaatttaaggaacaagtatgaaacagagattaacattacgaagaccaccatcaaggagatatccatgcaaaaagaggatgattccaaaaatcttagaaaccagcttgatagactttcaagggaaaatcgagatctgaaggatgaaattgtcaggctcaatgacagcatcttgcaggccactgagcagcgaaggcgagctgaagaaaacgcccttcagcaaaaggcctgtggctctgagataatgcagaagaagcagcatctggagatagaactgaagcaggtcatgcagcagcgctctgaggacaatgcccggcacaagcagtccctggaggaggctgccaagaccattcaggacaaaaataaggagatcgagagactcaaagctgagtttcaggaggaggccaagcgccgctgggaatatgaaaatgaactgagtaaggtaagaaacaattatgatgaggagatcattagcttaaaaaatcagtttgagaccgagatcaacatcaccaagaccaccatccaccagctcaccatgcagaaggaagaggataccagtggctaccgggctcagatagacaatctcacccgagaaaacaggagcttatctgaagaaataaagaggctgaagaacactctaacccagaccacagagaatctcaggagggtggaagaagacatccaacagcaaaaggccactggctctgaggtgtctcagaggaaacagcagctggaggttgagctgagacaagtcactcagatgcgaacagaggagagcgtaagatataagcaatctcttgatgatgctgccaaaaccatccaggataaaaacaaggagatagaaaggttaaaacaactgatcgacaaagaaacaaatgaccggaaatgcctggaagatgaaaacgcgagattacaaagggtccagtatgacctgcagaaagcaaacagtagtgcgacggagacaataaacaaactgaaggttcaggagcaagaactgacacgcctgaggatcgactatgaaagggtttcccaggagaggactgtgaaggaccaggatatcacgcggttccagaactctctgaaagagctgcagctgcagaagcagaaggtggaagaggagctgaatcggctgaagaggaccgcgtcagaagactcctgcaagaggaagaagctggaggaagagctggaaggcatgaggaggtcgctgaaggagcaagccatcaaaatcaccaacctgacccagcagctggagcaggcatccattgttaagaagaggagtgaggatgacctccggcagcagagggacgtgctggatggccacctgagggaaaagcagaggacccaggaagagctgaggaggctctcttctgaggtcgaggccctgaggcggcagttactccaggaacaggaaagtgtcaaacaagctcacttgaggaatgagcatttccagaaggcgatagaagataaaagcagaagcttaaatgaaagcaaaatagaaattgagaggctgcagtctctcacagagaacctgaccaaggagcacttgatgttagaagaagaactgcggaacctgaggctggagtacgatgacctgaggagaggacgaagcgaagcggacagtgataaaaatgcaaccatcttggaactaaggagccagctgcagatcagcaacaaccggaccctggaactgcaggggctgattaatgatttacagagagagagggaaaatttgagacaggaaattgagaaattccaaaagcaggctttagaggtattcacaaatacttgatcacagcttcactgtttctcaaattattcatcacattattatctcatctgaactgtgctctttctgcttaaatagatgcttatagaaaatctaatttttctttttattgctctactacttcctgtcataatccaggtaactgctttaaaataatttcaatgctgtgtgccctgctgttctttaattgcatcaaatgctgatctctgggtagcctgtgtttggccctgcttttaagaacactaatacatgtataacttcctccgaatgttccattctacttcttagaagttagctcttatttagtgagctatgacatacatttgtaatgaaaattttcttaaatagaagccatactaaagtgtttccctatgcaatttttaaaacactttttcttttgcctgcttagatgatttttttgcatggattatttagtgttcgcttttgatcatggccctagtgtgtttccttttgtttgactttccttctcctaacccttaatttaaaaataacttatttaacttctacagacaatatttgtgtgtggctgggttggtgtgtgtgtgtgtgtgtgtgtgtgtgtatatctatatattatatatataattatataattacataatatatatttatctataatatatattttatataatatatatcttcatatatttgtattgcttcattaagtatgttcatctagctgtaacaggtgagatgtaggtgtagcaggtatgataacctgaaacaaaactccccacattttttcaaagcataattattgttaagagtaagacaggtctgcaacttacagttccttctatagaaaaaaatagtaagtatgaagccatttattgaagtggcaacatatacagaatttttcccacaaatttgtaaaataacaagctcacagtgtatccagggacaatatagaaagaaaaaataagcaaggcttttttttttaaagatagatacacaaaagaaagttaagtcgtgatagtaatatgatatgattcaaaacattattttttcccatttctttcttcttcaattccaggcatctaataggattcaggaatcaaagaatcagtgtactcaggtggtacaggaaagagagagccttctggtgaaaatcaaagtcctggagcaagacaaggcaaggctgcagaggctggaggatgagctgaatcgtgcaaaatcaactctagaggcagaaaccagggtgaaacagcgcctggagtgtgagaaacagcaaattcagaatgacctgaatcagtggaagactcaatattcccgcaaggaggaggctattaggaagatagaatcggaaagagaaaagagtgagagagagaagaacagtcttaggagtgagatcgaaagactccaagcagagatcaagagaattgaagagaggtgcaggcgtaagctggaggattctaccagggagacacagtcacagttagaaacagaacgctcccgatatcagagggagattgataaactcagacagcgcccatatgggtcccatcgagagacccagactgagtgtgagtggaccgttgacacctccaagctggtgtttgatgggctgaggaagaaggtgacagcaatgcagctctatgagtgtcagctgatcgacaaaacaaccttggacaaactattgaaggggaagaagtcagtggaagaagttgcttctgaaatccagccattccttcggggtgcaggatctatcgctggagcatctgcttctcctaaggaaaaatactctttggtagaggccaagagaaagaaattaatcagcccagaatccacagtcatgcttctggaggcccaggcagctacaggtggtataattgatccccatcggaatgagaagctgactgtcgacagtgccatagctcgggacctcattgacttcgatgaccgtcagcagatatatgcagcagaaaaagctatcactggttttgatgatccattttcaggcaagacagtatctgtttcagaagccatcaagaaaaatttgattgatagagaaaccggaatgcgcctgctggaagcccagattgcttcagggggtgtagtagaccctgtgaacagtgtctttttgccaaaagatgtcgccttggcccgggggctgattgatagagatttgtatcgatccctgaatgatccccgagatagtcagaaaaactttgtggatccagtcaccaaaaagaaggtcagttacgtgcagctgaaggaacggtgcagaatcgaaccacatactggtctgctcttgctttcagtacagaagagaagcatgtccttccaaggaatcagacaacctgtgaccgtcactgagctagtagattctggtatattgagaccgtccactgtcaatgaactggaatctggtcagatttcttatgacgaggttggtgagagaattaaggacttcctccagggttcaagctgcatagcaggcatatacaatgagaccacaaaacagaagcttggcatttatgaggccatgaaaattggcttagtccgacctggtactgctctggagttgctggaagcccaagcagctactggctttatagtggatcctgttagcaacttgaggttaccagtggaggaagcctacaagagaggtctggtgggcattgagttcaaagagaagctcctgtctgcagaacgagctgtcactgggtataatgatcctgaaacaggaaacatcatctctttgttccaagccatgaataaggaactcatcgaaaagggccacggtattcgcttattagaagcacagatcgcaaccggggggatcattgacccaaaggagagccatcgtttaccagttgacatagcatataagaggggctatttcaatgaggaactcagtgagattctctcagatccaagtgatgataccaaaggattttttgaccccaacactgaagaaaatcttacctatctgcaactaaaagaaagatgcattaaggatgaggaaacagggctctgtcttctgcctctgaaagaaaagaagaaacaggtgcagacatcacaaaagaataccctcaggaagcgtagagtggtcatagttgacccagaaaccaataaagaaatgtctgttcaggaggcctacaagaagggcctaattgattatgaaaccttcaaagaactgtgtgagcaggaatgtgaatgggaagaaataaccatcacgggatcagatggctccaccagggtggtcctggtagatagaaagacaggcagtcagtatgatattcaagatgctattgacaagggccttgttgacaggaagttctttgatcagtaccgatccggcagcctcagcctcactcaatttgctgacatgatctccttgaaaaatggtgtcggcaccagcagcagcatgggcagtggtgtcagcgatgatgtttttagcagctcccgacatgaatcagtaagtaagatttccaccatatccagcgtcaggaatttaaccataaggagcagctctttttcagacaccctggaagaatcgagccccattgcagccatctttgacacagaaaacctggagaaaatctccattacagaaggtatagagcggggcatcgttgacagcatcacgggtcagaggcttctggaggctcaggcctgcacaggtggcatcatccacccaaccacgggccagaagctgtcacttcaggacgcagtctcccagggtgtgattgaccaagacatggccaccaggctgaagcctgctcagaaagccttcataggcttcgagggtgtgaagggaaagaagaagatgtcagcagcagaggcagtgaaagaaaaatggctcccgtatgaggctggccagcgcttcctggagttccagtacctcacgggaggtcttgttgacccggaagtgcatgggaggataagcaccgaagaagccatccggaaggggttcatagatggccgcgccgcacagaggctgcaagacaccagcagctatgccaaaatcctgacctgccccaaaaccaaattaaaaatatcctataaggatgccataaatcgctccatggtagaagatatcactgggctgcgccttctggaagccgcctccgtgtcgtccaagggcttacccagcccttacaacatgtcttcggctccggggtcccgctccggctcccgctcgggatctcgctccggatctcgctccgggtcccgcagtgggtcccggagaggaagctttgacgccacagggaattcttcctactcttattcctactcatttagcagtagttctattgggcactagtagtcagttgggagtggttgctataccttgacttcatttatatgaatttccactttattaaataatagaaaagaaaatcccggtgcttgcagtagagtgataggacattctatgcttacagaaaatatagccatgattgaaatcaaatagtaaaggctgttctggctttttatcttcttagctcatcttaaataagcagtacacttggatgcagtgcgtctgaagtgctaatcagttgtaacaatagcacaaatcgaacttaggatttgtttcttctcttctgtgtttcgatttttgatcaattctttaattttggaagcctataatacagttttctattcttggagataaaaattaaatggatcactgatattttagtcattctgcttctcatctaaatatttccatattctgtattaggagaaaattaccctcccagcaccagcccccctctcaaacccccaacccaaaaccaagcattttggaatgagtctcctttagtttcagagtgtggattgtataacccatatactcttcgatgtacttgtttggtttggtattaatttgactgtgcatgacagcggcaatcttttctttggtcaaagttttctgtttattttgcttgtcatattcgatgtactttaaggtgtctttatgaagtttgctattctggcaataaacttttagacttttgaagtgtttgtgttttaatttaatatgtttataagcatgtataaacatttagcatatttttatcataggtctaaaaatatttgtttactaaatacctgtgaagaaataccattaaaaaactatttggttctgaattcttactagaaggtggtcttttgaagttagtcctttcggtacttctcagatgcctgtcatgtacccgatggagtccttggaaagaaggcctgtgtaaagaggccagcctggaggtcaataacctgttctagtttattctggacattgagtaccaagtagcattggcaaaagtcatcatcatagcattgaaaaaacatgaagttgctaagatgctttttgggtatcctcaaaatagatagtgtttcactttgtcccgtaagaggaaagaattgtcctggaacccatgaaaatgatttctgaagagttcttggctctctgttgaaggacaaggaagtataagcctattcctttggatcaaagagaaactactgaaattcacacatttgtcattagattaacatgacttcactgaatacccaccatgtctagtattgggttaggtactatgaagactgagtagaatttacaagcccccgacaacaaagcattggcaatatgggtggggacagaaacagataaagcaatcagtgggacaactttcaaatgtcagcagtatatattaatacaaattttatagtacagatagaaaataggaaaacatgctaattgtatagaacaaaaatcaagattagattaattattgggggcttttggtacttagggtgaaagtcacctccattctcattgcatgggctatttttcctccacagcactcttttcttccttatttcacctcttcttccttactccctctcctaatttggaggagttgaaattaattttatgcattaaatactgagttcgcgtgccatgcattgtgccagaagccatggagtctgtgctagaaatacatggtgaaaaagagccctcataatccaaaaggaagaagaaaatgtggtaaatgctgtattgggaaaaatgaaggaaattccttatgctagagctgggagactatattagtcacctcaccctgccataacaagatgccacagactgtgagcggcttaaacggaagtgtattttctcacagttctggaagctaaaagtacaagctcaagatgcaggcagggctggtttctagtgaaacctggctcatgggtggctatcagtcttatctgattagagtacccacccctcctttatgacctcatttaactttaattacctcttagggctctatctccttatacagtcacattgtgggttggtacttcaacataggcatttttgagggactcaatccaatccataacagaggcctagcctagaacaggagtctggagaccactccaggaaagtgatatcaaaacagatcagcagcatcagtgtagagcagttcctcgggctgaaacagtaactagagagtacagtcaattgacaaatctttcctactccctccaggcttgtgccaatgttgtcatgaagctctgagatgacatggggctgtatcctgaagagaggatatgtttgacgtgggctaagttttaatttggttcacatatacaaacagggaaatatacactagaactttttatcaggagtcatgtcacatcagaaatagtctcacatttttccagaccaaccagctaactatggaaatgcaaataaaaagtaaggataccgggctgggcgcggtggctcacgtctgtaatcccagcactttgggaggctgaggcgagcagatcacaaggtcaggagttcgagaccagcctggccaatatggtgaaaccccatctctattaaaaatagaaaaattagcagggtgtggtggcatgtgcctgtagtcccagctactcgggaggctgtggcagaagaattgcttgaacccgggagatggaggttgcagtgagctgagattgcgccactgcactccagcctgggtggcagagccagactccgtctcaaaaaaaaaaaaaaaaagatactgtaggcagagtatgaatacattaacttcatactcctctcttaccagcttctagccacttctgtattttatggtgctgcctatttatagtcttatgactatttttttaagtgagaaccgtgctatttgcctttagaaataattgttcaccaaaaaattcccccacagttccttcacatgggtaaacaaagtgcaaaaggaaaccaaggtttgacacttgggcttgaaaaaattttaaaaagtaatataaaatgggttagattctaggagttgaaaccatttggggaaactacaagggctaattccaggtgttgggtaggaaatgtacaaagttaagcttgtgttatcaaagcaagaaagcattcaaggactaatagggatacatgaaagacacagatggcttaatgtggcttccactggccacatttgggacaatttgagcatcaacaagaattatgatgttaaaggagtatattatattgaattaaaaaaaaaccttaaatcaataactttaaaaacaccttgattcccatagtgaagcaaacactaaaatggaggtgtggaaagaatgccagttaataaacataaaaggcatgatactattgcggaatcacttataactcctaatgtaacaacagattcagtgaaggactgtatcaaggagttggggaacaggttattcttatggactcaaggtataatccacagattgcttaccaattcctaagaggaaaatgtactattagaatgaagagatgtagccaccacctttaccaagtgatcaaatttagcattactaatataactgagttatgcgtccccgtgagttggcaacatctcttaggtagtattgcaaaagtgctcaaactgaatctaatcatgagggaaacaaaatctgacaaatccagaatgagagagattctacaagacaactggcctaggctcatcacaacatgtaatgatttaataatttaaaaaggagggtgaaggaggctgatctggattaaaagagacaataactaattatagcttatgagttgaaaaaataaaactgctatagaaataattttggggacaatggggaaatttgaatatgaactgtataataaatgattttatggacttactaattttcttaggtttgatcatgtattgcggttacacaggaaaatgttcttattcttagaacatgcatgctaacatatttgggggtgaaaaatctgcaacttactttcaaagaattcagcaaaaatcattgggtggggctgtgaatgtggagagaagagacggagagaaatcaaacctggcaaaatgttaacaatgagctgaaggacggctaaacgaaagctcattgtactatttttaaaacttttctgtagctataagccgttttttctgaggaagtcgaggagggcgaatatctttctggaaaggccagagcaaatgcacgcaagagctgagaaaagattggaaaacgcctctcaaaataacagtcccgcccttcccgggactcttccctataggctgttcaagtcacgtggcgactgtggccccgcccacagctcccagaggcctgcgcgtgcggtctgcagttcggccgcttcctcttggcgggtgggctgcagctatggagggcgagcctccacctgtggaggagcggcggcggctgcaggaggagctgaacgagttcgtggagagcggctgccggacgttggaggaggtgaccgcgtccctgggctgggacctagatagtctggatcccggggaagaggaggcggcggaggtgaggagcgcggccgcggggccctttcggggactatcggcccggggtcttctctggaagaagggagatccgcactggcagccgcggagggaagggcgaggagtcctcgtccgtgtgcagagccgcgatgggcgcctgggacccgaggggcgccgggggccctggagcaaccctgacgtccctgggttccgggctggggcgcgcgaggaactcccgaaggctccacatcgacctccagtgcggcgctcctcccgcgcaacttcgagtttaaagaaaaccgggggccgggcgcggtggcgcacgcctgtaatcctagcactttgagaggccaaggcgggaggatcccttgagcccaggagttccagactagcctgggcaacatggtgaaacctcttctctaccaaaagtacaaaaattagccgggtgtggtggtgtgagcctgtggccccagctatttgggaggctggggtggaaggatagcttgagcccaggaggtcgaggctgcagtgagccgagatcgctccactgcattccagcctgggcgacagagcaagaccctgtctcaaaaaacaaacaaacaaaatccaggaaggtgtgttgagtgaggagggaatggcagatttggtatttatttagaaaataagtgaacgtgtctcagagcgctgcagagggattggcggtttgcattgtcatctgtcatacggattccgcagttgcaccagattcggtgtcaggagagctgggagtttgccagttcgcctttctgtgccttaaaattggacacttctgactgggacagcaccaattctaggattattaaaggttgtcaccaagaggtggtaactggcaactcctgtggacattagaattgcttttttaaaaatgtaggcaagtgtatttagagtgaacattcgtgatttttgtttttttgtggggtattttcggtggaatgagaggaagggaagtgctccaatgtggggtaattcattatctttactattacttctgggtttaccatgctgtgataatttctcctgggtttaagttacatgactgattcctcagaggcatttaaaatatatttgatttctgtatataccattcattgtttattgtattaaaagcacagaggaaattaaaaaatctttaatattcatttagaggggtatttgaagctgggaattccactgagtggggcttaccagacccttccatacattgtttactcagcattgcggtaacattggattccttgtattaacgtttaaatagcactttgtttgccacttacattacttcatttaatactcaaaataaccctatgaggtaggtatctttggccacattttatagacgaggaaaggaacacagaagtgataatttgtcgaaggatacactgctagtaaatggcagttaggatttccgccggtgttttagtactgaaatttagtgaacaacagtcctagttgtcatctgttcctagttgtcacctagttcctagtcctcacagagctagtcctagttgtcacctagttcctagtcctagttgtcacctagttcctagtcctcacagagcttattgtctggtggtgatgaggggtaatacggataactgaaccattatattatcatgggtctgtgatgggtggggttggaattgctatagtacagtttattgtaggcggtggtggacaaagtggtggtcagcaaaggcttcctggacaaagtgaattctaagctgataaataaaagtgagttgaattggctagggggttggcgggtgcggggaagaagcatcaacagcatgtgtagaagttcagagacagggagtgaccagatcgggaagcctcaagtagttaaggatagctagagcatagagtgtagagttagagtagaatggtgatggtgggtagaggtcagatcttaaaggtccttgtcagccatattagaaagtctagatttttttttttttttttaatgaaggcagtggggaggtatggaattattttaagccagggcatattataatcacatttaccttttaataaaataatagcatacatttattgaatgcttgctatgtaccaggccctatttgaattcctttatgtgtataaactttggtatacttttttaaatcttcacaatcactttgtgagagaggtcctgctattatttttattttatataatagaaaatgaggcaaagagagattaagtacctcacccagtttcatgcagccagtaagtggcagagatggaattcaaaccagctacaggatggaaactgaaggggagggcagcaagactggaagcagagagagagagcaagagtgagagagagcgagcgagcgtagtcaggagatggtgttgtattccaggagagagttgatgataccctgagttggggaagtggcagtggggatggaggatgttgagggattttcagaaatatttaggagttaaattggcaggactaggtgattgattggacgtgggtgatgagggagaagtagtttcttgcttgagcaagggggacctttcactgaaatagaaaagtacaaaaggaatagatttgagggttgggagatgatgaatataattaatttatttttgtttgtgttgaacttttagtgtctttaatatacggtactggagagaaacaaggtttaaagatctaaattttgggagtcctcactgtatagtgagagttgtagctttgagatctttcagtaagcatatattaaacagcaaaaggtcagtggttatattaatacttacatgaaaaccaacatctaaagggggacaaatagagcaaggaagacagatatttaggatatttagaggagaccaagtagaagaagccagagaggtagaaagaacatgaggggtgtgtcagaatcacagatggacaattggagtgtgaccttccaagagttcagataaaacaagacagtgacatgtttttggctttagtaacaaggttattagtgacctattgactggtttcagtggggtgatggtggcaatgagtgaggaatcgttataggtgaggtgaggttgtttagacagtgagtgtaaatacacctttcaaagagttaggctttgaaggagtggagagaggacaggggcatttagggagttaggggttgaaggagttttatttttctttaatacacaactacatgggggttgagagaggcctgtagaagaggatgcactatacagtactggtacataattaaatggtaaacatttaatggtaattatttatttaaatattatgtacctattttctttgtttctgtttgatttttataggatgaagttgtgatatgtccatacgattccaatcatcacatgcctaaatcatctttggcaaagcacatggcatcttgtagattgaggaaaatgggctataccaaagaagaagaggtaccatatatttactatattatatatacatatatgtcatgcattttacacattaattcacaatttttggaagttacaatgtgaggttcactgacaaaataatagcccttacttgaagggttggttggtacttgcctaattgcacaaattattgtgagaaataattaagtgatactaatctattgtttaggtcaagtcttaaaatagtcaattatctgatacttaagaacagtaagattcttttttttcaggatgaaatgtataatcctgagtttttctatgaaaatgtgaagataccttcgattactttgagtaagtattaagttattataatttaaaaatatcttagtgtagatattgatttttcatttttgcattatgaaaagaatggattgtataagcatgcttatgacaaggacatttagtaccttaagagaatgtagaattaattaatgtacaaggcaactaattcacataatctgaagtttagagaccaggcttgtattaataggcagtgaaaaccttacaaagctttgtatagtagagcagacaccttctttctcagttacaacaaaaatttgagcatgtgacacagattgaaggatgagactgaagatggacatgtgttccagggattgacagcatatatagaggttaaagtcttgggctctggaaaaagaatgtcctgattcaactcctgtttttatcatgaaagatgtgactttcagcgaggtaattaacctgtttgttgcctaaatttctttataaaatggagatggttataatagcactttgcgaagattaagtgatatatatatataatattcttagaatagtgtcaggcacttagctggagtcagctagagggtcacagagttgtgaccattacagcacaggcttcaagaatgttagctattattggtcagtaaaatttgtcgctgctactgctgcgtgcctaattataggcatgaactgcttgaagtctgattacttactgggctgtagataaatctgaaaggattctgtgttcagatttcatagacagggatgtggatgtttcttaagattctggaaggtttgtccacgtgcccaaagggcttggatcagaaaccagttaataatttaattgtggtcactgatgattcatattgtatttatggatttttttttttttgacagataaggactcacaattccagataattaaacaagctagaactgcagttgggaaagacagtgattgttataatcaaagtaagtggcattacagtttaagtgaattaaagaatgaaattattatttttctcataagcatgttactaattttcttcaagaaaaacctgtgaaaactgttacatgggaaaggtaaagttttacatttaacattgggctaatttgcttcgtttcaacttcatttgttagatatttcctgttgagatacaccagagtctcactaagacactatcttagctaggggttcatcctttggaattacctggcgatttataggtgagattgtcttgtggctaattaaaaaaattattatttagtaaatacagatggtcccaacttaatgatgatttaatttaggattttttcaattttatggtgttgtgaaaacaatacacaatcacaaggttttagactttaagtactagtgattcttttatcagacgctgggctgcattttcaacttaacggtattttcagtttatgatgggtttatcgggatgtaaccccatgtaagtcaaggaacatctataaatgccactgagtgaggctcttttactcttgagatttcctctctttagagtgttgaaatgcagtgtaaagaaaaggcttaggctaaaagagattagtctccacagctaccctcagattgcttgctacccagtaagtgagttggtttgaggtgatgaatgcttgggatccccttctcagaaaaaaagtacaaacacaaaagttttacatataatttcagaggattcatattaatagatcctttcatgcccagctttagagctgggttaaagagtttctccctgggaacctcagcagagagtaggttagaagttttaagcataagcttttaggaaattgaaagaaaacttcatccatcaaaaacatagacataggccagacacggtggctcatgcctgtcatcccagcactttgggaggccgaggcaggtggatcatctgaggtcagaagttcaagaccaccctggccaacatggcgaaaccctgtctttactaaaaaatgcaaaaattagccgggcatggtggcaagcacctgtaatcccagctactcaggagaccgaggcaggaagaattgcttgaacccaggaggcggaggtttcattgagccaagattgcaccattgcactccagcctgggcaacagagcgagactccatctcaaaaaaaaaaacacacatagacaaacgagttaataaaagtttaaatttctaatgaatgtagatatgacatctagccaaaacctgaacagcttctcttgtaaggatttctgcattgtcttctttgaaccttctgtaggtagctttctctggacaacttacctttttttcctcattcttttttctagctgaattatatttaccaggctgtagtcatggttggttttctccctcattgaaattgaggatctttaccaaatactgttctaagccagtatctggacttgatttctcagagttgctctatggcttcagaagaaagaccatcttatccttagttgtctatattacatgggttctctacaacagccagaagcacatttcttgtattttttgttttgaggttcccacttttgtccctgtcagggaaattccaggtttttttctttgagggagacagttgactctcattttatttattcggagagattactgagctatgactagtcaagccttttttggcctctgctattggttctgctcatatcccctggtagtgtacccataaaaaagttgaggtttttggtttttgaaagggttaataatacttaaaggactttatttgagtcttaagtggttagatttactgaattttagagttgaaagagaacttggagatcatctaatccagtgtctgcattttacagataagaaaaaccctgtctgatagagacatgataaagttctagtgtgtttgttctaaaggttctccgtatttttattttttaaaaggttatttttttaaagctcttttatgaattacatttctctttcacaacaaacttgtgataagttgaacgatattttcccctccataataggtgaagaaacaggcacacaaaagtgaagtaactcacctctgctagataatatcaaagtggatccagaactaagttctgaattttgacacaaactctgaactgagttgtttgattttctgttagaaaccctacatttagtaaaatttgtggaccaggattctagatattgctcaaatttatttatgatgtctttcatgattaagtggaagaatatcacaaacttcatatctctgcatactaatcgtgactatcagtgctgttcattgtttattctgctttgtgtaaacctgttttaaagaaataaaagtagctgcttggccatatattaatgatgataactgagtttttgtttccttatctgtaatacaaaactctcatagagttgttgagaggaacagagataatggatgctaaacaagccttagctccaaaaattggtagcttctatggtctaagtgaaaattaatatacagaaagtaatattaagataatgaaatggatgagttttatatatatgagtaatttagaaaatgttctgctttttaatttttataatagtaataagggagatttggacattgagcttagttcttttcaaaagcaaagaattactttgaatgaatagttaagaggaactattatattattttgatagttaagaggaactttaattttgaattcttacactatcttaaattaagatttaattgttaaccgtaaccttttttttttttttttttgaggcggaatcttgctctctcgcccaggctggagtttagtggcacaatctctactcactgcaagctctgccacctgggttcacgccattcttctgcctcaggtcccgagtagctgggactacaggcacctgccaccacgcctggctaattttcttgtatttttttagtagagacggggtttcactgtgttagccacgatggtctcgatctcctgaccttgtgatctgcccaccttggcctcccaaagtgctgggattacaggcgggagccaccgcgcctggccaacggtaactttatatgatcttcaaccttctttaaaaattttttttggccacgtgtggtggctcccacttgtaatcccagcactttgggaggcccaggtgggcagatcacctgaggccaggagttcaagaccagcctggccaacatggtgaaaccctgtctctactaaaaatacaaaaattagccaggcgctatggtgcgtgcctgtaatcccagctactcaggaggctgaggcaggagaatcacttgaacctgggagatggaggttgcagtgagccaagatggcgccactgcactccagtctggacgacagggtgagactctgtctcaaaaaaagaaaaaaaaatttttttttatatcctctgtagagttatgcaatttctcaacagattatttttgtggctcacttatgtcttagacattttaagatcttttccctcaggacaggactttctttaaatatcttattgatgtatttacttttaagggagaatgactaacatgaaaaattttacatttctccatctaattcgtattttgtttgttacacactacaatgtaagttttttgacaaggttttatatgtatgttttcatttcatctgtcatgtcaggcctaaactcagtgtacagaattctcaatcttaaactttatgaaagctcatacagctattcaatctatatacttattttcagatatagttacttcggttaattttttaaccaagatatttcaatcataaacaatcattttatgtttagtggtttatctttttctttcaatattaaatattcaggttgtatacttcagtattgtgaagtgtgtttgagtcatggccatgatatgaagatc

SEQ ID NO: 1101 - DNA, 133760 bp, Homo sapiens
  Genbank Accession No. AL031737
gatctgataggttcggacttttcttttattcatgaggagggaagggggccagggcgcaagggagcggaggaccaataacgaaaagaaatcgccaacgaatatttttttccctcttttctaatccccggctcgacctcgttttgggggagaatttgaaccgccgtgaaaagagagggagccgatcccggcgagttgggggctgggggagaaggggagggggccaactttgtcccagtgccttcctttgatgaatgggccggatccgccgagtccccggcccccaggtcgcccacggctgctctcggagtcccggctgtatgggaatgtctgcctcgggtccggcgcctctctggagtctcgccttttctctggcctccgagggccagagtccgccctatttctcatcttctccctcgtcttacaccctctgaaattcctccagtgaggctccccgggaaccggcctagggtgacttgaagggaggaattctgaccttttctgtgtaatgtcagagccccggtgtccggttcttactctaccttcctgccgctctgagaagcccccagtaaccgtatctggttccgaggcttggcaaagtgggtctgccaagtgctaggcacaggtttcttcctccccttccagttccgccccgtgcagacgtctccagccgccgccgtcctcctcaggcccccaggccgggcctataactcctttccagcaggtagttgggtttacagggagttggtgctggtgtgaggatctgggggcccaaagaggtgggaaatgggagggagggagcccgtcaagacttgatacagctctgaactcaccaactctgagctccttgctggtgggtttgaggggacgccccaactgaatgatcaggagtcagggtggggtgatcagaggttcctgaattcttcgctttctgaagccagggtgaccagtagcctcaacctcgggacaccgagtcctgggggcgaaacgccctcccagcggggcaggacgccacaactgcaggccttttgtctcccgggggaaagagcgtctctggccccacgctggaggcaaaatacaataaaatgaacccagccctcaatctcaccccctgcccgccctctctcggcagtggggtcagccttgtcttagcctggggcgctcaccgctggctggccccagggtgtccccatccctccccttcgcctcacctgtgacctttgccccttgcagcatgtgacagatctccctcctctccccactctcctagcacaaggggctcatcagattttgggggggccttctgggaatgggggccctgatgaaaaacttgttgagctcatactctctctaactgagaagacagatgccaagtagctttcgaattggaagggggacaccggggtactttgcctggcccaagttatggggccctcccccgggagagattgggagatcaagctttaagccatagcatgtgtgcccagggaagacagcaacccccttacatcaccagccttgctggggacctggcctgctttgacctccataggtggatatatattctctgtgtgtatatatacatgtatttgtatcatatacacttatgcatacacacgtataacacacacacatatatattaggtatattgcatattcatccattcattcgtcactagctgtcctctgcctggaaggtttcaaggcacttcttccctgtatttgtggaatgggccagtgtgcttgcgtgtgaatataggcctgtgcccgggtctgtgtgtcaaggtgcaggtgggttttgtgtgtaggtctgtttggggtcagtttgagtaaatgtgtgtttctaagtgagggtccatgtctgtatttctgctttgaggtcacctccaggttgccttggtatggctctaagcgcgcgtcaggaatgtgtgagtgtgtgtttaggtcaattctcaagtgagaaaagacctccagggtgtgccaagggtgggaggctccctctcttctggccagtgctcatgtagcatcttgagctgagtggggcgagtgcatagctggacacttctgctgccagggaccctcagaacctcaggagtcctgcactggggccaccttgcccacagtgtggtccctcaccctccctgcaaaagactcacagtagtgggtgcagtagcgacacaggcccccagggtttctgcagctccgggattccatgggcccttgcagagggaagggttgaggtggggttgtctattggaatgagcgtggccgttcttgcctgttggagaccaatttcacaaatgatttttgcaacaattaaggagtgtggtggggtgaaatggcgatttcacatccagcaggggaaaggggggttcacctgggaactgtggctggggatgggggagagccgcgtcccctcctcttgtttccctttgcttacccccttgtctagaaaaagtcacccccatgcaggcttaatcaactcctaagacctccagttgctgctgggagggtgtgagggcttctgagtgtgtgggctgggccagacttgttccagaaagttttcctttagcccttgaccccctctttctatccctgtctctcctcaccctctttcaccctctttctctctgtctctctctcacacacaaacatttttcctgtctctctttccccctcagtctatcttatggtctcctccatctgttttgttcttttggtctctctttctcttttcctccttgcctttctggcttcaccccagcggcttttctctgggactgtctgtcttgtcaccgcctcccccatctccatggtttcctgaggtatgtatgggcctccattgctctctgggctgtaactcagacctgaatccctgggaagatcctttggtccagatgaggttggctaaagaccttggggaagagatcctccttctctgcttggtcttggggtgcatctcccggcccggcccagcccagcccactaatccgccaggaatcattcccgtctcagtgtggtctggcttggatgattgtctcctatctctagctcaccccgtctggtctgaaatctctgcattcctccttttcccttttcttaaaggcaacaacaatgctaataggaattcttcttcccaagtttccaagtggcatcttccaaacccaatttgggtttggaaacgggagagaaataagtaggcccaaggtacagaagcaagaccccagcttgagtttagctggggaaacttggcctgtctctggctgctccctcccaagacataggccacaaagaggctccctcctccctgcatccaagtggccaacagcctcttccctcagcccgagggagaggacgctctttatttcagtcccctgtgtcatgagcacttttggaaagtgattacccaataaatattcctttaaagggtgataaatccaccttgaaaaccaggggtttttatttcattgggggcctttgcattttcagaggctctggcctgctctgctagaggaggccaaagacatcaacaaatggaattactcagtcttcaaatgtttgataatgagagaggagggggtgggcgtgggggtggggagggaaactgaacatccaggaacaaaggactctcaggagtctccttccaggtttcggaggctggaattcctcagcgctacatttccaagaggcaccgaccttttattattatgcttttcttttaagaagtggcactcttctaggggtgagcttgaaataatctgcccaaacctgaatagaaacaaaaaggaaagttgatagcttgcttgacattttcattttccccagaaaaatggaatagtatgcactggattccagttctcaagaactgggcaagaacaacatcactaaagatacaacaacagtaataataaccaggtttctctcaggcctactgctaagtgggctctcgagtgagcctcctcccttttttcttcctggtcttcttccttcctctccttctcctcctcttcctctcttccttcaccctttctcttcctcttccttcccttccttttctgttttctctttctcctctgttttcttcctcttcctccccttccttttctgttttctctttctcctctgttttcttcctcttccttcgcctcctcctcctctacacctctttttttttttttttttttttttttttttgagacagggtctcactctgtcacccaggttgaagtgcagtggtgtgatcttggctcagcgcagcctctgccttccaggttcaagcaattttcccacctcagcctcccgagtagctgggattacagggaccccccaccacacctggctaatttttggatttttagtagagatggtgtttcaccattgttggccaggctggtctcgaactcctgacctcaggtgatccaaccacctcagactcccaaattgctgggattacaggcatggggcactcttcacctcttttccttctcttccttgtgttctccttcctcccctcctcatcctcctcttctccctctccctctttctccttcctccattcttccttctcctccctgtttcttatgtctcctctttttctccttctcttcttctccttcctccttttctcctcctctctgctttcttttcctccatttctcccttcatctccttctcaggctggtcctgggagccttttacctctcaaggttctggaaataaagacaagcaaggctaaagcttagagagagacccaagacgggccaaggtgcttctcccacttctcttccttctcctctctgcagtttcctctcctattaatgcttttctactggctttcagagatgcggttgaagccatctttacagagtgttccctgatatctgtaaaagccttttcctctctgcccgtgtctggtaatccctctttcctttccatttctcaagtggaaaaagaaccttcccaggaggaagagaatacccctcctcccctgccagcccgccccagtctggtcccagtggtttaaaggtaatggattgggatgaaggtatattgggatacgttcatatgaatatgtgaagctgagggcatgtgtgcacctatgtaagagtatacaagagcctgtacacaagagagtatgagtgcgcctacatatgtacttatgtgcatgtgtgtacacacgagtgcatatgctcatgcagagatgtgaggtagggcgtgtgtaacaggaatttctctctcttggcaccctttggaagcttcgggaggaaagcctcctcccaaactcccagttgccggaacaaaagaccaagtgtcagacggtgtcgaggcaccttctccaagttcaatttgcaccaagtccagcattaatgggttgtagacattgcccttggacaattaccttatcacagtggagcatctgtgggaccttcaaagcactttcattaaacaatcaaagggatgtggtgagcccagcactggccggcctggagctccaggctgtgcacaagttccagggaagcccacaagcccaggtgaactttccctccaggcccccaggctttctcagggctgaggcaggatgggaataagatgaaaagatcaaacgctgcctgtactccaccttagattggcttgttgagacgaggaagctgatggaattgagttttcttgcttgcaagtctcctgcttccttctctccctggggatctccctcctctatcatggttcactccatgcagaggggtctttcctctcccacatgcaggaggagcatacggatggacttggtagaagcttatggaagctccacagggacaagggtacttgttctgtgtattcattgctgtatactatataccatagtagatgctcagtaaacatcattgggtgaatgaatggatgaatgaattatcctagcacattgaaccttggcttgctctctatgtgctaaggtttcctcataggttaactggagacttgtcccttggagcaccacgagggtgcatggccatataggcatggtgaacagtgctccaacagaactcaaaacatggtgatctgtactgtcctgaggagcagggatgagttgggggaaaacgcctagcgtcatggttggtctacagttggttggcagtcaacgcaagctggcttccttgtttcccacttccttgatagttggccactgggatttttttttttgtatttatctctgcaattctgggacggagctcagtgtctgaaagaacacagatggtgcacagtaaagagctgaatgatcttgaagttggaagcttatgttactctttgaccttgggcactcacgtttataactagaatttttgaatgcccactctgtgccacacaattgacagtaagcctgcttaatctcaaagctaccccaagtaggagatagcagcatctctattttacagaggaagaaatagactcagggaggctcagagaggagtccaaggtcaaagagttatcagatagcatggaagagatttttcttttcttttttcttcttcttcttcttctcctttttttttttttttgagatggagtcacattcttgttgcccaggctgaagtccaatggtgtagtctcggctcactgcaacctccgcctcccccgttcaagcgattctcctgcctcagcctcccaagtagctgcgattactggtgtgagccaccgcgcctggccgggaagatatttttcacttaggcctcctagatttcaaagctcttttttgcttctgtttcttctcttgcagcatcagtttctcttttgtaaaccagatgatcttcaacactgagcacagagactggtgcatggtgggtactcagcggtgttattaaatgaatgaatgattgaatgacggaatgcagctgaaacattctgatgactgtgagattttagatactgccttgggagtcctggtgggggtgtgggactgtaggatcagagaatgttactgccaggaagcagcatttgacatgcccttgctcaaggattttgcagcttagagagcctcacttgctttctgggagttctggggaagccagagaggcttttgctgggccagaaggtgcttagcctggggaaggaggtggccagtctaggggtactcaggagcctctggcgggtgcccggtcttcattgaaatgtatagatggaagtgagaatgcactgcatatttgtctaggtgaattaaaagcacaatccccatttcccagagggagcagttggttcatatttatacatttagtcttacaggtgtaaaataggtttcctttatgcttatataataatttttcatttgaatttcaaggctttattcccttctttggattcaagtcttccacctgaacccgattctctccatagccattaattccttcatcataaaaatgaattccatctaattctctatagtggcagttagagcagatcaaaaagtacctttgcaaagggctccccccgcttctaccattgtagtttccagctcgcctgagtacccacgcccctaccaatgctgagtttcagaaaccagggcttggagcagaaaaacttatttctctcatcagaaagggtcatgcgcttgcatgtgggtgtgtgtgtgtgtgtgtgtgtgccctcatgcacatgttggcacccacaggtgcattgtagaaaatgctcctcactttcagaaaggtagcaaccacaacaacgataataatgatgggccgggggcggtggctcacacctgtaatcccagcactttgggaggccaaggcaggtagatcacttgaggtcagaagttctagaccagcctggcggggcacagtggctcactcccgtaatcccagcacttttggaggctgaggtgggtggatcacctgaggtcagaagttctagaccagcctggccaacatagtgaaaccctgtctctattaaaaataaaaaatcagctgggcatggtggcgcatgcctgtagtcccagctactcgggaagctgaggcaggagaatctcttgaacctgggaggcggaggttgcagtgagctgagatcgtgccactgcactccagcctgggctatagagtgagactctgtctcaaaaaaaaaaaaaaaaagaagttctagaccagcttggccaacatggtaaaaccccacctctagtaaaaatacaaaaatgagccaagtgtgatgtcacacacccgtaatcccagctacttgggaggctgaagcataagaatcccttgaagacagagaatcccgggagacagaggctgcagtgagcaatgatcatgccactgcactccagcctgggcaacaagagtgagactctgtcttaaaaaaataataatcataatggtaactcagtactcacaatgagccggacgctgtgttaggcatgttccattcattatattatttaattctcatacaaatccatggagtagatattggcatccttatatgacagatgaggagataaaggtcccgagatgtgaaataaattgcctagggttgcatagctaggagaaagcaggccttaaaattttaaactttaagttatttatttattttaataaatgtttaccattaactatttagggacagagtcaacaccatcgagtaccccttccctgcctcagtccctttcttctctccccggaaggaagcacactccctaaggtggcatctgtcgtttctctacattttgtagtagcctggataacggccctagaaatatcagttcttaatccctggaacgtgtaagtgttaccttcaaatgaaaaagggtctttgcagatgtgactaagttacagatcatgagatggggagattatcctggattttcttggtggcccctaaatgcaatcacaagtgtcattataagagggaagaaaagggagctttgacacagatggaagagaaggtaatgtggccatggaggcagagactgggtgatgtggccgtaagtctaggaatgccggcagccactagaagctggaagaagcaagggagggattctcttctgcagcatccagagagagcgcgttctgctcacctgacaccttgatttcagccccgtgatagtaattgaggacttctgacctccagaccatgagagcataattttttgttatttttagtcaccaggtttttaggaatttgttacagcagccataggaaacgaatatacatgcttttataattttttttggagacaggttctctgccgcccaggctggagtacagtggcacacacacggctcactgcagccaccacctctccggctcaagcgatcctcccttctcagcctctcaagtagctgggactacaggcacacaccaccatacccggctagtttttaaaattttttgtagagacatggtcttgccgtgttgcccaggctggctttgaactcttgggctaaagtaatcctcctgctttggccttcaaattgctgggattacaagcatgagcgactgctcctggcccatattttttactacatatgtatattaaaataaacagtttttacagtttatgtaacagtatactttaggcatcattctgaaacttctcttgctcaacatcatgttttcgagattatcgttattgacccaggtaatgttggtttcaaagaaagaaagagtctcacttgctgggcagatgcagttggattctgaaggatattggagttgcatctgcagaatgggctctgcagggcaaatgcagggttggctctggctgccacgttcttttttgttgttgttgttgttttgagatggagtcccactctgtcacccaggctggagtgcaatggtgcaatcttggctcattacaacttccacctcccgggttcaagtgattctcctgcctcagcctcccaagtagctggtattacaggtgcctgccaccacacccagctaacttttgcatttttaggagagatggggtttcaccatgttggccaggttggtcttgaactcctgacgtcaggtgatccgcacgctttggactccctaaatgctagggttacaggcatgagccatggcacttggccgctggctgccatgttctgaaagggtagggccacacccactctgactgcacctccaggtacggggactcagctgaacacaggtttgccatgtgtcaggaaggccgggtttgttagggacccagtttcatgtgaaccgagggattctgtgtctctaagaccttggagagtcaagaggtttcaagccatggaagagaaagatacgctagccgggcgcggtggctcacgcctctaatcctagcactttgggagtctgaagcgggtggatcacctgagttcaggagttcgagaccaaactgaccaatatggtgaaacccctctattaaacatacaaaaattagctgggcatggtggcattcatctgtagtcccagatacttgggaggctgagacaggagaattgcttgaacccaggaggcagaggttgtagtgagctatgatcgtgccactgcattctatccttgtccacagagcgagactctgtctcaaaaaaaaaaaaaaaaagacactctaaaggaaaactcaaatggaggtgagaatgcatgtgtgtgtatgtgtgtgcatctgtggatcagtgtgagctcctcgaggtcacagacagtcttgtctcccacaggacctggaaaactgtgaatatctgttgaataaatgaaaacaatttgtgggaatgggaaggggggttggcaatccatcctgtaaatataagtatctgactatatatgactgttacaggttgtaagattgaaagtgaattaatggctatattccgagaattcatctaagaaggtgccatgtgtgcctttgtcaaaggtaaactgtcagtttacagttatggagtcttcatgtccatgttttttaaaaaccttggctctcttcttgatactgcatggtatggaggcaagctgttattatccccagatgaaagaaacctggggactagtgtggtgaaggggttttctggtgtcataaaacaagcatgtggcaaagccggggttaaacctggtgagtggggctcaggaagaggacacaagttttgaaatctgacaagctaaattttaatcttggcttcaatcctcaggagctgggtttcttggggcaagttacttaacctctctgaacttccatttccacttttaagaaatgagcacagtgatacttagcttgtggagattgctgcagagataataatgcatgtagagcggctggcacttagcagggctcagtaaggggcatctcttatcttttatcctcaattgaatattatttttcctcttgcagtcctaggctataatctacattccgccaaaaattatcagggaaatttagagaagcaagcagccaaaccagttggctggcatcaactgttatcaccagggggcttgagttatccctttttgggggtcattggggcgtgatgacctatgacctgtgaccttatgaggcagccagcaggggtaggaacccagtggatttgggggtcatcttagacttctgaaaagacctgatagaccactttccaatctggggtttttcattacgtaggggacagtaaatcaaagagactgccccaggctgcagacttaaaagggcccaaggctggtggagctgggcagggaagatgctgagggggaggagactatggctcccctggctgggatctgaggcaaacaaagtgacacgcggtggggaagataaaacaccgaaaataaaattgacagcaaatggcacactagattaaatgctttcaatgcctctgctgaaaagggttaatatctttgctatataaagagcacttgcaaatcaatatggatgatgaacaatctctgggcaaaggacatagacaggcaatttatgaaagacatactcgagggctggtagtatatgaaaaatggtctgtcttaccagaaacctcaaagaaaagcaaattaaaacaatgatatgccatgccccgcctatctaagtggcagttgtgaaggggagaatggtactatcaggatgactgagaggtctggaacgtgtgactcacatactgtgtggcagagtaaattactgtgctttctgaagggcaatttagcaagtatgtatcaaaagctctagaaatgtttagaaccatccttagtacatcactgtatgcctaggaatttaccacgcatatgtgcaaagatataagtacatcacaatatttttttctaatagggaaaactggaaaaaagtaaacattcctaacaataggatattgacagatatattatgaaacatccatataatggaatactccaggccattgcaaggacacataataagaggcaacaatgtgtaatgtttctaggctataacccatattccaccaaaaatttagcttcatgctagcaaccatcctaaatgacttacatagattagctcatctaattctcctaacaactgtttgtgataggtacaaatactatcatcccaattatactggtgaagaaacggagacactcagaagttaagtaacttgtccaacttcccttatctggtaagtggcagacgccagtgtgaattcaggtagtttggcttcagagtctacatacatgttctttttgttttttgagatggagtctcgctcttcctcccaggccggagtgcagtggcgcgatcttggctcactgcaagctccgcctcccagattcacgccattctcctgcctcagccttccgagtagctgggactacaggcgcacaccaccatgcccggctaatttttcttgtattttttagtagagtcagggtttcaccatgttagtcaggatggtcttgatctcctgacctcgtgatccactcgcctcggcctcccaaagtgctgggattataggcatgagccaccgcgcccggctacatacatgttctttatttttatttttatttttttgatacagggtctcactctgtcacccaggctggagtgcagtggtgcaatcacagcacagtgcagcctccacctacctgtgctcaagtgatcccccaacctcagcctcccgaatagctgggactacaggtgtgcctcatcatgcccagctaaattttgcattttttgtagaagttgtggtttcactatgttgcccaggctggtctcgaattcctgggcttaagcgatccgcctgcctcagtctcccaaagtgttgggattacaggtgtcagccactgcacctggctgagtctatgttcttttttttttttttttttttgagacagtttcgctttcgttgcccaggctggagtggagtgcaatggcacgatctcggctcaccacaacctctgcctcctaggttaagtgattctcctgtctcagcctcctgagtagctgggattacaggcacgtgccaccacgcccagctaattttgtatttttagtagagatggggtttctccatgttggtcaggctggtctcgaactcccgacctcaggtgatctgccctcctcggcctcccaaagtgctgggattacaggcgtgagcctccacgcccggccatgagtctactttcttaatggaactatcctatcccttgaaatttgtacctggaaaaatttcatgacctgcaaaagtattcatgaaacattgagtgaaaaaaaggcaacttcccaaacagcatgattctacttaagaaaaaaacatacttatgtgtggaaaaataacacccaaagaatatattcctaaatgatgagtgagtactcctcagggttgaggttatgggtgatagctattttcttctttttgcctccaaacattttgtaaattttctataatgagggtcacaacttttaaaaataagaacacccatgtgaaaattattacaatgaaaagaaacagactttggacccatgttcaggcttcagcacctaattgctcctaacccaaggtcaaggtgaaaaaccaagagagccatggccactcttgatgcttctgcagactcttgtgccatctctccattcccttccttttagggagtgggaggcagtggtgtaatttacctccacctaaaagctaagacagcatccagaaacacacatttattggacgcccacagtgtgccagccctggagccaagcaccagggaacagcagcgaccaggctggactcctgcagtctacagcagacctccagtcccagccacgtctgcttgactttgagttctgtgcccaactgccatgggattctgctcccaggttaatataattgtttttcactcttttgcctgaatcatccaaacagcatcaagagcacaaaacagtgatctcaaagtgtgggccatggaccagcagcatcagcctcacttgggaacttgatagaaatgcaacttctcaggccccatgccatgcctactgaatcagaaactctgggtgcatggagaggggtggtgggcagcaatctgtgatttgtttttgtttttttgagacagggtctggctgtgtcgcccaggctgtggtgcagtggcacaatctcggctgactgcagcctctgcctcctaggctcaagtgatcctcccacctcagcctcccaagcagctgggactacaagtgcaagccaccacgcccggctaatttttgtattttttgtaaagataaggtctgtcaatgttgcccaggctagcctcaaactcctgggctcaagtgatccacctacctaggccttccaaagtgctgagatcacaggcatgagccaccacacccgaccagcaatctgttttaacaaaccttccagaagattcgtatgcacgctaaagtgtaagagtcactaaatcacaggcaccgtcatgtgggttgagagcaattgagggtgttagaagcgtttctcattttctcagatgcccccaaagtggctggctctgctaaactcatttttgaaatcctgaagacaggctctgggaaatgagttagtgttctccatcctcaactcccctcccctccttcagaacactgctgacagctgattaatggggaatgactctctaaagatttctttacatatattaggctaggaaagtctttgtaaactttctgtggcaattgtgcctgcaaagattccgtccattggctctccttggggatggagaagttgtatttgtctccttgcaatttagacaatgacttttattgcttgtacctctctgggcagtgctggtctgagagccgggggtccacctgggtacccacttgggctccagcataaattcactctgtgaccttggataagtcacttcccctctgggcctcagtgtgctcctctgtttaatgatgaggtcagatggtccctaagcttgcatccgtgatttgaaacctggaaatcctattctgttctgaatttccagagctgggcattattgagaagattcatggagatatgttttatatattgattaagtctagggaagagactcacggagttgtaaagagaggatgcatgtgttttagtgtgtatgtttgtgtgcatgtgtgtgccctaaagactgacgtgggctgaagtccgtagaaagaaagggctgatgcacatagaaaaggtacctttcagttttctttccttttttttttgaggcagggtctcactctgtcatccatgctggagtacagtggcacaatcatggctctttgcaacctcgacctccctgggctcagtaatcctcccatctcagcctcctgagtagctgggactacgggtgtgcaccaccatacccagctaatttttgtatttgtttgcagagacggggtcttaccatgttgcccaggctagacttgaactcaactgatctgccttcctcagcctctcaaagtgctgagattacaggcatgagccaccatgcctggcctcccagttttctttattctctaaaagatacattaacaaaaagcgttgactgatactggattactgcaaattgcaaactatggcccactcaaatgtactcattgcagagtcaaacattttttcctctactcatgggcaccaatgtctttacattaaagctgggaatctacattaaaatagtacttccttgggatgaactgggagtttctttaaaagcctttctgaggtaaattctttatttttccttggagtgaaaagtaaattctaaagggtggggaagggagagggatccccctgaaccgagccttccacttcttatgccaagatgtggatcccctgaacctggggcgggaatgtgttggtgggagcaggtggctgcgccacgtgcctacagctgcaagtggtcttgtctgtccctaagtgtatcagtttctgggtgcaccatgatgtatggaaggctggcaagtgaacacctacactttctccgtgggccacatccatggtttgcaaggaaaagagcatcttctcttgtctcctgcagctgggtaatgtctgctgatctacagctgggcacgatgtccaccaatccatagctggctgttggccactagccacagctgggcagactcactgctctcacagtctctgtctagtaagggagacttagcgtaccaaccactctggcccagggcatggcctcccagctgtaagcagggatcaagatttatagtggccctgtcagctgaaagtgcccagggcaaacagtcagtgtagaatttaacacccctggtcctatgtagacaccaactgcaataaccaggctgtggagctgataatcttaaccatatcagatacccttggcttcatatcctcctgactccacagctgtgtgatgtagggagagtcagtttacttctctgtgtcttcatctgctcatctataaaatgggaatgataataatagctacctctcggggactgatgaaaggattaaataaagcaaagtatgaaaagcgcttagcgcagtagctgcacaatacatggctttttaatatttattttatttattttgttgttgttgttgtcgttgttttgaggtggagtctccctctgtcacccaggctggagtgcagtggtgctatcttggctcactgtaacctccgcctgccgggttcaagcaattctcctgcctcagcctcctgagtagctgggactataggcacccgccaccatgtctggctaatttttatatatttagtagagatggcgtttcgccatgttggccagtgatccgcccgcctcggcctcccaaagtgctgggattacaggcgtgagccaccacgcctggacttacaatacatgtcttaatgttattctcattagagattcatcacaaatgttgactgaaccaaatgtggtgtcaatccttaagctgctgtgtagtcagagggataatgtggacatgaaaatgaggaattattcaaaagagcctgggctctgtggccaggcatctgggttcgaatcctggctctgcagttttccagctctgtgactttgggtgggaggcttcacctctttgagcccatttcctctttggtagagagcatctggcttataggactatccagagaggtgaagaaccagaacagactggccaggatgcagggttcacactccaggcagggttggagctctgggacttgcttatttgaacctcactggaacaacttgctctttttttaaattaaatttatttatttatttattttgagacagagtttcattcttgttgcccaggctggagtgcaatggtgcagtctcggctcactgcaacctccgtctcccaggttcaagtgattctcctgcctcagcctcccaagtagctgagattataggcgcctgccacctcacctgaataattttttttgtatttttagtagagacaaggtttcaccatgttggacaggctggtctcgaactcctgacctcaggtgatctgcccatcttggcatcccagagtgctgggattactgatgtgagccaccacgcctggcctattttatttatttttttgagatggagtctcactgtgttgcccaggctggagtgcagtggtgtgatctccacctcctgggttcaaattatacttctacctcagcccccggaataactgggattgcaggcacctgccaccactcccagctaatttttgtatttttagtagagatggggtttcgccatgttggccaggctggtctcgaactcctgacctcaggtgattcacctgccttggcctcccaaagtgctgggattacagacgggagccaccgtgcccagccaacaactggctccttttgctggcaagtggtacaaatcacttgcctaaagacgcacaaccagtaagagggcagaggcacgaatggagggcattagaaagaagactccaggaagaattgcctcaactctgatctaaaatgaccctcggattctctgtgagaaaggagccctggtgctggtaggaggctgtgtgtttccagaagcccataaccaaagcctctccagggtcgggtttttctccggctctctgcagaggcagcatctttgggaggtggccaggagcaacccagcggagccgcttctctgcctgtgatctgaaatctcccccaccgcggctgcagctataggcagagagcaaagaagagtttaggctatttgcaagctggaagccatttcaaagggaaggctggtccttgatattccctgaaaatatctgtagaaaaaaaaatgtttttggattataaaagcaacacactcgctctttgcaaagtacatagagcaaaataaagactggccagggaatctgccctgcatttttgtgtgtttgcttcagtatttcccccgtccctacatttgcaactgtactatggtttcaagtgctatttcactcaagtctatatgaaaatacttcttcgtgtctttagttttttttttttaatttttgcaggcagcatatttaatagctacatcatgttctcttgtatggagttacacagtttcattagccattctcaagtgggatttctgcaggttgcttttcccttcccgcaggatgaataacccccagtacacctgctaaataagaaaccctctctctaggccccagggaggagtgaagcagggcaaacctcctcttgagtcattttcccgtcgtttgcagtgggaccaaaactcactttggctccaaatgcttcacgccagaaccttcaaagaaaggacttccccctcttctattaattgggcaatttggaaaccaggacttgagtaaaaatatatttttttccccagtcattctcaaattgcttattcaccaaggtaaagcatccagccaaagtgagggaaaatgaaaacaaaaatccaactttgaaccagctgtgccgtgttgtgtagacaaaataaccctttgacagaccaatcggagcaccttttggacctgttgacgctccacaatgtcagcgagacttcagctgctccagcggttttggcctttttttctttctttccttccttccttccttccttccttccttccttccttccttccttccttccttccttccttccttccttcctccttctctccctttctttccttcctttctccctccctccctccctcctttctttctctctctctttccttccttccttccttctttcagttggtttgttgcgccaacaatatttcactattaaagagagagaaagaaaaggaagaaaaagatgaacatattgtctcctggtccagaaaagggagattggttgtgccttttatttcttttgtttattttttatttttatttatttattatcattttaagagatggggtcttactctgtcacccaggccggaatgcagtggcataatcatagctcactgcagcctcaaactcccgggctcaagtgatcctcctgcctcagcatccccagtagctaggaccacaggactgcaccaccactcctggctaattgttttatttttaaatttaatttatttatatatatttttgagacagagtattgctttgtcacccaggctggagtgcagtggcatgatcatagtgcactgcaacctccgcctcctgggttcaagcaattctcatggcttcagcctctacaggtatgcgccaccacacccagccaatttttatatttttagtagggacagggtttcaccatattgaccaggctggtcttgaacttctgaccttaagtgatccacctgcctcggcctcccaaagtgatggaattataggggtgagccatcatgcctggcctatcttttattttgtagaaacaggatctcactatgttgcccgggctggtctcaaactcttggcctatagcaatcctcctgccttggcctcccaaagtgttgggattacaggtgtgagccaccttacctggcccttttcttttttctttctttcttattttacatttttttattgtggtaaaatacacgtaacataaaatatactatcttaaactgcacggttcagcagcattgagtacatttaccatgtcgtgcagccatcactgctgcctagccctagaacattttcatccatcctgaaataagccccgtccccacagcaatccttctccattctgcccccagccctgggcaatcacttcctttctctctagacttgcctattctgcacattttatttaatggcatcatacaatatatattctttttttttttgagatggagtctcactctgtcactcaggctggagtgcagtggcgcgatcttggctcactgtaacctctgcctcctgggttcaagtgattcttgtgtttcagcttcctgagtatctgggactacaggtgcctgccaccgcacccagctaatttttgtatttttagtagagatggggtttcaccatgttggccaggctggtcttgaacccctgacctcagataatcctcccaccttgacctcccaaagtgctgggattacaggcgtgagccaccactcccggccgtatcctttagtggctggctcctttcagccagcataatgtttgcaaggcccttccatgttgtagcatgtatgagtaccttgttcctctcgtggctttgttccctttatccattgcctggatatacccgtttctgccactttgagtttggcgatccatcaggcagctgagtggaggggacatcgtgatgacggcttgctgaaaaatgagcagactgcctcacatgtgccaatcatctggataacttagtctgtgtggatggcagaattaatcaagtggctttcggatgagactgtctaatttagtcatccacgttggctgggggtgttgggttttctcatctttaaaaaggaaatggtgttatgtttttaaaaggttgctgtagggattaattggttaattagcatgaatacattaagaatgattactattgcccatctaagcaggttaatatggttcatttagtctctgacatttcacttgttttgttaagttctagcttcattatttactcacagaatcacctggctgagcctcagtttcttcacacatgtgctttatttggctgttgagaggataaaataacttacaaaagaaagtgcaaaccacacatcaaacatttttaatcacctaaaaagaagcaacagagattagtttggcttttggtgtatataccatcttcttcctaaaagagtaaagcatgattaaaacaaaacaaaaatcctataggcctattgaaagaaggataaaagaacatatagagtcattaaagatgagagctggggagataaatagttgaattggaaaccaagaatgaaaacagctatggcagttgagtataaaactttgctttgagcttcctggtggccaaggcaaaaagggaaagaaagtgagtagaatcagtctgatgtagagtatctcaatatggacaccgctgacatgttggcctggacaattctttgctctgatggctgttctctgaattgtagggtgtttagaacatccctggtctctacctattaggtgccaatagcactcccacttactcctctttctggttgtgacaataaaaaatgtctccagacattgccaaatgtcctctgtgagtgaatactgcccctggtggataacttatgatctaatgaaatgaggcaaatcttgatgtggggtctttggttaaaggaccaggcaaggtgactaccagggccttcagagccagggtctcaaagtctgcagacaaattttcaggctgtgctgtgcccaacctatgatgacaccagacccaagtctggtgatttctatcagtgaagctcctcttctctgggtgacgctgttgcttctcccatcctatgaccatctcctttggttaaggccatttccaggctctaggctaagggccttgtgtgcacagcacaggctttctcttgtcaagtcctcagagttggctttctcttgtcaagtcctcatccttgtaatcattatgacgtccatttgacggatggggagactgagctttggataggtcgagcagcttgccaaatgccacactctacgtggcagaaggggattttgaactgaggtaacttggccccatacttttaactactagagcaatgcttttcaactgggcgatgattttgcccccctccccgcccccccgccccccccagtggacaattggaatacctgggaaagttgtcacaactgcggttgggggtgcccctggcatctagctggtaaggctaaggccgccccccaacacggaattgtaccctgcaacatcccacctctcttgagagtggtccagagcgaggagatttgggcctggcaagatgcgggattctggaagaggagggaaggtggtggaccatggtgcccctggggtactaactgggcttggctgccttctccacagcctctccacctcctagaagagaggcccaggcctggattttcccacactgctgctgatgtctgcatgggcacggagagtcctgctgctgcccaggaactcatcctgaagtttttaagattctagacacatttctttctttatttttagttgatgaggaaaagttggaagataaatgtataatcctagacctgcagaattgtcagaggccattatgctgagcgtcacgaggggggctctggagtcaggcaggactccaggcaccaactgccactacctaccaaacgacaaggctgactctgcctcctctgaggccaccacactcgctgctcctcctgctccctcacctgcactgtgaagatagtaataggacccagctcacagtgttgttggaggattcaatgaggtaatgcctgtggcagctcttaccattgttgttattaccagaattaggaatatctctagagctgatctcatccaatcccttggttgacaggtgaggaaaaatgaggcccacagaggcgcgacaggcaaacacccagcggggcaggtgctgggacccctctgccagcccagagcttgctgcaggacccattccagaaagaggaggaattcccagctgaggtaggagctgatgtggaaaccccttctccagcctttccctccctgaaccaatttgtaattaatggcttgtggccacgtttctccccgcctccagggcagacttgtaaaacctgtaggagaagctgctgtgggcagggtagctggctaggcagccagcttctctgttccagcccctttgtccctttgctcctgcaggaggggggatggcgccgcctcctcatccctggcgccccactccgtccccttcctgcaggccagcaatccacggttgtccaggctgtaatttgtggctggtgctgaggctgtgctggggtgcggtgcccctctggggatggggagacacagcaggcagggcctcttcctgcagtgctcccagcagccctctgaagagttcaggaggtgccaggtgcaggtgcacggggtgcacgatgaccaagaggaacaaggatgatggtggtgccaggcccagccagggtacaaagcctgaaagcttagccgcttcccctactcctcccccggccccgtgggcgatgccaaggcagctggagttccgggagttgggggcatctctgccatagctgctgactttggcaaaaaagaaatcctcctccttaataccctctccctccagaatgacagggggtttgaagttggcggtggaaagggaagacaatcttgttactaatgtaccataaagtacaataaatattctgctgacagactccgaacccaggaaacaattctgaaatcctcaaatgataataataatataaacagaagccaaaccttcctgaagcctctttcttctttggtaaaattttattacgatgggaagtgaagtcacgctccctcctccacccccacccctcctgcttcttccaacctggcacctctcttttgggtcaaggtcttcctccttggctgggattttacaactttgaggccagggcacctacaagtgggttgggacagggtgcccttgtctggaaccctcctgaaggcatgcatggggctttctcgaagctggccaaatacctcccagtccccgtctctctctttctgccccccataagcacacttgccttcaaaatgggtctccattttttcattaaatccaggagttgatagggagggattgacctggctacttcaattaattttttttttacctttcaaatcataaggttccatttcctttggaggaggcggtgtgttgcagggtgctgcagagtttaaaacgtagggctgtatttgaatgtttggtcttgataggcgatagggaccagcatggaaaatcatctttatcaccccaatatggaaggtaaagcgtgcggcctgggctggcataccaagcggcctgtgagcccttatcgtaatcccaggagccgcccccctctccatcacctctgctattccaggcaagtgtcagaccgtcttccctgctgtacagagccagatagcaccgagctgggccggcgcagcgggcataataagaagtggaaattgctcccaaggaaagtttctgaggaattaacttctgatgggtgaagggggcagtgtgggggtgggcaggtggggaggggtaagggagccgaaggaggaaggtgaggacctgggccaagacaaggacgccagcagtctccgaggaaggaggcagagaccttagagagactttcagaaaggctgtattgctcccattgggaaaggcaggtgggcccacaactgctgtggccggcagagagagctctgggacccaggagggccctagagacccccagctccctgaggggatgaaggatctgaatgcttcctttgggggtcagttgtgccagatgggctggactgcacgtcaggcccaagacattgagggactgtgggtgcaacagagccgtggccaatgcctttgctgattctttctctgagcggcctccatacccgtcccggcctcaatcccttgccttgctcaggctgcttaagtggaaggttcttattcttaccccatgaggaagactcctcagccccgtagcctacaaaacatttccttccaagcattatttataaacgtctgttgagcacctactctgtgcccggtcctgccccaggcactagaaacccggcagtgaaggggaaaggtgaggcctgggcagacactcccctgtgcacagatgcaagaaaagagatggagggagcatgatacgctctaaggaaaatgaaatcaggccgggcatggtggctcaggcggggaatggtggctcaggtggggaatggtggctcggtggggagtggtggctcaggcggggaatggtggctcaggccgggcgtggtggctcaggcggggaatggtggctcaggcggggaatggtggcgcaggcggggaatggtggctcaggccgggcgtggtggctcaggcggggaatggtggctcaggcggggaatggtggcgcaggcggggaatggtggctcaggccaggagtggtggctcaggccgggcgtggtggctcagacggggaatggtggctcaggtggggaatggtggcgcaggcggggaatggtggctcaggctgggcgtggtggctcaggcggggaatggtggctcacgcctgcaatcccagtacttcgggaggccagggcgggaaggtcatttgactagcctgggcaacatagcaaaactccatttctacttaaaaaaataaaataaattagctaggcatggtggcatgcacctgtagtcccagctactcaggaggctgaggtgggaggatcccttgagaccaggaggtcgaggctgcagtgagctgtgatcatgccattcactccagcctggatgacagagtaagactctatctcaaagaaagaaaaaaaaagaaaaagaatgacattgggaggtggcataaatgatggagcggccacatcttagctatgagattttgggccaagtacttgtctctgggccttaattcctcacctgtagaatgaggatgcagatatgcatttcctgggctttgggtcagtggcgctcagcacagggcctggagtgtggtcactgctaactgaagctgtgctccagctctactattagcaaggggaagtggggaccaggcaggtgctccagcacgaagctctgagggtgagagctctggaaggagattggggcttttcctccatactgagcgtgtatgaggcaggtctggggtcaggctttctggatttgaaccctggtcacttgcttcacagctttgggtctgtgggcaataacctgccctgtggcctcagttttctcacccaaagattgggaatcataatcgtagcttctttagagagctgtggccaggattaagtgcattcctctggaagtttctctgagctgcagcgtgcgagctcttcatatgacagattcgaagagctgtttgtccacgtgtcggggcctcagtgaggggtggggaaggagcttgggctgggagctgagatccctggcttcttctctgagttgacacccatgtgaggttcccaccatccctggtagggccaccactcgggggcggaggggccgcctgggtgtatgattgttgatttgcagggaccctcaggagagctaatgtggcaagatacccagagagggcctgtgagcttcctaaggccacacagcaagctggaaggactcaggcctgagccaaatgcatctgcctgcctagtcctttcaggggcgtgcggaagggtcactaggggagagagctcttagttttagctgcgggcgagtgatcatcctggagtaattgggtgctaataccattatgcctcccatttcatactctatacgttcccagggctctctctccgaggatctcaaagccctttacatgacaatgccaccattaactcataaatcctccctggcctgctgggaggagaggtgggtggtatgtgcaggagactgaggaattaacctcaattatttcccagtgattcagccgtcatagaattgtcaggttggctctggggtttggcgggccccagttagtgctggtggggtagagcctgggaggggactggtgatatctgctgagcggagcctgttctccaagtcagcttgttgtccacgatgtcacctcatcattttcagaacagccctgcgagttgggtagcagtgttcccattttacaacaggagagactcagagaggtgcaggactcacctaaggttacccaggtagtcacagcaagcctggagtttacccccagccatgcctgtgccaccaaacacacgaggttctcagagtggggcagggctaggctcgagggccaggggccttgggacaggatgctctgccccctaccaacatgcagtgtgactcggggccagtgctgtccgtctctgagtgggtctccatgagcacctgatggttaagacctcaggttgactgcttaccaccatttgtagggactgctttgccccacactgtgggagaaatacaggcccctgaaggagatgggtgaaagatgaagggtggctcatgcatgcatgcatgcattcattcactcacacattcattcattcactcatgcttgcattcattcattcactcatgcattcattcattcactatgcattcattcattcattcattcactcattcattcactcatgcattcattcattcattcactcatgcatgcattcattcactatgcattcattcattcattcactcattcattcactcatgcattcattcattcattcactcatgcatgcattcattcactatgcattcattcattcattcactcatgcattcattcactatgcatgcattcattcattcactcatgcattcattcattcacttttgcattcattcattaactcatgcatttatttttcatatgctcctgtgtagggtggtagttaacagggtaggctcgggagtcaggctgcctgggttcaaatacactcactgtgtggccttgggcaactggcttcatctctacctctcagtttcttcgtttgtgaaaggggatagtaaagcagtcaccttaccgtgttgtccacttgtgtatttcacaacaagatcctgagcacctaccacatgccaggcactgttcttggccctgggcacatggcagtaaacggaacagacaggatcactgcccacgggggcccagtgacctgggggaggcagaccacactcatagtaactgtagcattgccaggtgatgggagtctcagggggtttgagatggtggtggggattgcagtggatcatccacacggggcacctcgtgtgaggctgtgtttcatttgcatcagcatggattttgactagctgggcactacactgggacctgggggcaggagacacatagatctggggcatgtgtgatacttggtcacaaggcagaagtagcatctcccagtggcaggaccagggtgccctcccaccccttaccctccaccctgaccttggaggaggagggacatgaagccttcacagagcccaaagcctgggtcccgagagcgctgggcacagggcgtggagatgcttccacagctgtggtctcctggaccagggctgcagggaaaggaggaatgggctctcatttcacagatgtggaaactgaggcccagaggggtgatggaactggcttgaggtcacatggtcagggctcaatggattccaagagccgctggctgccccaacacagaggcctccttggacaaccccagagagttgggatgtgcattagagatggctggacttcaacgctttgttgaacaaaataattgtatcccaagtttctgttccaatatttgttcactgcaaggcccaggattccaggtgaggatagcgctggttgggaagaaagagacacaggctctagatttggatcatccccatctatcccagtcctaaagggtgatggaaactggggagtggggtgtgtctcactgaaggcaccagatttagcaaataaaactgctcagttaaatgtgaatttcagataaactaggaatatatttttagtatatgtctcaattattgtcctgtatttttttctggtaactctcgtcctatgagtggagcagaaaggatgcccagagctacaaaaccttctctgggtctcagtttttcttgtcagtacaaaagaatctttttatacaatagagatttggggcaagaggtttggggagatgatccagaggttccttgtgggaggcggctgttgtcttccgtttatccaccccaaatttcttcccatctcagttcagccattgggtagagcaggcatgtgctggggctgtgggctcagacaggcttccatccatctgactcctgcctcgtctgctgcttctgagctgagtcaccatcagcaaatcacttctgcccaagtctcatttttctcatcggtataatgggcatagtttaaaggcctagcccacagggttgcaggaaagctcaaacacagtagcaggtaagagacatgcttgcttttttttttttttttttgtgagactgggttttgttcttgttgcccaggttggagtgcagtggcgtgatctcggctcactgcaacctctgcctcccgggttcaagcaattctcatgcctcagcctcccaagtagctgggattacaggcatgcgccaccacgcccggctagttttgtatttttagtagagtttgggtttcaccatgttggctaggctgttcttgaactcctgacctcaggtgatctgcccgcctcagcctcccaaggtgctgggattacaggcgtgagccaccacgcccagccatgcttgcattttaaccagtgctgctggctctgaaagggcctgccaaggtgaggggagagctgcgagctgcgtctcctgggacctagggcgccccagacttccaatccagtgctcactcagcgcaccctacttgggatttcttccaagggggaggtaaggattgttaaaaaattgaaagatccctttggggaccactactccactcttctgcttctctaggaaaatatggcccagagacatcacgtgggtaccccaagaccacacagtgagtttatagctgagctgggatctgaagctaggtttgctgaatcccagtccgagaggtgtgcccctctgtgatctcagggcttaaagtttagttaaaaaattgtttctttctggaggctagagctcattttttttttttttaattttgaggccaaagttcattccatcagaggtgttgcagtgtggtggggaggagtcttgcggtgagaaacaggtagatgctgctgcagtggaaaccgaggaagtgcgagaatgtgcgtcctccacatgtctgtcctcgaagcctgtcctgctccaacaaggggaccccaagaacagcatttagtggcggcctagcacctgaagtcctcggatccaccaccaggtttgctgtgtgaccttggggaaacgtcttccccagtctgggctgtggttgggaagaatccttctcccttgttattgaggaccagtgaggccatcagtcttctctgccagagaaagacgctggggacatgctcccctcagcacccaggattgggaaaactgcaagaggcagagggagtggtgccagcccacctgcctgtgtaggaatcttggctccttctgtccagctctgtctcccctggcccttctctgtggcttctggtcttcactgccctggttgtacacgccgcccccacccctctctccctgtcttttgtctctctgttttttttttttttttttttttactctcccttccctctccttctctccctccctcttccctctccctggccacctccttctcccccttcccctccccttctctctttccctttcactgtttatcccggatcctcttttcctgcagggacactctggaaagccctggctccaaaccagtgtgattctaatcttcccagcagactgtctaaaatgtaatttacgagcaaggctctcccggcttctccatcctgcagcctgggcaggactcccagccagtgaatgggctggggagcgggagtggggctggggccagcctcgctgggtcatctcccattctgctctatctgcccatcagctgggggaacgggcccaaacccggggaagcttttcacttggaaccgacttcagttccgggttcatggaaggcagttggccccgatgcagcaacagattgccgtttgctgtggactctgcaaaaccttgcggcaggagagacctcttggaggccatgacattaggccaggacatttgcgcattcattaactcatgttactgtacactttctatgcatcacacagtcctgggagctgaggttgtagtgccgagcacagagaccagttcctgttcttttgaagctagcagtttggtggaagggaccgacattaatcccatagttacttaagagaatgctggcggggcacggtggctcatgtctgtaatcccagcattttgggaggcctaggcaggaggatctcttgaggccaggagtttgagaccagcctgggcaacctattgcgaccctcatctctaagaaaattaaaattaaccaggcatggtggcaaatgcctgtagtcccagctactagggaggctgaagtgggaggatcgatttagcccaggaggtcaaggctacagtgagctatgtttgtgctcagcctgggcgacacagtaagactctgtctcaaaacaacaacataaaaccaaagaatgttaaacagatttcctttagttctgtgctgaaggagaggaataggatgctttataatatgggggttgactaggtctgttgggggaggcacaaaggaagccacccccacttttttgcatgataatgaataatgacaccattagtggcgtgtttatacagagaggcggtgacaaatataattcctcctttgctgccacttttgactttatgtgtgttgaatttagatacccctccatcaactgatgtgagcggctcctggagggtccttaaagggtcccaaactatgagcgctgctctcgacctgtacaccagacacaggtaaagggacttctcactccccccacttccaaactatgagcgctgctctcgatctgtatgtacaccagacacaggtaaagggacttctcactccccccacctccaaactatgagcgctgctctcgacctgtacaccagacacaggtaaagggacttctcactccccccacctccaaactatgagcgctgctctcgacctgtacaccagacacaggtaaagggacttctcactccccccacttccaaactatgagcgctgctctcgatctgtacaccagacacaggtaaagggacttctcactccccccacctccactgtctgccctgccactgggcccaattctggaaggggtgaacagctcggaagaaggccgggctcggcagccacggtgctctctctgggcctctgttctcactgcaaagtggactaacaggcctccatggaccagctcacagtatttgctgtaagggtcacatgaagcgattgatgtgaaaagtatttattgtcttggaaattcctgaattcaccaccatattcctcactgccatcctcatccatgaaagcgagggggctgagggaggttttgagacttcccatgaagccccttctttctgggatttcaacacacccaactccgtggagcgcgtggccgccttctcagcggagcaatgctgtcacctagtggccactccgcacccttctccttggaatcaggagctgacccggagcacctgcccttgggagctgtccccaggtacccctccacacctgcaaagctaccggtggtcagggcttccgtgtctggtcatgagagagcaaatattgcagtggagaagaggggctgaggaggcagggtccctgctcttatgaagggcagcttgtccttgggccccctagctcctcctgccattggacttggcttggcagatattccatcagagcaggcgagggcaggaggcctgggtttccagaccctcatctgcagggtgcctgtcagtgttgaagtcaagaagctccttcgtgtgagcctcaccctgtttctacctcgtgtcttcctgtagtttattctctacctggcttctagagtgatccctttaaaagcaagtcagatgatgtcatgccgctgctcaaaccctgcagttattcccactcagagtaaaaccaaagacagcaagacaggatcggggcctgtgggtaaccttccctgcccttgtttatctttttagtttttgttttcaatatttatttattcacttatttattttttattttttgagatggagtcttgctctgttgctcaggctggagcgcagtggtgcactcagctcactgcaatctctgcctcccgggttcaagcgattctcttgcctcagcttctcaagaagctgggattacaggcatatgtcaccaggcccagataatttttgtagttttagtagagacagggttttgccatgttggctagactggtgctggtctcaagctcctgacctcaggtgatccacccatctcggcctcccaaagtgctgggattataggcatgagccactgcacctggccttgttttgtttttgagacagggtctcactctatcaccgaggctggagtgcagtggtgcaatcatggctcactgcagccttgacctgacgggctcaagcaatcctcctacctcagcctcctgagtagctgggactacaggtgtgcccctccatgcccagctaattggcatttatttttttgttctttttttctttttctttctttcttttctttttttttttttctttttttttttgagacagagtctcgccctatcacccaggctggagtgcaatggcgcgatctcagctcattgcaacctccgcctccaggttcaagtgattctcctgtctcagcctcctgagtagttgggattacaggcacgtgccatcatgcccggctaattttttgtatcttcagtagaggcagggtttcaccatgttgtgcaggctggtctggaactctgggactcaagcaatcctcccacctcggcctcccaaagtgctgggattacaggcttgagccactgtgcccagctctgtttatctttcagactgcacctgcccctcatcagctcctctccagcctccttgtcatgccttaaactctcactgctgctccctctgcttggaatgaccttcccctgggtagctgcacaggtgggccctcgtgtcatttatcactctgcttaaatagcccttactcagaaaagtctgccttaactaaattagcagcctccatcacttttcttcccctttgcctactttgctttcttcacaggactcacaatatatggttgtttcttggtatctgcggtgatactaaaatctgcggatgctcaagtcccttctataaaatgctgtagtatttgtgtataaacttcacatatcctctcatatactttatttttatttttaattttttttgggacagggtctcactccatcacccaggctggagtgcagtggcgtgatctcggttcaccgcaacctctgcctcccgggttcaagcagttctgatgcctcagcctcctgaatagctgggatcacaggcatgagccaccatggctggctaatttctatatatatttttaaaagtagagacagggaggttaagaggagggtttagataataaaatgtgtggtatagagttctggaaaatgcatagtgtatagtgctcctagaaagatttgtagtagttagggcatttattataataatgttcatgtactctgctacaaaaaagagagcgtatgggcctgcagcatattcaatattaaactctgagactaattctcattctccttctgtcaggtcaacagatttcaccatgttggtcaggatggtcttgaactcctgacctcaagtaatctgcacacctcggccttccaaagcgctgaaattacaggcatgagcctctgtgcctggcctatcctctcatgtactttaaatcatctctaggttacttatacctgatacagtgtaaatgctgtataagttgttgttatactgtattttaaaatgtgtattttctttagttgttctatttattatttgcattatttattgttgttgttttttttttttttttgagacggagtctcgctctatcacccaggctggagtgctgtggtgcgatcttggctcactgcaagctccacctcccaggttcacaccattctcctgcctcagcctcccgagtagctgggactacaggcacccgccaccatgcctggctaatttttttgtatttttagtagagatggggtttcaccacgttagccaggatggtctcgatctcctaacctcatgatacgcccgccttggcctcccaatgttgtattatttttaattatttttcacacttttgagatccctgatgggttgaatctgtggatgaggacatgtggatacagaaggctgactgtacagtgaactcatatggttatgtgggacaatggcaagagagacagcctctgattccagaggtttcctggttctccattctgtgaggagactgatggctgcttgtcaaaggcaggagctgtggcctctgtttgtggcacctgaagtgccgcatgcaggctagggcagctgtagggtcgctccacagaacgctgatgtgaacgtgtcagcatgaaaaagcagttttcatcttctccgcctggatattgtgactaaagaccccacaaactccatcttcagccaaactcgaatgcagaaagagcagactggaacataaggcataatggctgtcaaatgcagccacccttggcacacaagccacatggggtgaagggtggcagaagcaatgtgggagggtataaagggcaagattgctccaccaccggagagtccagaaagatgagcaaaatcgcacttgtgtcagtgagaagctcatccagaagagacagcatctctatctcttaaacaccaaacagcagaaggcattgcctacaataggccaggaaaacctagctccttcccttgtttgtaataataaggcaatagtaagatattggaagaccgtagagcaacgccaatgagagctaattgaggaaagaagctgtgaggcaggattttctattgagccaagctgtccttcagatatacgcgccacccaccagcaattctgaacatggcagaactcagtggatattgtccctgtggagtctctctggaggaaacatctagaggatgaacttcagccccatgactggcagagggctggtagtgcattgactgtggtgaagtgtggaactgagactaacgcaaatgtaggaagtagaggaatagataaaaatgtgaatgcaggcatccgtgatgaggttagaaatgatgcatctgagaagaaatgggaggggacacgtgaaagaagccaggaaacagggtgtgtttgcaaagtgcctcttctgtagtaggtgggaatcaaagaacatctttcagagtcaagagtgctaaccattacacaatggaagcacaaagaacatgtttcaaagctggcaaatcaagacaagtagtatgaagacatgcagcagaacagaggagatcactgagaaaggaacccatcagtgcctcattagctgtgttgggggaaagccagggagatgggcaagaaaaagaataaactatagtgttcttactttctgagaaattgagaactaagaatattgtgtaaagttataataatgaacaaaagtataaaactccttctgtatcaaaagaaccacatataaaagaacaaaccacataacaaaagacatttaaaacacccataaacaggaaaaaattacataaaataatatgacagaacacaggtgttataaatgcaaatgagcttaatttgcccagtgaaagaaaagaaattagatttggtcacaaaaccaaatctaactcagtgttctataaatgaggcaatcataaaccaaagtaattcagaaaggttgaacctaaaagctgggcaaaggtatactaggcaaatgcagataaaaaatcttaatatcacacaatgtggagtttagattaaaaggtatttaataagacaaagaaagtcatcttagaatatacaaatgtgtatccacaatgaagataagagttataaacatctatgctctaaaaaatatagtaggtgcatttctgaaggagaaatcacatgagacacaaggagaaacgcacttcaattaactttcctcgttgcatgacaaataaaggataaagaaaatcttcataaggtgataaataactcttatccattgcctggctgttaagacaatgtcacagattgacaccccatttctgataccaattcctgtattattgaggatgaaagatctaactcttggaacaaaaagactccaacatacattggcttggaggacaaagaggtctaactcctcacagtgtgaggtgagctgcttagttggtggggcagctctgttccaaagggtcttcagaaagtcatatcctttccaacatgtttctctgtcttctcctagggcattgccattgtttgcatggttgatactgggtcactgtgggctctagagggagggaagggggaagggagtgtgaaggaggtgcacccactgtggagtataaaagggacacatagacttccattcataatctgttggtgagaactcagcatcatgtgaccttatctaactgcaagggaacctgggaaatgtagtcttacgatgttcctgatgagaaaggaagaatgaatttgagcagacaactggtggagtggaaatgagtaccagtgctttagaaaatgatgtgtcagtgtctgccagagttcacatacacacactgtatggcccagccatggtactcctaggagggctcagcagaaatgagcacatatttgtaccaaaagacataggcaagagtgttctattcctaatgctactgtttattattattaatttttttaagagacagggtgtatctctgttgcccaggcctgtggtataatggtgcaatcatagctcactgcagcctccaacttctaggttcaagctatcctcctacctcagcgttttaagtagctgggactataggtgtgcaccaccacaccctgctaatttttaaacttctttgtagagatggggtctcactatgttgcccaagctagtctcaaactccttgcctcaagtgatcctcccacttcggcctcccatagtgttgggattatagacgtgagccgccatgcccaacctaattcctattactaattattagtaatattattaattccataacagtattcctaatagcccaaatatccatcagcagtagaatgcttgaacacattgtaatatagtcagacaatgaaaaactctacagtgattaagatggacaaagtactgctgtgcatcacagcaaggatggatcttacacagtgttgagtgaaagaagtcagacaccaaagagcacatgtgggtccagtacagtggctcatgcctgtaatcccagcactttgggaggctgggtgaggcaggtggattgcttgagcccagaaatttgagaccagcctgggcaacatggtgaaacctcgtctctgcaaaaaatacaaaaattagctgggtatggctgggcgcggtggctcatgcctgtaatcccagcactttgggaggccgaggtgggcggatcacgaggtcaggagatctagaccatcctggctaacacggtgaaatcccgtctttactaaaaatacaaaaaaattagctgggcatgcgcctgtaatcccagctactcgggaggctgagacaggagaatcacctgaaccctggaggcagaggttgcggtgagccgagatctcaccactgcactccagcctgggcaacaaagcgagactctgtctcaaaaaagaagaagaaggagaaggagaaggagaaggagaaggagaagaagaagaagaagaagaagaagaagaaaaaacgaattagctgggtgtggtggtgcacacctgtagctgcagctacttggtaggctgaggtgggaggatgaggcagtcccagctacttggtaggctgagcctgggaggttgaggctgcagtgagctgtgatggtgctgctgccctccagcctgggtgacagagcaagacactgtttcaaaaaaaaaaattgtaaaaaaagagcacatatttttttaaactttttttcccattttttttcattatttgtctttacatatgttttgatttacattacaacgtgaaaaaatgctcatcatcactggccatcagagaaatgcaaatcaaaaccacaatgagatgccatctcacactagttagaatggcgatcattaaaaagtcaggaaacaacagatgctggagaggatgtggagaaataggaacactttttcactgttggtgggactgtaaactagttcaaccattgtggaagacagtgtggagattcctcaaggatctagaactagaaataccatttgacccagccatcccattactgggtatatacccagaggattataaatcatgctgctataaagacacatgcacacgtatgtttattgcagcactattcaccatagcaaagacttgaaaccaacccaaatgtccatcaacgatagactggattaagaaaatgtgggatatatacaccatggaatactatgcagccataagaaaggatgagttcatgtcctttgtagggacatggatgaagctggaaaccatcattctcagcaaactatcgcaaggacaaaaaaccaagcactgcatgttctcactcataggtgggaattgaacaatgagaacacttggacacaggaaggggaacatcacacacccgggcctgtcgtggggtggggggaggggggaggggggagggatagcattaggagatatacctaatgtaaatgacgagttaatgggtgcagcacaccaacatggcacatgtatacatatgtaacaaacctgcaggttgtgcacatgtaccctaaaacttaaagttatataaaaacaaacaaataaataaaaacagacaatacaggatattagtttgatgcaaaagtaatcgcggtttttgccattaaaagtaatgacattacttttaatggcaaattacttttaatggcaaaaaccgcgattacttttgcgccaacctaatagaaatgggaaaggtgtttccttttgggaggagaggtatgatcaccaggaggagaaggaggagggctctggggagctggtcacgttccggttctcaatctgagtagctatttcacgggggtgcttgctttgtgaaaattcacagtgctgttcctttatgatttgtgactttcctgtatacatgttctatttcaataagcattttaattaacaaaattactaaaaggcagaagaatgtgaacaagtggaaagatacatcgtattgtggcggagggggggagcggcggggctcaacaccgtgacattttaattctctctcagctaattgataaatatactttgattctgataaaaaatatccacagtttttgttgaatgaggcatgcttatcctaaagttcgtatgaaaaattaaccagtaggcatagacaggaaaattctggaaaaagagggtgctcgggggaaggaccaacccatattatgaagcctcaatcattaaaacaatgtggttttgacccgtgaatagtcaagcagacaataaaataaaagaaaactcagaaataggcctacattaaatggacagttagtaaggttaccataccaaaccagcaaagaaaagctgaattatttaataaacggtgttggacaactggaaagacacctggaaaaaaaatctggatttctactttatatttaaaataaatgttgaaggaatcaaaaatttaagtgtgaaaatgaagcttaaacattttagaaggaaacatcagagagtttctttatgacttttaaatgagggactttctaattatgactcagaaatctagaagctattaaaaatggataatttacttattttttatttttctttaaagacacggcttcattatgctgccaagattggtcttgaactcctggcctcaagcgatcctcccgcctcagcctcccttgtagctgggactacaggcatgtgccaccatgcctggctaatttttatttattcatttattcatttattgtagagatggggcagtcctaggttgcccaggctggtcttgaactcctggcctcaagcgatcctcccacctcagccttccaagtagctgggactacaggtacgcaccaccatggttggctgatcaatttacttctataaaaattggctgggcgcagtggctcacacctgtaatcccagcactttgggagcctgaggcaggcagatcacctgaggtcaggagttcgagaccagcctggccaacatggcgaaaccctgtctctactaaaaatacaaaagtggctgggcatggtggtgcaggcctgtagtcccagctactagggaggctgaagcaggagaattgcttgaacccaggaagcggaggttgcagtgagctgaggcgcgccactgcactccagcctgggcgacagagctagacttcgtctcaaaaataaaaaaataaaaaataaatagataaaaaaataaaaaaaaatctgcttgttaaaaaaaaaaatcccatcatgagcaaagtcaaaaaaaaaatgacaatctgggacaaaatgtttgtaactcatatcagaggtaaagggttaatctccctcctgaagaacctagggaaattgatgagaaagtcaaacgacccaaaataaaaatgggcaaaagctgtgaagagataatttagagaaaagaaaatccaaaagtgcttgaagataggaaaagaagttcagctcacccatagtaagatcaatgcccattaaagctacagacacatgtcacgttccctgatcaaactgccaatcatccaaatgtaaaatgacgccttctgttggtgagtgtgagggagaagtagacattctcctatgtcaccgcggggacaatgtctaagggcaccttggcactatcaatcaaagtttcaaacgcatgttgtctctgaccgagcgactcccctgtgggaatttatcctatagagatacttgcacgtgtgaaatgacaactgtatataaggctgttcatcacaacaatgtttagcaaatggctaaaaacagcccatgccctgcaataaggggctagttaattcaattatggtctgtctagaccacagaataccatggttaagagaaaaaattagaaggagagagacagtgtgttcagtgttttacattttgtatcaatagagggacaaccgagactctatattcttatttgcatggagatgcagaaaaaaatgctgggaagatacagaagaaagcatgaacagcggtcacctgtggggtcaatgctgagaactgggcagatgagggacagaggtggaaggaggatttttacttcatatattttgatgtcttttggtttttgaagcacgtgaatacattagctattcaaaaattaaaatgcaacaaaatgaaatttaaaataaaactgcccaaggatgtacgttatgccttatatacttgtctctgttcctgaacacaccctctgtgacacatttaaaacgctaagccttgagagtggtttttttctgtctcagttagcctccttcccaccagctggaaatcctcatccattccaaagaggcttcatgaattaaccagagatccagcttctgatgtcctctctcattccttcatttcttgggcatctccacctcctttccctgccctcatccccattctcagaatccgccttttagtccccatgggatacaggcacttcatgtccatacctgtctgggtaatggcggtgcccattagaggttgctaacagttcaaccacttgttctggggatgcaaagacaaagatgtcttctcatttctgcagggtataaatgaggacacctatagcccaggaactgctggctgcattcttgggatcaggtgggtggccagctttagggaaatgcccacacttcaaaaggcagagaacaaaaacagaaagaaagccgtttcttgctggcattgctgagctgctgctggaccaatccttgccagactggacctaaagctgggcttcacggttctgtgagccagtggagtctcttcatggtttcagtctgattgagtcgggttgtctgttactagtaatggaaagcatcctgagaaagcatctggtgggtgttctcatccccattcatgcatgagggacccaaggagagagcgattgtgtgatttgtgcaaggtcacagacccaggaagaggctgagccagagtttgaacccagatctatctgactctgaagtcttctttctgctgcacgagccctccctgctcaatgtgttgagctctgcacataaagctataaagggtgttgagtggggctgaaccaggcccgtgcctggctctaggccatccatgaccatggctatgacctggccaggcaggatgctctgtgggatgcactttccaccaggctgagtacaggtacagcagtggtgtagtgggtagggcctcagtttccccttttataccataggagttggactaatcaacatctaaaccttctgaaatcttgggctttgaaggggagggtggggttacgtagggcctggagggcctttgagggtgtccaggtgcctccctcggacacctgaactagaacctcaggctgacctcacctgagctagaggtgaaccactctaattcagggaattctcccggggcctctgggctgcttaatactcggccatttcttgaaacagctttatcaagatgtaattgacacacaataaatggcagatatttaaagtctaccatgtgacagtttctttttctttctctttttttttttttttgagacagagtcttgctcagtcactcaggctggagtgcagtggtgcgatcttggctcattgcaacctctgcctccagagttcaagtgattcttctgcctcagcctctcgagtagctgggactacaggcacgcaccactgcatccagctaattttctgtatttttagtagagatggggtttcaccatgttggccaggctggttttgaaatcctgacctcaagtgatccactcaccttggcctcccaaagtgttgggattacgggcttgagccactgtgcctggcccatgtgatagttttgatatatgcgtacattatcgaaaccatacccaaaatcaaggtaaggaatgtattcatcatcctcaaaagcttccctgtgtacctgtgtaaccctgccttctcccagcttccccccacccccactccctgcaaccactgacctgctttctgtcactacagattagtttgcattttctagagttttatataaatggaatcataccgtatggattcattttggtctggcttctttcttcagcacaattatcttgaaattcatccacgttgccatgtgtattcctagttccttcctttttgttgctaaatagtgttctgctgtgtggacgtaccacagtttggccattcacctgctgatggacgtttgggttatttccagtttttggttacttccaatcaagctttgaggaacacacgtgcacaagtgtttgtgtggacacatgctttcttttctcttgggtaaacatctaggaaccgaatgggtgaattatgtggtaggtgtaagtttaactttttcagaaatcaccaaacttttcctttgtttttcttttcttttctttttttttgagacggagtctcgctctgtcacccaggctgaagtgcagtcacacgatctcggctcactgcaacctccgcctcccgggttcaagtgattctcctgcctcagcctcccgagtaactgggattacaggtacacaccacgatgcctggctaatttttgcatttttagtagagagagggattcaccatgttggccaggctggtctcgaacctggcctcaagtgacctgcccgcctcggcctcccaaagtgctgggattacaggcgtgagccactgcgcccagcctcaccacactcttctgaagtggttgtaccatttttcattcccagaagaagagtcctgtttccgtgccaacacttggcatctcactgtgtttgtgactggcatttctctaatgactaatgaggttgagcatcttttcatgtgcttacttgccatccacatattctccttggcgcagcatctgttaaaccttttgcctgttacagatggaatgtcaggctatttttaggttccagcagatggtgctgcaggatctaagacttccttccgcgttgatgctgccatttctctccctatggcaacaacctttccacattgctcttgccacaccccctacccccagtggatcagtcagatctacagaaggttgatctcagtgccttctgaagatccctcctagccttccattccagggcgctataacctcagctcccattctggccctgactctcactgtgtgatgctgagcaagttgtgtcacccctctctgagccttagctgctatttgtaatacagagatattggattgggccatgacttaggaccttcccagcttcgccacttaccagctgtgtgaccttgggcaagttacttaacctctctgtgcttcagtgccctcatttggacatggggatgataacatggtagcagctggcacatagggttgctgtgaagacctgatgaaatgatacaggtggagcccttagaacagagccggcacatagtatatactcagtaaaacctcggctcttcttggacagtctaagatctatctctcaactgctcaactacccacctttgtacaagctgcagtttgttccgttttgaacttttgcacgggctttccttcctcaaattgctcactctcatactttcagtctgtccataattttctttgctttaaatgtactgtaatgtttgcctcctccatgcagccagtcatgataaactccaaacccttgtcaaacccttcctgcacatgggccagacttcattttctgggcattgatttgcctttgtctctttgtggctttgttttaatgctgttttcatcttggtgtcactcttccttctgagactgaagcctccaaaagcagaagcttggcttcccccatttgacctggggatccctgaaggcagaggctgggtctcttccatcagactggaggctcttgaagggaaggggccaggccagcgtatcgcatcaaagattggcccagaggcttgcaaaccctgctcctgacagcatgtgcagagcttgtgctgtaccatcaccctggaccccaggggagacctggccagaaccacacccacaccctggctccgcccctctctgcaggccagcttttggccagagtgggtcagcccagggctcccaaggctcccagaggagcctgggccatggctgggagtggaggcggctttgacagagggccatggagccagctattaaatgttttctgatgccaggaacaaatctgtgtattgacctgaggccagaagaatgatgtcactctgaaagagcaatggctccccggagagtgtctaaatgggtcaatgcatctctgtaaaggcggctaagtgggtggcctgggttgcagggatgggttgagccagaaccccagggacccagctcagctcaccatgggctgggcagtgccaggcaggcagcgcctgggcccctacttctttggacagaaaagtctcacacccacagacagcgggagtagactaaaatggacagccttggaatcccgtgactgaggccagatgtggattcacattccagggacaaccttgggacagtcagattgggagcattgttactggaaagcacattggagatagttccaggctgctttgctacttaccagcattgtggctttggacaaattgctaaacctctcagagcttgtttccacatctgtaaagtggggataactccagtgtctactttaaagcgtggatatgaggagcaatacatgttagctattaataccattattgtgcagcattcttattttacagacgaggagaccaagattcagagaggtgcagtgacctgcccaaagttgcccagcaagctagtgctaagacaggctgtgctcccagatctcccggttctaagtccatggagatgagagttgggactctgctgagagatggctgaatgtagcaggagagcacagccaccgggcctgggtgcaaatcctggctctgccaagctgtgtgactttggaaaaataactggaaatcccccaaattcgattttcttgatataaaaatggggttcttgatggcaaaaccgcaaagttacaagagtaaaaaggaaatagacccaaagaacctggtcgtgctggggatatgggtgggtgggttaggctggagctgaggcaaggaaggcaaaggaaggaggccacacaggcagaatgcccacactggccacaggcaggaagccaagttcgaaggccaggaactcatgggaagggctcccttctgccctggggttctcggaaatgctggttcttcagcccagaacactttccttccctcttcacctagttaatgttttgctcttccttcagctctcagctcaagcaccacctccttcaggaagccctccctgacttccccatccaggtcaagtccccttatcgtgggctcatccagtggtctttacttcctaataggaaatcagctttataattcaatagcattgatgagtcatcattgtatatttatttttgtgattctttgattaatatctggcaccactactgggctgcaagttgggtgaggacaggggtggcgtctgcctctctctttccataaagaaggctctcagcctctgtaaactcacccaaggaagagggaacacactcatgaatgagcttgttgcctaaagtgtagtggagaagcgattttacgtggcacatgaatacaatttttgaaggtatatacttagtgtttattggtagcaggacaaaatgcgaccagcacatcatacttgggattttgcagacattattgcccaggatgaggctagctaaaacaagtgagttgatttaaagaaaaatataccgagtaaataatagttcaggccaggtgtggtggctcgtgcctgtaatcccagcagtttgggagtccgaggcaggcagataacttgaggtcagaagtttgagaccagcctgaccaacatggtgaaacccccatctctactaaaaacactaaaattagccaggcgtggtgacatgagcctgtaatcccagctactcgggagggtgaggcagagaatcgcttgaatccagggggtggaggttacagtgagacaagatcgcgccactgcactccagcctgggtgacagggtgagactttgtctcaaaataataataataataataataataataataataataataatagttcaggtggttttgtgtgctgtcgtgacaacaaaatgaagatggcacgggagggcctgaggtttttggggtgcaaggcccagccctgtccaaagagctcttgggcggagggctgcagggctgcggaaggacgcgaggtggcgccagcgtcccaccagacgcaggtgtgggccggatcgcgccttccggtaccctggatgcctgcgcccctcaggacatccctccagggaccttggggtgagctcttgaggagagggagctacactgcttcgctggaggtggcccaggagcaggaacagaagccttaccagagcttgggagtggaggtgggcacctgcccagcctcttctccagccacagcagatatgcctggtcgctcttccacaggggctgaaagatggagcctggacacagagaccccctgccctgcagtgagtggggaccctcaggggaaagccagctagaccaagccagaaggtgtagtgggttctggttggatacacgtgagttcaaagcctggttctgccattaaacagctgtgtgaccttgggcaagttgcttaacttttctgtgcctcacatccctcacttgcacatcaggaaaaagaatacacatctcatcaaacggtgggtgggtcaggtgaattgatacgagcttggaaccgagcctgatgcagagagcattccctaacgtcaggatacgcagtgaattttgtcgaatgaatggtgaaggagagatggtggagggagcacaggtggtgcctctgggttctgtccagatggcagtgtgtccccaggatacacgtgccagagtcatgccagggatcagggcaggatcccatctggatggcacacattggcacacacctattggtgcccacgtgatgccatttatccatctgtgcaaaccaggaaccacacactgagggctggggcactcacgtggcctcagagggtgggggtttaggggatcaactcaggagccagactcccggggctctgatcttaccagccaggtgaccttgagtgagtccttccagtcccgtgggctttagtttgtccacttttaagatgggggccgtgccactgaccttgtggggatgctgtgatgactaaaggttgtgtcaggcacacagtacattcccatcagatataaacttccttcatcctttactataccccctgccccagggggcttccttaaagagtgaggacagtggggacagagccatgaggcagccatgggaagtgggtgcctggtcctgggcagactcctagtgaggagatggggaggggcacaggagtcctgttatgcccgagctcagggacaccccagcagcccagtacctcttcccccaggaaagcccattcatcgtcggctaaaggaggcagggatgtgtggccatgaccatggcgttttatgagtttataaactgctgaggacacggctgctctgagctccaggctgttaatggaccatcaattcatgctccagctggttttatggggtgctgggcaggcaggtgttggcccctgactgcccctgcctgaggccccaggcttgtctctggcggcttttggaagccagcggtgctactcatggcagagctctgcctggctgccatgcccctgagccagtgggaggagaaagacaagttctcagcctcagttgactcaactctaaaatgggaataggctgggtgtggtggctcacacctgtaatcccaacactttgggaggctgaggtgagcagattgcttgaacccaggagtttgagaccagcctgggcaacatggaaaaaccccaactctacaaaaattacaaaacttagccaggtgtggtggcatgtgcctgtagccccagctactcgggaggctgaggtgggaggatcacttgagcccaggaggtggaggtttcagtgagctgatactgcaccactgcactccagcctgggcaacagagtgagaccctgtctcagaaaaaataaaaataaaaataaaaataaaaataaaataaaataaaatacaatgggaataatcatgcccacctctcggaggggccaggaagctgaaataaagtcacatccagtccatcagggagtcctggttggtgcctgatatggtttggctgtgtccccacccaaatctcatcttgaattgtagttcccataatcctcacttgtcatgggaggggcctggtaggaggtaaatgaatcatgggggcggttaccccatgccgttctcgtggtagtgagtgagttctcacgagatctgatggttttataaagggcctttccccctttactcagcacttctccttcctgttgccatgtaaggaaggatgtgtttgcttcttcttctgccatgattgtaagttttctgaggcctccccagccctgcggaactgtgagttaattaaacttctttcctttataaattacccagtctcgggcagtccttcatagcagcctgagaacggactaatacagggccctaccttcagaatacatcctggctctgatctcttctacccgcctccactgggccaccctgctctgagttatcatcctctcacacctggactctaggcagcctcctcactgctcccatccctgccccctacaagtctccacgcagcagccagaggaagttatttaaaattttttttttttttgagatggagtctcgctctgtcacccaggctggagtgcagtggcatgatctctgctcactgcaagctccacctcccaggttcatgcctcctgcttcagcctcctgagtagctggggctacaggcgcccaccaccacgcccggctaatttttttgtatttttagtagagacggggtttcaccgtgttaactaggatggtcgcgatctcctgactttgtgatccgcctgcctcagcctcccaaagtgctgggattacaggcatgagccaccgcgcccgggctttttaaatttttttttggagatagggtctcactctgcggcccaggctagagtaaagtgatgtgatcatggctgattgacctccctgagctcaggtgatcctcccacctcaccctcctgagtagctgggaccacaggtgcacaccactacacctggctaattttgtattttttttgtaaagacagggtctcgctatgttgtccaggttggtcttgaactcctgagctctagcaatttgcccacctcggcctcccacagtgctgggattacaggcgtgagccactgtgccagcttcagagagagcattgaaaaatatgagtcagatcctgttgtccctctgctcagcactctgcagcaagccccagagtaaagccagagtttttctgggcctcgtctcctgctacttccactttgttccagcccctctggccttctcgctgttctggaacgggacagcctcttcctgccccagggtctttccacaggctaaaccttcctcacatgcctgcttggctcatccccttacctcctttaggtctttgctcaaaatcatctctcagtggggtccactctgagcacctgatgaaaactgagattctctcagcaggatcaatcccttttccccatgcagtttgtctttttctattgcccttaccacctattacataatttacttatttattatgatttaattttctttctttccctgagagaaaaatcagctctgcacagtcatggagctttgtgtttgtcactactatctcccaagtgcccagaaaaacacctggcatatagtaggtgctcaataaatgtttgctgacggcacatatggaaaggtcccagagttctgcctgggacatctaggcatttgagatgtggtagcagctgtcattacaaatcctgagaggttctgtttttgtttttgttttgatggagtctcactctgtctcccagcccggactgcagtggcatgatctgagctcactgcagcctctgcctcccaggctcaagtgattctcccacctcctgagtagctgggatgacaggcctgtggcagcatgccctactgatttttgtatttttagtagagacggggtttcaccatgttggccaggctggtctcaaactcctggcctcaagttgtccatgatgaaaggttcctgtgtatttcaaatggcctgtgcaggtgaccatctggcaaagccatcagtgataaagaaaagccaggccacggcagaggccctagccaggcccatatcccaagggctgttgactgacagctcaacccttctccagaggctggaagtggttcagagctgggaacagagagaaaagcaaggtccagagaatgggggagtcccctctgtgggtgagaacatcatgctcagcccactcgccatggagctggagggcaggacacctgcgtccatgaaggcctaagagcagccccactgttcagtccataccagactctgccctggatactggtaccctgggatgagcgtgcagagaaggtcttggaggagctttggaagggcttcctgtgttcagtcatctatctgttattcggagcacagaaaggctaaatgacttgtccacctttatgtgcctaggaattaaaggggtctgcctgggtctaggcctgtctgattccaaaggttgttctcatcttgtttgtgtaggtgcgggaaccagcacagtgtatggccccagggggtgggggttcaggagatttttgtgaaagaccaataattggagaatgtgggctgttcaaatgtgtctttgtccttgtccaggccttctcagaaagacaagtgggggcaatggatcagggacaactttctgaggccggtgggctctggtgagctcaaatgtgggggaaggaagccccagatgctaaaaagctgactctgtcttccacatgttcagggagttttgcccagaagtgaagacggggtggaaactcactcgtctgtgctggtccttgtgggggagggctgaagggagggctgaagagagagcgaagagagctttctacatttcatctccactgctgagggtcctgcccgctttggaaggcaccactttcctgggcccagagaggctcagctagttttctgtggtcacaaagcataatgttggtgatgatggtgatgatgattatggtggtgatggtggcgatgagagtgttgatgatgatggcagtggtggtgacagtgatgacctggtgaaaatgacctgtttgtttactgtgtgcttattatgtggatctttttcttttttgtgagataggggcttgctctgtcacccaggctggagcacagcagggcattcacagctcacttgcagcctcaacttcctgggctcaagtgatcctcccacctcagcctcctgagtagctgggactacaggtgtgcaccaccatacccagctatttttttaaaaatttttttatagagatagagtctcactatgttgcccaggcgggtctcaaactcctgggttcaggtgatccgcctgtcttggcctcccaaagtgctgggattacaggcgtgagccaccacacctgggcttgaggcaggtctcctaaggcccagccttaaaactcacacagcaccactcctgctgcattctacttgtcaaacaaaaccaagggtaggccagattcgggggtggggggggaggcgcggaaatagacggcaccttggtgtgggaggacagctgaggataatttcttgccttttaccgtccaccatagccgggactggagcctcagtctgagtccaaagacccccagaggtgtgctcctgaccccacactgactggcttccactttctccccagcgtctctttcaggtttgtgtttgtggggaggagttaggggaggaggccaagcttgtttctgtggcctctcacctcggcttcccgctccctcattcctgcatatttttgtcgtactccagggctcagcccctggaccagctgtcagctcagtcagggacctggtgctggaagaacaacacagatggccactgggggccagcagagtcaaggcctgggcgaatccgtcccaaggagctgggtccctggttgggctgggggctgccctaggcaagacggagctgggggtcgggttggccagatgtcactcactcccaaccccttcatccagagcttggtgctgtttttaccctcttatgcagtgagtccgtgggggcgaggggacttgagtgccagtcttgtctctgtgtgaccttgggtaagtcaccctcccgtgcctcctggggctcagtttccccatttgcacagggagctggtggattggttagtttctggggaggcaaggctgcctggtgcctcccgacttctagtcctctgttctgtctgtgggacctgcaggctccttttcatgagcagaaagggctccgtggcttaaaatgaggttcccccttgacagcccctgctgggcccgggtagccctgctctggaggacagagcccctcctgagccagctgggctgcgaaaacctgtgtgctcccctggtaggacgagaggtcctggatttaagcagaggcttctctcttctctccttccctctacccaggagacccctccagctcctagaggagatcccaggtctcagctgctgcccacctggtgaggcctcagaaccgatgaggggacatgggcagggagggactgagccaacaacaccctcatcctggcttcggttttcaattttttcttttttaagagacggatcttgctctgttgcccaggctggagtgcagtggcacaatcatggctcactgcagcctccaactcctggactcaagtgatcctcacaccttagcctcctgagtagctgggactataggcatatgccaccacgctcagctaatttttaaaatttttggtagagacagggtctcactgtgttgcccagtctggtctccaactcttggcctcaagcaatcctcctgcctctgccctccaaagcactgaggttacaggtgtgcaccactgcacacggccagaattttttttttttttttttttaagtaacaaaaacaagatgggattgtgggcagggcgatttgacccagcttaataggcttgggaacttgttctggctgccagggtgggttccaggccctgcggctccctgaggctccccacaactctgtcctgttacacttgtcacatggccttgtggtctgggagtgttctgcagtagtgtctgaatccactctgtgtccccgggccccagtttggctcctttcgggcagctcagtagtggtgactagcattcacatatgtgcccagcaccacggtaggtccttcttgaccccttctccttggagaaactccatgggggagatgcctttactgtccccatttgcagatgggtaaactgaggcccagaggcctagacacattgcagagagtcatgctcttagtaggtggcagagacaggattggaacccaggtccacactgctaatcactttactgcttcccagtgagcagaaattgagtcaatgaatggcttccctagacccgggtctcagagtcttgccaaggctggactcagggcagtggtggtggagagtcctggcccaagtgggacctgggtcgaagtagtggttttgtcagctgccattcaacatctctgttggacaccgagctcagggggcagggtggacacccatcgtatttcttgctgcatctttgtgcctgctggatgagcaagcccagtgagagtttgttgactgaccatatgattgactgagtgagaccagagtggccctgtcacctctctgggattttggtgctggctgttcatggtggctctggacccagagcctcttcgaaacattaaaaccctctttcatgattgattgttcaattgactagttgatttattcatttattcaacaaatatttattgagtgcctcctctgtgcggggaatatgcagcaaactaaagagacaaggtccctgcccttgaggctcacaccttaagggagggagacaaagaaagaaacaaacagatcatcgtggattgcaggagacgtgaacagagggatgagataaggagccactggggcggcggctactcttaggggtgcactatgagctgagacctcaaattatgacactgctgaacaaaggccagaggctttgggcttcaggtagagggaacggttggtgcaaacatcctgaggcagcaatagcttggtgtgttggaaacagaggaaggaggcccgtgtggctgagatggaatgaggagacgtggtgggggtctcccaggggacagataagggtggcttgactagggtgggggctgaagaaatagagagatgtgacagacatgagccaccatgcccggtggctcatgcaagaaatacagaggaagtgaaaccacacatttgcgggcacagtctctccctgctgcagggcttcccaaagaggaagacatgagggagggctccctggaagaggagggcttcctctaggctggaaggactggggggtcttggagcacagcgggagcagagaggcaatccttggaacaacatgggtgtgtgtgggtgaggaggacgaggaaatacagggatgagcgaggcggaactgtgcagaggtttaaatgggcattgatgccagccacacttgccagctctgtagccttaggcgagttagctgaccttgctgagcctcagttttctcatctgcaaaatgaagcatgcagatccctcttgcaaagggtgtgtcaggactgaatgagattatatgcataaagccgggtacaggggttgagaactccgatcctcctcatcatggtggggtccttgtttcagctccattccattccagtcctcaacagtgtgccttggtttctctgcagaatggggagggtagggcctgagcccactggacagtgagcacccctccaaagaccttagatgatggagtggctggggtcaggaccagtgttgtaactgctccccctgtctcttctgggtgttctcctattcccactccagctgccacctggagggaccagtttgcagcagagcttccgacagtgtcactcagagaatcctcccagaggccaggacattgtgtaagccagccagtgatatttgcattgtcatttgcatttcatttgcatgcaccagtttagactgcactgtcccttctaaagcagggttcccaagaggcagcctgcatggagaataatacaaggcttgcagttcccaggtcctgggttcgtatgctcttcccttgagctttggtcccctcacctataaatgggaataacctggcctccttcacagaggccctctcttgttcagcaaatattgattgagtttctgccatgaggtaggtggggatgagtgacctggggacccactgtgacagggcaggccctgggccctgccctcatggagcttacctgcagtgggaagacaaaaaataagtcgactaatttctacgtaagagaaccacggcttacaaggtgtgcaggaaggaaagaagcagagcgtgatgaatgagtgagcaagtctgacctcagccacacacgctcctgattcctctgtccccagagcaggtgggcagcaggtggctgggctcactgacctggcaaccaacaaggagctgatccctgtccactgtgtcctgccagaggcatcgaggtgggatgaacagctcagtccctgtctctgcggtcttgagatatctgccctccagacctgggccagaagtaagggtggtcagtctgagcagcagggcaggacttgactcaaggatgtggatgggcgacgcaagacacttgcaggctctatcagccagcgggagcgatttgccggaacccttgtctttcaaggttcagagagaaataaaaatggaggacgggatggtgggggagttttcctcttgctcccttcctcatgccagtggctggggtcgcagaagccctcatccgtcatcttgccaccctagcaggtgcaggttgtggaagtgataggagggccaggtcccactgtgaccagaggtgggctgggggtgtctgcggggcttaaggggagggatgagagagcacacagcactgacctttaagcgtctgtcagcttctccccacctgtgcctcacagccactcccaggcacccgcggcctctcgccggcattcactcacccgttcattcattatcagtggcacaaagaactcatcagctatttatttatttatgacatggggacagtgttgtagggtgtgtctcgctatgttgcccagattggtttcgaactcctggactcaagggatcctccctcttggtctcctgaatagctgggactgcagtcatgtgccaccacggcccctgcatttgttaaacaggggtccaatcagtgcctatctctccatttgaatggatcacggggttgttgagaatgcaaaaccagtgagtgagttacacacaaagtcacttgctacggggtctgggggctccaggaagttttagaaaatttgctcctcctcatccctgattcccatccctcctagacaaccatttgaatgtctaagatttatccttttgtgggtccacgttcttgccaaaggcaggctgctatttctcatgtacatactttttttgtttttttcttttagtttttgtctttttaattttatgttttaatggttgaaataaaataatggtccatattcatggggtccaaagtgatgtttcaatacctataatgcacagtgaacagatcagggtaattagcatatccagtatctcaaacattacactgtgtaatcgttttggtacacattttattgaagaataacatacagacagaaaggtgtacaggtcccccaaatacaacttgaggactttttccagagtggactcagcccccagcttgtgaccagcacccagtaacctggccatgcctcattctggtatattacgtgtgtttttattttatttttttttgagacaaggtctcactttctcaactggagtgcagtggcacaatcacagctcactgcagcctcaacctcccaggctcaagcaattctcccacctcagcttacacagtagctgggactacaggcatgtgccaccatgcccagctaagttttgcattttttggtagagacggggttttctcatgttgcccaggctggtctcgaactcctgagctcaagcaatccatctaccttggcctcccaaagtgctgggattacaggcatgagccactgcacccagccaacatgtatgtttaatgtcccagccgtggctgagttaaggctcctgttctgttcctcaccttggtctccatgtactacgttttcaggtacatctgggttgctgttcagaagacacatatcacctgccgtggagtccttggcttgccctgtgtctgccatatgccacctccccactccctctaggccggctttggcaccttgaccaggccaggcctggtcggtgccggtgctcttgcctgtgccgtcccccagcctcatgatggttcaccccttttctcgaaccacctcctttccccagtcttcctggtgccaacctgctcctcatcatctcgttgtttcttttcttaatagcacttattctactctgaattcccttgattagcaatctacctctctcattattgtctgtccccttcacctggaggtaagggcaaggctgcggcttccgtcttcactgctgcatccccaatgcccaggagagggcctgcgcctggtagaagctctgtaaatatttgctaagtgaaagacccacgcgcagcaagctgccctcagctgcatgctccagtccacattgctgccgatgcggttctcagtgggtctttttctttatatagctcacaggctccccaaggcctgagccagggacatcgccagctcctgctccatccccagatcggcggacctgcctcacaggtgtttcactaaccttgttctgaaccagacatgccagagagaaatgcattttaaaaccatgtgcaatttaaagagaatttaatctgcatgtctgggattcattaacacgtagatcatcaaattagggtttgctcacagctgtttgacattcgaagggccttctgagtatctttaataagtgcctttaaatattatttttccttttaatctcagggctgggtgttgagcatgctgttcttggaatgggaacgtgacacaagtgacctggggatggtggatccattcctgcaagagtgtggcaggcttggagagcttggcacggagccatccccactctcctgccctgtccccgtcattggcaggcaccggccccaagctggccagagccgtgtgttcaaaatggctgttgagagaggcagtgctcttctcccaggcacatgagcccgggaggatgcaggcctggaacatcttgtcagcatatggagcctgagaatgagcccaaataggaaagcaaagttcgggaggtgtagagatgctggtgacattgacgatggctggacctagccatgactggattagccttgttaggagataaattgtgtcctaccccctccaacttcttatgttgaagccctaacccccagaatctcagaatgtgactttatttagatataggctcatttgcagatgtaattcgttaagatgaggtcatattggaatgggcgggcccctaattcaatatgacatgtgtccttataaaagggggacattcggacgcacagacatacatagggggaagatgacgtgaagaaagatgatggatgactacaagccaaggagagaggcctggaacagatccctctctcacagcccgcagagggaaccaaccctgttgacaccttgaccttggcctgctaccctccagaactgtgagacaataactatctgttctttatgcccctagtccatagttgtttgttatagcagttctaggaaaccaatacaaaccctctttgaactttttagttatgagaaccaatatatcccctcctctctccatccctccctctctcgttcgctcccttcctcccttccctccttctctccttcttttcctcccttccttccctccctccttccttctttcctttctttctttcttccttccttcctccttccatccttctttctttacttctttctttccctccttccctcccttcttcttctttcctttcttttccctcaagccaatttatgttgtgtcttttattatatacaagggcaaaactcttactcaaaatcactctcctgcttaaaatcttttttatgaaccatctcagagttagtggcataaaacaaaatgataatttatttcactcaaaagaggcaatttaggcaggatgttgtgggatggcctgtttctgctcaattggcgttggtggggagctcaactggggctgcagaacccacgtccaagatggatcactcccatggctatcaggctgtttctggctgtgggctgggggctcagccagggcaatggatttctcttatatcagcccctccacaggctgcttgagcttccttatagtatggtggccagatccaagagcaactgtcccctgagagcacggtgaagtatgtgacattttttatcacctgttcaactcacatagcattccactcactatgctctattagatgaggggataaatgtccacacagattaaaggggaggggacacagaactcagttctctatgggaggagtatcaacaccacattgcaaaaagagtatggggaatgggagatactgttgaagccagctgtggaaaatgccatctgccataggccacatgctgtgtggtttcatgcagatgaaagtcaataagaggcattcctaatggatggcgagagaagtcagaatcgcgttacctttagaggaaggtagctttgactagaaagaaacacaaagagatcttctggggtgcaggacatgatctctgccttgatatgggtggaaaggacacagatgtggatatgtcagaagttgaactggtcacttaagttcagtacccttgatgcattttatacctcaatttaggaaattttaaaggctgtaatgaagagtatctgaattagcacagagggtaaaagtcctctgccagctcccaattgtccaagatgcttggcctggcacagggaggccctggagacccagcccccagtgtccccttgggattgagttctgtctccccttcccccaactgttgcagattcttgaatgtctccagctgtatgaaggatgctgggagagtgctccagaaggcatgaacgccaagtgcaaagaccttgtgtgaggaaagggtggagggtcaggagcaggagaaagaggcaagggtcatggagtggctccacaccagggtgtggcgtcacctggctggtctgttcgaaacatcctaagcccagagctgccgtttctggctgggtgactgtgggcaagtctctgcttcctcatctgtgggataggtcatgacagtcctggccttgcatggtcaatgagaggagtcagggatgccatgaccatgaaggtcctggcccacccctgaaattgctcaatgcagctttcccttcacccctcatggatccctaagtcctggcaggcaaggcctcctgtctctgggacatccttcctgttcttaccgggacctctgccctttctgggccacgcttgctccctctgtcagacttctggagcctgttgggtgaaagatagatggagccattcatctgtgcagtctaaaggttaattcaaagggcagccatgggctggagatggtgccttccacctggctccagttcacagaccaggaagcggggcaggtggggtcatcagccagaagcttttcccccgtgtaaactgccatgcggtaaactgcaatccctcaggtgggctccctggccccttcccacccagcctcatctcctgtgacttcgtttccatcctgtccatgttatcagtgccctgcctggtcttgggcaagtttctcccctccttgaacctctattttcccatcttgtattgggaccatgagaccaggccatgccagcaacccttctgtcccagacattctaagactgcgcctctccattcagcggccaggtgcacctgctacccacctagcaccttgctctgcctggctttcccctgttcacctcacctgggccacccaccttcaccatctacatcctttcttttcttcaagaccctgtaggaaagtgtcagaggcatttccccgattcaccccaaactggtccaggttggttctctaccctgtagttcccagtggctgtggccttagtctgtgtgagattcatccgcacattttttgggccaatctggaagtatctggaattcttgtctctttttgcctctctcgtctcaactgaaggattcccaagggcagagctgggtccccatcatcagactgacatgtcccttagggcaagagctgagtcttccctcttcgaataggttcctatccactacccagaagacttcagaggctgggctgaatcctgcctgcaaaatgtgtttgcctcactcagtaatttttctttttcaatgttgaattagttgtcgactcttaaaattaagtgatttaacatacaactctatatttgtatcttagaaatattataagggctggctgtatcaggcttgtatttcctgcagtaatgatgggcaggagctgataggaggtgctcctgtggatggggtggatagaatccagtttgccccagacctcactgggccccacactctcccaatacctcatcagtcctgtaggcatttgggtttgcagtcctggccttggggcccgaggtactgtctgccttcagtagctgtcagcctgcagtggcaggggcaggagagcaattccagagaggaatgcgagaatgaaggcttctcttctcttctctgcctcattaggatcggaatgggctggagatcaatgcttttaaaaatcagatacatactgacactgtttctcgcactgagaacagtctgtactgacacagaatgattctctaatcaaaggcttgcctttgggaaaattacatgaagaagtgctggagggagaggcattttcactcagttattatttatagggggcctactatgtgctaagcattgagccagatgctttagagacagcattgaacaatgcccagccacggtgctcatacagctcatggtcatatttcatttaggcagaagaggcccagagagggcaagcagagtaaccaagatcacacagcagaggtggaaagaaaactcgcactgcttcccaagcctcctgcttcttccctctctcagccacatcagtgtccctcctagccccctctgccagagtcccagcacactggctcccttcttcaactcctctccaaattgtgttgcagcatccttgcattcagctggtcactagaaaatggggctcatccagtggggttggggtctgctcagaacaaaaaaaactggcccttctctggctgttttccatgagcccaggatgccctgcctaactatgaaggctgatttcaatattggtttggaatttagcagcgttccaggcagatcaccccaagtgggatgttctacagccaggtagctgctcagtggctttttaaaagagacaggcttggagcagagtcccgaactgttagcacctccccttcccctgtaaatacaggttgagtgccacactggttgcctctggggctaagctgggctttattttcaagccagactcttgtgtttgaaaaggaagggcttaaattccattctacagctggctgctctgcagatgtgcgagaaacagccagctctcccgacacagcctgcatggttcagtccagagatggttctttgaggaactggccagctgggctgggtttcagcagtcagatactttgcaaataaccagcagcgaaactcaaccaactcccccaaaagccattggttgaacccaagcccctgggtatattgaaaccagacagacagactttggccaacagctgctgggtttcaagtgggctgactgtaattggctcagaatcagtggtttgccaaactaaaataatcaatggtgacagctaccatttattgagcatctgctatgggccaggcatttttgtgcgttgcagttttgcaaggttgccattaacatccccactttactgaggatgaagttaggcttcgagaggtgagttctcctgtctgaggtcacacagctggcttcctggccagtggacagcctgaatttgattcccaatctctctcatgcccaaagctcatactttttatttttatttttttttttgagatggagtctcattctgtcacccagactggaatgcagtggcactatcttggctcaccgcaacctctgcctcccaggttcaagtgattctcctgcctctgcctcccgaatagctgggattacaggcatgcaccatcatgcctggctaattttcatatttttagcagagatgcggtttcaccgtgttggccaggctggtcttgaactcctgagctgaagtgatctgcccaccttggcctcccaaagtgctgggattacaggtgtgaaccactgctcccagcctcatgcttttgatttctccctgcatctgcaaactagtttcctgtagggtctgaggtgaaatgggcttgagagccccccgcccttgctctcctctctggtggatgctcaggaggccaagctgaggctctgcgcaccaagcttacctgtttctgcctccccttggcatcctgccccagatctctgcacagccccaaatgtccccaacacggtgaagggatgctaagctgccctaggctcagggcaagcctgttgatagagggcagcagcagcaaaaccatttccaatcaaggctttcaaaagactaggatagactccttctgtttcacagccttggtccaaaagccccgaggctgagtcctggaggaaatgtctcagtccggaaggtcctgttagcctagtgaataaaggatgaaaatttaacaatggttaccccagtaactgacttggataggacccctcctatgcatcagagatcttacaagtgttattgctgtggtgtagtgggtgagaacatgcacccactctgggtgagccagattacctgggttcaaatcccgatttgccatttgccagctgtgtgccttgggcaagtcacttcatcttcctgagcctcagttttctcctctgtaaaatgggcagaataataggacctgcttcacagtatccttgtagtaagaaatgagctggtacacaaagttcatggcacagaagctggcaagtagcctagtgctctaaaatgggcagaattttatttatttatttatttattttttgagacagagtctctctgtcttccaggttggagtgtagttgcacaatctcagctcattgcaacctccgcctcctgggttcaagcgagtctcctgcctcagcctcctgagtggccagcactacaggtgtatatgccaccacgtccagctcatttttgtatttttagtaaatttagcagcattccaggcagcaacatggtttcaccatgttggtcaggctggtctcaaactcctgaactcaagtgatccacccaccgcagccttccaaagtgctggaattacaggtgtgagccaccacgcctggcctgatgtcatcatttttaatggttatgtcttttaatccacatgagaaccctgtgaggcaggtgttagtatcctcattttactgatgaagagactgagattcagagatgttgaataacttgcctaaagtcacacagctggtaggtcacagagctagagtttgaacctgtacttgttccttaacgccagttactaaggtaagatccccaagagctgatttctgtgaagggcagggttgtaatctcttctctccagagctggatccacctacaagcagctttcttcagctggaagggtttttttttttttgtttttattcagttgatttaaaaatatttttaggaccaggcatggtggctcatatccctgtaatcccagcactttgggagaccaagacaggaggattgcttgagctgaggagtttgagagcagcctgggcaacatagtgagacgttgtctccattaagactcaaaaaatcttagccaggtggggtggtacatgcctgtaatcctagctactcgggaggctgaggcgagatgattgtttgaacccagggagcttgaggctgcagtgggccctgatcgtgccactgcactccagctggggcaatagagtgagaacctgtcttaaaaaaatgtttttaggctaaatatacagaagagaaactgaggcccagaaaggaagtggccctgcccacagacacccagcacacttagaaccagagccccagccagtgcctggctctgcctccgtcctgctggaaaggctccctttggcccctccccttagggagtttgctggatggactggaggggctgggtgaacaggaaaatgatgatggattctcctagagaccggtgctggtcatggctccgttgattgatggccgaggggtgtcactcccccagccagactcagcatggccccggggctgggaatctgtcagctggcgcatcctcactctgactgggggacatggggaggggtgcgtaccaggaaaggagcagcttcccctagggagagtccatttctgcaggcggagacctctggagatccagtgaggtcacacagatgcccagggccgacctgcagtgggaatgtgctgtgggggctagtgcaggcctgagaggctcccaggaagccctgctgggggctctgcgctgggctgtgccctcctgtggtcccctcagcaaccctggaggtgaggctgtcaatgccctcacattcccagcaagggaaccgaggttcagagaaggctagccatctgcttgggaccacacagctagttaagtggtggagtagttcctggagcccgggtgtccctgtctcctctttgactctcagtcccgggtgctttctaacgattacacacacagggacacacacatttataactcgtctactaggtataatcctatgaaagtgcctttttttggtagactaaaaacagtagaagaactgcaatttcatgaggttcagtcaaatgtaaattatatttaggtatatatatatatatatatatttatgtttgtcaatttattaaagaaatgtaacttatgtaccttgcatatgtaatctgtctcatatatgtgcattgtatatacaatctatctgaggtatatccaattaccaatctgttacagcatatctaaccagcatgtgctgctacatcagcccttggaaaaaatatagccctgattgtagcatctgcccatttctctggtgtaaatgttcccatcaaggctgatttcaggcaacccatatgatgttacagaacagagtcgggaagagatgcccgggattgactcaccggctgatgtgaatgggggctccagtccacccttgaattttttcatctacctcaaacatataatctgtgtatctcaaaaatctgtcaatctatctgacatataagcatagtcatacatatatataatttactcccctctttctgatagatctctgatagttatcacatctgtcatcatgtggagctctctacttggaatccactcattcgtccatccacctatccatctgttccgtgtgtttgtttactaaactccaggtctgtctcattcttttccctgtggtgtttcactgtttcctgctctgtatggaggcgaggtagggctgctgggctggtgtgtggttgggtgcagtgcctgacttttctcatccagggcatctgcatggttcctctccgagcagggccccctgccggccttacaaccacaggttcagaggtgaggtttggtgaggttgtgctgagctgacaccacttggtcttggccaatagaagttaattttatcctcccatggcttgtcctgatgtaggatcagagccttcaaacaggcagtacaggcttcactggggtatgtctgctgtctttgttctcgcttcttctcctttttttttttatgggggtggtggggggcggatggagtcttaccttgttgcccaggctggagtacaacaatccacgtggcatgatcttggctcactgcaacctccgctttccgggttcaagcaatgctcctgctttagccttccgagtagctgggattgcaggtgcctgccaccacgcctggctaatttttgtatttttagtagagatggggttttgccatgttggccaggctggtcttgaactcctgacctcaagtgacttgcccgcctcggcctcccaaagtgctgggattacaggcgtgagccactgtgcctggccctgggacaaggtatttcacagctctaagcctctgtttcctgatgagaaaaatgggagaataacattatctccttcatgggactgccatgaggttgaaatgaattaagattttcacagcactaaatggcatctggcagaattggcatttggcagctctcaagcaacatcattctcctgaattcatcttgctcagtatggtcgttctttcaactctcttgtccccacccagcctgtaaatagctcctaggcagggctccccagtcatctcgcagagcctttgcactaggtaaagagactttggtgtcgttctaaagaggcgctgcagggttcacgcattgcaacaacggttgcccttgaaatgggccccctgtgagggccgaaggctttttcagtgggaaatgcccaccttctcttccttcctccagtaagagaagctggagagcagacgggttctaaatcctctcctcatgctccaattctgggataaatgcaggctgtggggatgctcgtgtcttctcaagaacgatactcctgatcatccaatccaggctcagagcccctggatgtctaaaaagttcttcctgagtgtttaataatagcacagggacatgcctccagctacactggcattctttctgttccttgaagatgccaagcacatctcagtccctgggattttgcccccgcagtgccctctaccccgagtgcctcccccctggatcttttcacggttggttcttccatggttgggctcaggttgggagttcaagaccagcctgaccaacatggggaaaccccgtctctactaaaaacacaaaattagccgggtgtggtggcaggtgcctgtaatctcagctactcaggaggctgaagcagaattgcttgaacccaggaggcggaggttgtggtgagccaaaattgcaccattgcactccagcctgggcgacaagagcaaaactccatctcacaaaaaagaagttttttcttagaagagactttcccttaccaccttgactaagttgccccaagccgttcggtgactttccgtcgttttcctgttttattttctttatagcagttctcatttgctgaacatattctatgtgtggaatgatttgtgtcttgcctgtctccctcagtagactttcagctccacgagggcagggggcttgttttgttcactgcagtatcccccatccccagaacagtaccaggtatgtaagagagacttaaattgctcttcaatgaataaatgaaaggaggtatgcagcgtgattcaaccatgttaaaatgcatagaataaaaaggagaaagaaaggtaacaaacaaatgttacgggactcttcccccgtcttcttggttatacattttttggactctggaaagtgcacatcttaactttataattagaaaaaatacccaaaccatgtgaagacaaagctctgctgcggcagtctggccaatctttctctgggtttagctgaggttcgttttatttctgctcctgtggttctccttgaatttaaaaacaaaccccgctcatccccttaggaaaaacttctgtagaagtcagcaacctgtcgctaccttctgcttttgcttcacttcttggcctcaatttctgaaagaagatatttcattttggatggttcacgccccgcccccgcccccggcgcccgtaagtcttctgggatacatccaggaaggaaggcagagggcaaagagttaggtggtggcgtgcttcccccatcagattgggagctccccagcacaagggctgtctcctccatcggactgccggacacctccagataccttttgctctaaaagcagtccctccattctccccctcttccttcctgtcttcctttttctcctcatcccgatcctcctccaggagaaggtcttcacggtccttgctctctgtcctgggtcagagggtcaggcacaaggggtgatctccttggcagaagtttccactgcctgcctgcacaggtgggttggcgagcccaggctgtccctcccccaccctagaccttctaggcagaggtgaagcctcattcgccctcgatgatctcagccccagtaggcacctccccactgggctccactgcccccgtcccgcattacacacgctggggctcacgattaccccgaattcatcctggtggtatagtcttctgctcaatacggccattctttcaactctcttgtccctagccagcttgtaaatagctcccaggcagggctccccagtcatctcatggagcctttgcatcaggtaaagagactttggtgttgctctaaagaggcgcagcagggttcacgcattacaaccacggctgtccttcaaagaagccgcctctgagggccgaggctctttcaagagaagctcccgtgtgcagaacgtttccggaaacggccatcagaagcagcactattcatgccttagtaatcaggatgagggcgagaacgctgcttgctgctctaagaacagccacagctaggcttctgcagcgacctctgtgtgccgacaccgggctgagtgctcacacgcctactccctgccagcccagccatcggattgtgtcactcgctgctcagaatgagttcccattgaactcggagtacaggactcatcaccatggttaccacggcctgcttctcctccccaccctcctttctccacctcccaccctgtccctggcaaggctccacctctgggcctttgcccttccttcctgctgcctagacttctccaggacacccacacagtccgttcccgcacctgctccaggatgccagttaagtggtaccttcacagggaagccactcctgaccaaagcacttaaaagtgctactttgggccaggtgcggtggctcaagcctgtaatcccagcactttgggaggtcgaggcaggctgatcatctgaggtcgggagttcaagaccaggttgaccaacatggagaaaccccatctctgttaaaaatacaaaattagccaggtgtggtggcacgtgcctgtaatcccagctactcgggaggctgaggcaggagaatcgcttgaacccgggaggcggaggttgcagtgagctgtgattgtgccactgcactccaacctgggcaacaagaacaaaactccatctcaaaaaaaaaaaagggctactttgcctccgggttcccctaaatctctagtgctcttttcctgattcattttcatcactaccacgtgacatcctatatacatcagaggtccccagttcctgatactggtccgtggcctgttaggaatggggctgcacagcgggaggtgagcagcggggcgagcattacggcctgagcccctcctcctgtcagatcagcagtggtgttagattcccatagaagcacggaccctactgtgaactgcgtcagtgagggatataggttgtgagctccttatgagaatctaatgcctgatgacctgtcactgtctcccatcacccccagatgggaccatccagttgcaggaaaacaagctcagggctgccactgattctacattatggtgagttgtataatgattttattatatattacaatgtaataataatagaaataaagtgcacgataaatgtaaggtgctcaaatcattccaaaaccatcccttcccacccacccatctcctagtccctgaaaaaaattgtcttccatgaaattggtccctggtgccaaaaatttgggactgctgctctacattgtatttgtttgtcttatttcttgtctgtctccccctgctggaatgtcagctcatgagaattcgtccagctttgctctcagctatcaacctggggcctagagactggcacattataggagctcaataaatatttgctgagtgaacaaacatccttatgcagtaggtgccattaatcctgttttgcagatgagaaaaccgaggctcagaaagactaaatggccgggctacctttgcacatcctggctctgtttagcagctacagtgtcataggcctagtgctaggctctgggggcacagagatgggtccctgccttggagaagtgccctggctggagtgggagacagagcagcaggtgtgtataacccaggctgctgtgcagggctggaggcaagcatagtgggctgtaggaacatacccctgtccccagcctggggcatcagggaaggcttcctggagaaggtgacacctgagctgagtcttagaggatgattagacatttgtcaggttgggagaggtagcagctaaggagggaagtgttgtcccagctacatggagtaataggataagcaaagccatccagatacgagaatgtggggcttttgtatgcctgcagattgtccggtctggctggggtggggaagagaatgcatggcagggagtggtaagaggtgggcaagtaagataaatgaggctggaaggtcaggggcaagaggatagggagcaggtagattgcccagggccatgctaaggaatttgggcttcatctcccagggcttgggaagggatagggtacgtcacttttgggttctagactgagtctccgttgactgtggggaggtcagaacagactgtggccaggtgggaggtaggtggaccaacgaagagggtgacctgggtgagcaatgctgaggcctgaacctgggtggaagcaggggcacctgtggcgggaggaacttcagaattattaaagaggaagagctgtggcagcctggcgccaggaggcccgggcgctcatgactgctgcttgtcttggcctaaggcagttttgtccagcttgacagccctcctggcccatgagattttagctccaagtgattcctggatgactcagaaaatcagcatcactccctttaaaggataaaggtacaggcccccagtggaaaggtgctggctcggaggccccttcccaaaatacaggccagaatgtctccatcactgacagcgtcaaggccatgtgcaatgtggcttgtgggtagagactgtggacgttggtccctgacaggtctgggtttgaatctctagatctctgtctgtgacctgctgcttcctgggtgcaacacagacaaaatatttatagcagtgacatgaggatggaatcagctgacacgtgtgaatctcagcacagagcctggcacgtgagcagtgattaacaaatgatcacatttacttcacttttagctactcccattgccatgattagtattattttgggaaggatatttaattaaaaatattttgactatggagaattttgaacttccatgaaaacggacagggtgtctaaggacccccatgtacccagtccccagccccactcgccaccaacccctcttcagttctgtccccttcacacccccatcctctcctcttgtccgttattaagttaaagcaaatttcaaacatcccatcattcattcataaatatttcatcgccatcactattaataatatacaaagtgactgctctgaaagtaacgactccatccaggaagcacccgtggggattggcttcctcaggttaaacttgtgcagggcaccttcgatgccaagataaatacagtccctgcccccaccaggagctcccggtcacaggctaggagtgcaggatagagaaaggggatgggtataaacaactccaaaaacatggtaactaagtgctacaatctagttggatataaagtgatgcttattttctggacctgagatgtagggaagcagttcgtttcagagaagccttatatttacaaaaaaaaaaatcaaaaccaaatgaagcagtcatgtgtagtgcggggcagtaggggaggtgtcgggtgtgaggccagagagacatgagctgaattccagttccagctccagcacttactgattgtgtggcctggagtgagtcacttcccctctccgtgcctcagtttcctcctctatcacactcatccctgggtaagtgctgatgaattccatttcattgagcagtgctgggagaatcagttgatattcataaccaggctgctgcccgtgactttaggcagaactgctgacctggcaaattaagttgtaactgaacggcaaagaaaaatgtgtcttatgcgcccaattacacaatagacggtttgggacatggtttgcttagttaaatctataaccaattgtggatctatcacagcttatgatgctactctaattggagctggttgtcaaagtcaggtgggagggaggtcaccaggatctatataggttgagccccagggcttgctgaatggacctggctcggtgtcatggcccaccatatcctaactgtgtttctgagggcaagttgccactcctctctgagccccagtattcccatctgcagaatggagagaattcctgcccagcttcctcacttgactgtgccccaaggcagcccctagagagctctgagggttgttctaagtcacttattcacccagtgaggatttattgggtacccattatgagctcggtgctgggcacagtgctaagtgccaggtatcatgtcgaggagatggatggagctctcgacctcatcatgatgcactcggtccagggaggaaggagacattgcttggattggtttaaagggaggaaggccttggagaagttgaaagatggggtcatttgacttcatctagagctgagactttcctacccctgagaataagggacagtgagccagtggcactggagctggggcaggaagggggattcgcacgtgcaaaggccctgtggcaagaggatgcctggctgaagggggtaccatgtgtcgacggcaagagcgagaggtgagcccagggacgtggatgcagagccgatcggcagagcctcagagccacactacggggtcagggagctgctgaagtggggagaagcagccccacgaactagattttgttttcatagtgcccctctgactgccctgtggagagggactggagggagagctggaggggaagcagagggcacagctggggcctgtgcagttctgagccatagatgatggtggctcgggctatgtgggggtggcagcgattcagtggatggttccaggatgcttttggagacagggttggcagggccagcggaggggtcaggcagcctgcagagggtgtgggtttctggacagagtgctggggtgggagaagctagaggtggggagtctgaggggtggccaagaagatcccaggacaagatcagaagttccggttacagccagtttgaggtgcccctgggacatccaggtggggtcaggaaacagattaaagacaccaagcttgtgattttgtcagtgcctcatgcacaggtgaaatttcggagtcatcagtgagcaggtggcatttcaggccatgcacatggaggaaatcactccgggagaaaatggtttaggcccagtcctgaaggccactccttaggagttgtgtggaggggcagggacagctggggagaccgagaaggagagaccagggaggggaggtgcagatgccgggaaagcacgttgcaagaagaggggaacctccaccggccaaatgctgctgggagctcccgatgggtaggctgacaggcgcctgttggatttggcaacgtgaggttggtgggtgggggcctttggggttggggctaagcagctgatgggaggagacagagaggcaggtgtgggagccatgagggctcaagggaaggtgtcctgacaaaagagagagggcagaacatttctgaaagctaatgggaagggtccgggaaggggacagactgaagacgtgggaggtaagtgaaatatggcatggagggggttcctagtgggacccagggtccaggtggagagactggctttcagtgagttgggggggactttctccctataagaggagggggcaactgcagtggggcaggaggaagacatgatggtgggtttgcatctgatggcttctctattctctaagtcttaaggggtaaggcctgcagcagagagccggcggtgagggagggttgcgtagaagacagaggagagaaaataggcacaaggtccttggggaggcgagggcactctgtagatgaaataaggtgcacgctttttgggtagttgatttcctgaggcttaaccactgtcatcctgaccttctcattcctcaaaggccaccgcggcctctccctggagcagcggtgccttggctttcagatttttccttaagcagcaaaccatttcttcaaataaaacttgacacggagccccaacaggtgcagaccaaagcaaagctgttctggcgatgaagcctctgcccgactggcttcgcctcccctccctgtggcatctctgtgaagtctgaggctccctgggacccagtgtgaattccactgatggaggagccaagttctagccccctctttgccatgtgttaggcaaagctctgtgcctcggttgccttgtctgtaaaatggggatattaccagagcggagagagaagcctgcaccagggcatttctctctctctttctctctctcgttgtgtgtgtctgtgtgtacatactccccaacttcttttcttcctttcttcctttcctttcctttctttctttccttctttctttttttctcttcttttcttttctttttctttttttttcagaacctcactctgtcacccaggctggagtgcagtggcacaattttgactcactgcaacctctgcctcctgggttcaagcgattctcctgcctcagtctcccaagtagctgggattacaggtacacaccaatgcgcctagctaatatttgtatttttagtagagacagagtttcgacatgttaaccaggctggtctcaaactcctgacctcagtgatccacctgctcagcctcccaaagtgctgggattacagacgtgagccactgtgcccagctatttctatgatttcattagcatccataaccttgcctcttggttctctatttagcagtcactcatcagctatcttgggttgttattgtggaattaggacttgaccttggtctgactgcaaagcctatgccatgtagatgaaacaaagcattttacttctcaaccagatgtggcagcccatggagctggatgctggggctttgtcttgggacagagggattggaaatggcctaaagggtggatttgccaggtgggcaataattccacattgttggctgcaggaagcagtgaacgcaggtggggtggaccagttgcttggcagtgtctgggccccacctgtctgcacagagcactgtgtgagaacagggctgtgatgagagtccaccagctgaatttgccacaacagggagtggactcccctccccacccagcctgaccttgagacggttgccctggaagaccatgctgagatggaggggtgcagtgtgggccttggaggccgacagacttttgtttcagtcccagcttggccatttacaagctgcatgaccttctgtggacctcagttccccatctgtaacatggtagtaaaaggtcgtcacaaggatgaatgggacactgtgcgcagcgtgcccagctggtgcctggcacaccgcaggtgtcccacaaaggtggtccttcctctggctttgcccctctctcccattcagagcccaaaggcctccctgcctcttcagtcctgggtgagaagacctctctgccctctgcgtgttccttgttattaagtggatgtggattttggatgggatgacatggcacggtgtgggccgtgtgatgggcaggcgccacatggacctcagactcacacagagctgcctttgaatcccagtgccgccacctgctaacttgatgatcttggagaagtcacctgcttctctgggcctcagactcctcatctggaaaatggcaagaatcatgacatcacctcaaatggtgattgtgaggattaaatgcattgccatttacactccccgaaccagaccatagccacttctgcttcccaaggaggcagaggtggcacaactggtgtctaggggagaatacatctttgcactgaggcctccacctacagagcccgcatataggccaagagccaagcccaggaattccctgtccaggcaatttccgagcttctcccagggctctgggttggtaagggtgaagaccggattgtttggcagagcctgtgtgaggtttggggtgtcacagcaggcctggcggagctctgggaggggagtgaaagccagctgcctttgtgagaaacaggagcagatggctgctgggggttggaggccaggagcaagagaggggaggagggggaggctgaggagctggtgggaggctagagggctggggttggggagctcataaggacaaggttccttccatccatgggacttggaagaaggaatttcatagcagagatgtctgcttttccatttccaggcaatgttatttttcttcattagcactacccaaaccttcagcaaattttggacacacacatgtgccttgtcctggtggaagctgggaggaaccaaggcaagggggccactatgtcccacatttgggataacagaggaagggaggagagaaagtccatgtgagaggaggtggatgaaactgagcctttcccagatgaggggccagagcaaaagtagtcatctgccggtgcctggagccacttcatttgaatattaaagagcaggtgaatcataaaactagaagacttggaacatcattcattcatctgcagatattaattgagcatttactacatgcctggcatgctgctggggatacaaggtgagcaaaagagaagtgcagacatctgggcaggtaaccagggttatgcacagaaagtatcccgagtttttctttttaagagcatgagggcccagctgtgtgagaatgatggcagctaggtggtgttaatgccatcggacaaatgtgttgatggaataggccccagagagtcgtgcgctgcatgctaattgcatctgtgtttctccagctgggggtagtggctgtgatgcaattaacacggagggctggtgtggagctgtcatttttccagccaactggcctcgtcccacttatgaaggcagcttgactttggactttgcatggttcttttcccataaaaacacctggaaagtgtacgggacttttctcctcactacacgcgcgacttgacagattttaagatcaaattcactctcaccatcactccctggagatttgagggtggagctggctgcagtgttcaggaaaaatacagcggatctcagaggagactggcagcatgttagggttgtggagtaaggctgagtcttggattcctcctctgggtcatccagactctctttctggtcctccaaaagtggaagccctgggtttgaaccccagctccacctcttgatcttggccaagacatccctgctgtgagccatgaggccctggactggcagatgggggcagtcatggtgctgtgtctgcagggttgtggtgaggatcacatggatggtgtctgtgaaacacagcacgctgcccagcactgagtcagctctgttagtgacctgggctgcaggctcgtcagtgcagtccccaaacattcccagtccccctccttctgggtatatggaagacagcttctctggctgccttggggtcgagtggagccacggactgcttccagccgatgagttgggaagtgacccgggcatcatgcttgcctgtgggagactctccaggggctttgttcccctttgccccaatgactggggcagtatgggtcctggaggaggacacagaacagaccccagaggatctatcctggtcttgttaaataaatgagaagtaagtactgtggcttgaatccatttgctgataatttgggactgtttgtgagggcagcaaacatagcttttcccgactggtgagaaaattacttcctctctctagacctgtttcctaacctggaagatgagaggctggaccaatggccaggttgtctctgggttccctccatttcaacctccaggggaggaaatcaaggggctgctgtccacacccacacaggagcccctgcctcacccctgccacacccctaccttgcccctgctttgcccctgccttgccccctgcctcgcccctgcctcacccctgcctcaaccctgccatactccccgtaagccagcagattctgttgttgctgtaggtgggctgtactggaaggacagggtgggctggagagaggaggaggtccctctggcgtttcaaattcagtagacccagaacagaattcctcctcccgctggctcctgcttctggcttcctcgctcagtggggaccccaggaatccttcccgtggcccagcagagaaccctggatgccatcctgtgcttctccatttaccccacccaaatcctttcctttccacactctgatatctcccatatctgtcctctcctcctttcctgtttccatctgcctcctgcaacagcgtcctctttctcctctcaccttgtgtcacaccgaatccctccttcccatccatttacaccactgctgcccgagagatcttaacagacaacctggatgcgtcactctctcctgagttcaagatccaccaagcaacttgtagtttccccattctccatcagggcctgggccatgcaaattcctcttcctggaatcccctttgacccatggctgcctgaggaattcttattcttccttcaatgctcagcttaaatgcctctggctatggaaagccttctctgaaatcacaggctttcctggtgcctttgtgaccacacttaaaacaaggaggccacctgccctgtggcagcaggcctgtgagctgctggggaggtggcggacagggactgaaccactcttattcctctgggggtccctagcacagggcccagcagatggcaggtgcacagcaagtgacaatcactggtccacccactcactcacccatgcctgtgccccgcagcaccctaggcactgggaacgcagcagtaagggtgatgcttgctttctattgggagagggaggattcagcagtaatcaaggactaaaatgaaggcacaagatcattttgagagaagcaagtgccaagaaagctgttaaacccagggctggagaaaaagtgctctaaatagatggtcaggaaaggtctctttgaagaggtagcatttgagctaggacctgaatgataagaagaatcttccatttgggcacccaaagagaaaagcattctagcaagtgggaacagcatgtgcaaaagcccaaggagagaatcgctcagtgcttattgagttggatgggtgggtgggtgggtgagtggatgaatgggagatgcccactccctcttcttctccctcttggggtctggatgctgagttgctttggtgaccagagccaaattgtttctgctctccaagatgacagacagaacctgccactgggtgtttatggtcaggagcagtcaggggccgatgctggcccctagaagcccctgaaggacactgtgtgtggggcatgagagaggatgtgagaaagacacattttttgtatggctggcttgcatctcctccagctgaggacctgtggatgctgcaggctcctgcttcataacaaatatctccttttttttttttttttttttttttgagacaaggtctcactctgttgcccaggctggagtacagtagtgcgatctcagctcatttgcaacctccacctcccggcttcaagcgattcccgtgaattcctggagagtttctcattcagatctgtctgccactggaggggaagtactgaaccacaccaaattctctggctgcatcccttctcacccctgccctgtctgtcccagtctcccatttttgcagctctccaaaggagttggccaccttactttgatatttctgccttcctagcagattcccaccacatccacacatgtatgtatttttccatctcaatgaaatggctctaacaaggaagtgccaattagtgaggcagagggcagacgtggagcttgcagcaatgcacctgcagagtttactgctcctgcctggaccgtctgcactgctgcgcactttggcctccctcccctgctctcaagccagcaattaacccgggacctgtggcgtttgctggagaaggaaggacacagctggagctgctgaactggggggacaggtgtgtggtctctatggcaagtgggaggagggtgcgatgctggaatctcacggtgatgtgccatgtgcactgctgggagccagtgaaggcaaagaccttggaaccggtctaatttccaagtcacctcaggctcctagtgtggtttgagcatggaatttactcgttatgagcctcagttccctcaactggaaaggagggacaacagaggtattttcaggagggtgaattttgatgccatctgtcaagttcctggtgtgtgggagatgcacctcgaatgggagttttggcttggggctttctctgattttgtcatgtttaattatcacagtccttgcccttcattgccagggtacagaggaggagagggaggctgggggatggaaagtgtgatcccgccacctggacagtgcaagacctcctggccccaggctgcctgacttgccagcttaggattctttcttgaggtagccaagcaaagtgagtgctggctcaggagagggatggagagaggctggaccccaaggctggcctgtctgtggtggagccgtctccgcatgctggatagatcagtcccagctgagttccctggtgcccaaatggccccactaatcctttgctgccagtggggctgggactgaggcccctcaggaaagatgagatgggatgagatgggccatcctccctgttctaggtccagcaggtgttggagctgtctcagctgagttctggtaaataaacattcatgaatgcatgttggacaaaggcttcctgcatggggatgctggtgtggtggggaagttccttacaaagctctggaatcggtagcttgtctccaaggggtgtttttccagtgatgtgatggtaaaatgtttaacagccagttttccaggaaaaataaagaaggtaaactgatttgtagcatttgccaatttccgtggtgtaaatattcccactatggctaccttcaagctactgcagaattgaggtgagatgtacatcgtcagcgctcatttgggaggaggtgtaggtcatctgcagcatgcctgaggcttctcccttgacctctggtgcccctcattcctcactgcttccccaagcctcactgcttcgttttcttggcctctcgccctctgctcacagaggcaagatatttctgccacgtcccccagagggtcttgccttggggcacagccagtgataatgtgaatctggaggctgctctcctagctggcctctggggctccccatagctggagatggaggagatagattgttccaggggttacagattttttaaaggtcacaggccctctttgagaatctaaaaattgaacatttaacaagggaagtgtaggagtgtatatttacagaaaattttgtacataattatagggaattcttgactcccaaaggcaatcaaaggacactgtcagggtctcagggggtttagtgggctgtaagtgcttggagtctcatgagagggcaggaaggctgagtaaggactctggacagaattttataattttcaaagcactcttctttccctcactgagtgttccccacatggccaatcctccagagctatgctattctaagcaacatcattccccaaatcaggaaactgaggcccagagaggaaagacaaagccttttgttaatatcactacagctgccatcctgtgaacatctgtttgtattaggtgagtatttttctggttgctgttctattattatcattcagcaagtgtttattgaacatttgctaagtgccaggcactgtcctaggcatttgagtatatgggtgaacaaaataaagaaacgtgtcctcttggggcttgcattctagcaaaagaaaacagacaatatgtaattttctcagtcagatgcagtgactcacacctgtgatcccaacactttgggaagccaaggtgagaggatcgcttgaagccaggagttcgagaccagcctgggcaacatagtgagaccttgttttcaaaaacaaaaaaaaaataaaaaaattagctgagtgtggtggtgtgcacctgtagtcccagctactcgtgaggctaatgtgggagagtcactttagcccatgaggacaaggctgcagcgagctctgggtgacagagtgagaccaattattattgtctcaaaagattataataattttctcaattaatcttgttggagaaatttcagatgcttcatgtagaaactgaagacctggccttaaaacggggccctgggctctagcttgacagctgctgattgcttgagagttgtgatgtctcggctttgaattttgccatgtgccagctgttttaatacacgtttctcatcttcccagctctgcaaagctggtgcattagtttcctgaggctgctataacaagtgaccacaaagtggcatctttaacaataggcatttattctctcacagttaccgaggccggaagttcaaaatcaggatcactgggcagaaagcaaggtgtcagctgggctgttcttcctccaggggctctaggggagaatctcttccagtgttggaggctgccagtattccttggcttgtggctgcatcactccagtcttcaaggacagcatcttcagatcaccctctgctccatcttcatgtcacctcctcctctgtgtgtctttgtaaaatatctctctgccactctcttataagggacagtggtgattgcatttaaggtcctcccagatgctccaggataatctgcccatctcaatatccttaactgagtcacatctgcaaagaatcatttttattttgccctataaggtagcactcacaagttccaggcattgagacgtgaatatcttttaggggtccattctcagcctaccacagccaggtatcacaattctccttttctagtggggttaagtcacctattcagtgtcccaccatgaggacatggcacacctggggttcaaaccctggtcttttcatgttctttccaccatacgacactgcactcccatactaggtgcacactctgcagatgagcaaactaaagctctgtgagctgacacgattgggccaaggtcatgggtgaccgcagcctttccatgtcttgcgtcctttaccaggtggccaaattagagtccgtctgatgcatcctcccccaggcctgtgcaccctgagctggcaccaggcctccagttgccaccagaaaaatgacaacagaaggggtggccgggaactcccgtctgtctctgcatttaccagcttttaactttcaaaccaagtcagcctcaaggctaattttctgcagcttccagtcgttcagctccatcaattgtgcctgacactgtgaaagcttttgctattgattctgggctatgttaactttctttctccctctccccacccccagccccagcctcagctctcctgcagtttttggtccaccaattaggtattgccggggacaatgtggggtggctgctgctgcctttcaattaccgtcacagtaaatacaacttactctccacccccggagtccctgctgcactcagaaagagagaacactgcctaaatgactcctctctccggcctgacactccacaactctagcggatcaataagtctatcaccccgtggggctcccttgagaccacccagccttgttaattggctctgggagatggctggttggcagaggagtgtgagtgtgtgagtgcggatgtgtgagtgtgtgtgtaaatgtggatgggggaggtggcttctccgctccccatccccctcctagggatgggagagccccttcaacatggattaggtggggaggatctctgactctggaaaacagcctttgaattgcagggatggcaatatgtgattcctccagatttaaatggtcacaaagcaaagagataaatggaagtgtttcaaggtcgtagtgggtaagcccttgattctgaagtcaggttgacttcagttctaatcctggctctttccctaatttgctgtatggtcttgggcaagccacttagcctttctaagctgctgtctatgaaacaagcatcatgtctccagtcccagaagactgttttgagggttaaatggaagaatggatgtcaaatggcacatcagtaagtgacagtgatgactgaggtccttggagttctagggtggtggggtgggtcgggcaggtcttgatgtcaggcagacaggagcacagatcctggacctgccacttacgaagccacatgatctcgagcaagtcattttctgtgtctcagtttcctcttctagaaaatgggggaataacaccattgtatgtggctgaatagtgtctcccccaaatccttgtgaacctggaacttcaaatgtgaccttatttggaaatagtgtctttgcagatgttatcaagttaatactgaatcatgctggattggggggggggtcataaatccaatgacaggtgtctttatgagaacgccgactgaagacgcaggcacggagacacagggaaggctgggtgacgacagaggtagggattggagtgatgcagctacaagccaagcaatgacaaggctgccggccaccaccagaagctggaagaggccaggaaggattctcccctggagcctccagagctgcccctttccatatgaagccccttatcctgctgtaaccccaatttctccaggtctcagaaacccaaggaatgggcctccatgcccatgtgagctggcctgtagcccgctcagataaccactgggtgtcttctttccagaggccctaggcaatgaagtagaccttaggtggcaggcgtgggaaaggctggtgggaggtgagaggcagcaggaggtagcactgatgctggcctcagcccttgaggatcttgaggtcccactgagcagtgtggtctttatcatgcatgtaggaggaggcccagggagtgatgtgatcccaaggcaacctgcaatttggggttgatcaacctggtggccgtgttgcagacaaattggatgggatgaggccagaggcagggaggctggggggacattccttgtaagggatgatgaggcctgagttagggccacaacagggaggatggaaaagagcaagagggggagtcactccagatcccttcttccttcttcgagctctgtctgaagaccctgctttgtggaactgtaagagcaatggcctccatgtactgagagccccccatggaccaggcgctgtgctgaaagcctgggctgggtgatcccgtttcttctccatcagatacaatctatctgttccattttacaaggaggaaattgaggcacggggaggtgaagcaatgtgccaaagatcacacagttggggaagtagcagggggactcacacgcaggcctggatcttgaccaccattcatgctgtcatgtggaggaggctggctctcatcatcactgtcattactgttacttgcttcctgcatctgggtgtgaagacttagtatagagcctggcacatggtcggtgctggaaaaatattgttcaatgaacaaataaagagagggaagaggagcaactccagatgttgaaaggctgtgcctctgcatggcacagaatacagggcctggtgtggaccccactcccactggctctggttccagtgctcccccaagctctgtggcagggagtggagaagggtcaggtaccttaaccaacattgcagcatggagtgtgaccaggtagggaagtgttgggtggcctcaacccagctgtcacacatgggatgccatcttcactacttgtccaccctttcttttggaggaggcctctctcaccagcttggggcctcctgccaggcccccagggccgaggcatctcctgcagggatgctccacagtgtgaccattttctccgctagtgggtggggtcagctgagccagcatgtctgcccaccccttggcagcccagggatgggaattggcaggtgccccacaggggaactgacaggctgactacccacagtctcttgtagttttcctgcctcccatcccagagtcctggtctgggctcctcaagcctttccttccttccttccttccttccttccttccttccttccttccttccttccctccctccctcccttcctcccttcttccttccttccttccccttccttcctcccttccttccttcctcccttcccttcccttccccttccttccttccttccttccttccttccttccttccttccttccttccttctttctttctttctttctttctttctttctttctttctttctttctttctttctttctttctttctttccttccttccttccttccttccttcttttgagtttcaatcttgtcacccaggctggtatgcagtggtgtgatctcagctcactgcaatctctgcctcctgggttcaagcgattctcctgcctcagcctcccaagtagctgagattacagacatgtgccactacgcccagctaatttttgtatttttagtagaaacgaggttttgccatgttggccaggctggtctcgaactcctcacctcagctgatctgcctgccttggcctctgaaagtgctgggattgcaggcatgagccactgcgcccagcctcctcaagacttttcagtggaggccaggccaagatgctgccaagctcttttgctcaccccctgcatctttccccttcctgctgcggcctgaaatgccttcttcctgtgcagcttgtcttaggtcagggttctggatacagggctttggggcacgtgacttactgaaggagggctcttaccgtaagggagcaaagaaagcagcacaggcagggcaagatgccagcaagcttgtggtttcaggtaaaacccagcctcagcctgatcccacagggaatgctggggtgtaaatgacaccacacagtggtcctaccttgaggcaaagggacctggattgtgaaaaggatgggaaaggagcccctctcatcgagagtctgtgcaccagccagtgtgctaggctcataaacagatttctacttcatgccacctttacagcaacatggagaagttggtatcattaaccccatttttcaggtgggaaaattgaggctccaggaggtgaaggaactttcccagccaatgcagcagattagcagcagagtcagcgttgaatctgggtctgaatgacctcaagacaccactctgagtgctgtgagggaggcagatgcatgtcccagtctcctggcattgctgctgccttgactgggaattgtgacattcaccttagcataatgctccatgcaccttcacatacattattttatgttggaagcagttgaatgtagtggttaagagcatggatttgggagtcagacagacctggattcaaattcctgcctcgctactaagaaaccgtgtgaccttgggtggctcatattacctctttgagaatgagctttctcatcggcaatataaggatcctggcagtatatccttcacagcattgttacatggattaaaagggttaatatccataattaacttagagcagtgtacatggcacacacctggtacatgtgggctaggttggtgatgagaatggtgatgaggaaggtgacaaggaaggtgaaggagaaagagaaggaggggaaatgcttgtttagcaaggggtctggcacatcataggttggttgttgttgttgctgctattattatttaagttttacaatagcattatggcaagggagcatggcacagtgcctagcacatagtagctgctcattaaatatttaatgcctaagaaatgagcaaggcagaaaattgcaacctcattttaaagaagaacaaagtgaaatgctgaaagcctggggacctgctcacagctgcagggcactgagtatggaccccattcccactaattctgggtccagtgcttccctgagctctctggagcagagaagggagaggggtaaaaaggacatacggagaatttcaaaaaccagagaccctggaaacaggaagagggaaatcaagtcaagaggagggtgagtacagctgggcccctcagcagggaggtctcccgctgcctcctcagctgagccaggtgtgaaagctgtggccactctgggaacagggtgcagatgaacgtgctaatgcgctcccagctccctggatgggtgaaacttccaaggtcgccagcccagcaccttctcagctgctgggtgcctgtctctgcatcctcctgggccctggctcgggtgtcatcgtggctgtgcgggattcttcaggggtgacttgatgacagtagcaccacatgctcagagcaaagtcatggggcctcccaggggctgttttaaaaaaagaacaccgagcaaaaaataattccgggaatattaggccaatatatcaaagtgcagcaggagcccggctggagtgggggccaatgtagactgctttcccccaaggcaaaggatctggggttgtgaagcagggcttggcaccagtgaggagcagcccccaccagggctgctgttcccagcctgggcagtgaccagtggggttctgggtccagagaccacggctggccctggggactgataccaggaaaggcagcggtggatgggggagccagcacgcactctgtgcccactgggctttcagtggatggggaaagatgctggaaaactctgctatcactcgctgcccgctatagggccttctgcttgccctcaagatgcagaaggtggagctcacagacctggtcagggcacagggagacctcacctagaggcagagcccaggaggtggagggaagaaatgaccccatctgccttctctccaccgccccttgtgagtttccctctctcaaagggtcctcctctgccccatcatctcctccattacaagcttggaggtgtggagcaccccctccaaagagggtgatcagctgtccctgtttacgtgggactgaggggcttcccaggatgcttttgagctgaaggctctggcttggccggtgcatctcctctcattccgtgtcactagaccctgcctcctgccgccaattgcaacccctaccgctccagatcccaattgtcggtcccgcagtctgttttcactttagactgtgtgcttctgcaggatcttcttcgtggcaccatctccagtgcccagcatagggcctggaaccaaaaggacccacttgaggtctgatgagttattgcctgtctgactgactgaatgaatgagggagggagtgaaggcccctctagatccatagtttcttagggcaggaagttccaggtactgtatttattagtgttttctcccttcatttctgatatcttcttgggatggagtcctgggggggttggtgagcaggtgcctaataaggtcagagtggcccttaggggccctcggtgcagcatgtgatgggcctggggctaagaactctggcaagagcctctgttcagcccctgaagagcagcccattcctagatcccagggggtcagagctggatgaccacttcataggtcaccccacttaattgttcattctatagacagagaaactgaggcctggagagggactgtgctgccccaactccacagcaaggggatgccagaggcaggcccagtttccaggcaccaaatctcatgctctctccctactcctggggagaatcagatgctcactttcctgttcggagcctgtcctgctgttgatctcagtcttctctggctgagaacccagctacatggctggggctggttgctgtcccatcctgagtctctctgcctctgtcccccactgctatgatccctttcccctctcgcagaagacctcagcagcttgcagagtcccctagaattaggtcctctttttagggagcctgaaggcagctcagattggcccaagtcacttccagatccagcacctctggctggctgtaccttcctccttcaataaacattcattgtcacctactatgtgctggaccctgcaggtacagagagtgactcccaggctggtgagaaaggtggacagatagatgaatcctggcacatcggggtgatgaggagggtctgagcaggggacaggagcacctgagagccagcaagttgctcttgctgcaagtagggagccacccagccctacgcctgctgcttgctgacttccctgcagagcccagatggggcctcctctgctgagtgactgtcacccatttagtctatgtctccttaccgaatccagcactgaaatgacctccttgcaggtaatggtagtaacgcgggcatttactgagcacttactgtgagcaggtagtaaacgctctgcacgggtcatctcaggtaatgttcatgactgtgtaagacggtgtgattaatgtcgtcagtttacagtcgagaaggctgaggcttgtagagtaaatattgtccccacccaaggttatttgcctactcagatggctaagctgggataatagccaggtgtgaggtctaaagtcctgccaagctgcttcccatgggttttgcctgtctgccaagcatccaaagaaatccacctcctcagggccaccccaaaccaaaaagatgctcaggaagctccgagtcctctctgtggctcactccccttccactcataagctctgagtccccttggtgcctggcatgtcacagggagactgaacaaacaagggcgccatctctgccctcaggagggctcaggctagcgctattctgagatgagcgtgggcttcccagctgttcttttccacttagagacaacactcaatcgttgcaggtgatattacttgaacactgttaattgacatcattagcaactttgtttaacgtatagtcagtggttgacagcatcatccatttacctgaagcagcagcagtgaaagggtttttgaaatcacaatataatcacttactgaatcagggaggatcgcataggattgcattcagatgcaagagacgaaatcccaacaaactggagtttatttttgccctcaacgtggagtccagaattaagcagtccaggtgcagctgaaggaagtcaagagtacagacccgttctgtctttttgctctgccatcctggccatgtggcttttgtcttcatggtggcaagatggctgctgcactgccagacattgggtctgtgtcctagtcagaaagaagcaagagtacggggtggcacctgtctcagggaaagttgaacattctcatcaatccccagcagacttctctttacacctcaaggaccataaccatgtctcatgttcactctggtctgcaaaggaggcgggaaaattaactcccctgaataaaaggagcaaaccaaagataagaaggaagaaaagaatgaatattcaatggacaactggaagtatcctccctcacttatgcagcaggattaaaaactgcaactattagttgaatatctggcatcagaatccccttaggggaaactatctttgttttggaaaatactttgacaatcttctgggagtgaaagataagactcagagagcatgaagtgtctggaaatggcagatagctaaactgctagccgatgatatgcatgggaaattggaggtgtggaagaacagaaaagagaagagaaacaaatagagggagagaggaggcaaactggcaggagaccaaagctaaggaagaaagttggtgggggaggggaccaaatatatagctatatatttatatatctttttttttttttttttttttttgaggcagagtctcgctctgtcgcccaggctagagtgcagtggtgcgatcttggctcactgccagctccacctcctgggttcacgccattctcctgcctcggcctcacgagtagctgggactacaggtgcccgccaccacgcctggctaattttttgtatttttagtagacacagggtttcactgtgttagccaggatggtctcgatctcctgacctcgtgatccgcccgcctcggcctcccaaagtgctgggattacagacatgagccaccgtgcccagccaaatattttttaagaacagagatttttagcatccagctgtaagtcgtctgagattctgtgataggaaaactcctccatcgcctccagattctcagtagtctgttacactcaccaaaaccttgtaagttatttgggaaatatcaggggtaagagatgggtttagggtctgggaaaggaacaatgtgggaggaaaggaggggcggggggacagatggaaggattaaaagaagttggactccaacgtgaccaggaattcatagaaatcttggagaggacacagacctcctaggaatgtggaattgggggtgtattagttaactactgctgcataacacaccatctgaaaatccagtggtttaaagcaacaatagtcatttatttcaaagctctgccaggctgggtgcgtttgcatctaccttggaggtgacactgccattcttagcagagacagggataccagctgagactcagcatggagtgactttctggttgctctcaagacaagcatttgttattctttttttctttttttttttcagaaggattatgaagtcacactgaattcccagaacatcagacccacccatctccaaatatgacaacaaaaacacattccagagccaaatataaacacatttttaattatctgcgccactgctccctcccattagtgtgggaaatcaagagttgagtatacagtatttacaataataatcccaggcacgaaacttttactttcaaaacagctcctcgtctattattgcatttgatttgcatgagtttgccttgagtgggcttgggctaggttgggtggttgcttcattttttggatggataaatggaaactcagggcagaagacttggtggagacaggctgagaaagcaggacccctgggtgtcttctctattaagggagaagcagtttctcctgggctgggactggagatcatggggtgggtgggaaaagcactagatctgcagtcaggcaaacctggttgaatcccaacttggccacttcctagctgggtaactgagctcttggtctctttaagccacagtttccccaacagcaagatgggtaccacttatcttgcctggctgttcagcctgttgaggtgtgccatgtgagagtacctagcatgtgcctggggcatgttgcgctcagttcatcgtagcactgttcttgtcttagcttcccctagcaagacggctgtcaaggtgatatccatactggcttcactctctgcatgatgccaggagtggcaagaaggaaaggagcaagggaaggaggaaacaaagaggcaggggcctggaactttctgaagggagacattagcaagaaggcttcgtggctcaggagtgatcaagccagagcttttggataattcctggctgtcattgcccagtttcttgagggactctgctgggaataatcaagtcctgagaagggtcctctcctggagttcgaggtgaggggattagctgggatctggatcctcagaacaagagacggagaagaggccaggacccgagctggctccgtgcatgctgagaggggcccaattcccctcacctggtctggggactgtgagctctcattgctccccagtaacctcagccccacttgggttttcattttggaaaagtcaactttctctaaatagcttcctggagaagattgaggggagggcagggctggactagccatgtgactttgggcaaataacttagcttctctgagcttgggtttcatcatctgtgagcctcaccttaggtctttttggctgctgtaacacattactgcaaacttagtgacttaaaacaacgcacatttattcttccaaagttctggaggccggaagtccaaatcggctaccaatgggctgaaatcaaggtgtgtgcagggctgtgctccttccagaagctcgaggggagaatttgcttcttgcatcttctggcttcaggtggctgtggcacttcttgtcttgtggctttgtcactccagtctgcaaggccagtgtcttccaatctctctctgccctgtcttcacatcaccttctcctctgtgtctcaagtctccctctgcctccctcttataaggatacatttgatggcttttaaggtccaccgaataatccaggataatctgcccatctcaagatccttcacctaatcacgtctgctaagacccttttccaagtacagtaatatttacaggttccagggattaggacctgatatctttagcagccatcatttggtctgtgacaagcctctaatctattcattcaacaacattcaacaaatattatcaagggctaatcaactgcttgttatggaaagggtgtaagtgcagacagtgaggccagcctgaggggctcccatcctcccagctgggatgagggcctcaaaggggaggtgtggggcactaggaaagcttaagcaggatttgactagtgacgggggtcagagaaggctccccagaggaggtgatggctaggaaaagctgatggatgagcagaatggcatgaaggagcgtcctaggcacagtgaaggaggaggtggccagtgaggctggagaagagccaatagggctgtgatttgcagtgcaatcggagaggtggacaggagccaatttgttctccactctgagggctgtggtctccatcttaagaataaggggaagccagtgaggggttttaatcaggattgctgaagtcagatgtgttttatgtcttgacaagattattctggcttcagagtgaagggtgtgttagaggaaccagagttgatgtgaggaaccagggtgagaagttcttggaggggctcacacaagaggaggtggccagtcaagggagggaggtgcagatgcagtaaagagaagtgagggcttcaggaactgtttaggaggtaaggctggcagcacttgatagtaggtgttttatgggcatgacagagataaggatgattcatcaggtctggcctgagccaccggatggtggcgacattcgctaagccccaaagcacaggaaagagactggatgagtggatggggagattatgaggggtcaacttagacacagtgagttcggtgtgactttgagacatctaagtaaccagtaatttctggaagaacctgggttccaagtagatgttggagctggaaatttgaacctcatagatgtgggattaggtaagttaagacacatagagtacttggcacaatgcctggaacctaggaggcttcaaaagagggtagcccaccccttcttatcttaagagtaagaacttctaggagcccaggggaagggacatcgctggtcgagaaggtggcttgtctgggccttggggaccattgcccatctgtgttcaaagataagcaactgtgccatcaggggtgggtgaatggcaggcccccccactgatggtggagccctaggaatctgtttaatgaatacacttgtccttgccttggccaccaggaagctcaaactcagcaagctacccaaccaaagcaaactgtacaggatattttgaagctgaataaaactccttgcattattttatttcctacctttgcttttctttgtcctgactctacatctatttattgtaattgttacatgtattttgaaacttgcacaagccttttttttagtggaatgagacagggtatatataaacaaatcaacaaaatcaataggacaaacatttgtggattgatttaaaaatagaatccttctataatgcactggcattgaaaaagagtttgctgtttggtgacttttttggtccatcttcctgaaagggaaacagttgttccttaatttatctgctgggtggttctggattttggttcagtgcttagcaaattagccaggtgtggtttgaggagagatattaaaagatcccataaagggcatacataagttgtgaaaatgcattatggataccagaccaggcaggggtgagagcagacagtgaggagggagtgtggaaaactgcctggtgggttggatgatctccatgtatctaattaactggggaaggttttgcagaaaccgaggctgggttcaggctggggctggaatcagggttaggtctttggggattgagtctatgggtctgctgtcaatcagccaggggagtggagagaactgaccggctttcccgcatggtgcatggttggactgctgtcagcccgctccatagctgtgtcagtgaacaaaagctgactgctggtctctccagcctcaccactgttggctgccctgggtggaccttgctgccaggtgcccaggcctttgcaggagctgctgttcagcagggaacactctccagcatggtgtggaggttgagagcccagaggccagaaccagatgctggcttcactgtctactatttcaatgatattggacaagctctttaacctttctgtgcctcagtttcctatctctaaaatggagatgataggcatacctactatattagtccattttcacactgctgataaagacatacccaagactgggtaatttataaagaaaaagaagtttaacggacttacagttccgtgtggctggggaggactcacaatcatggtggaaggagaaagacatgtcttacatggcagcaggtaagagagagaatgagagacaagtgaaaggggtttccccttacaaaactgtcagatcttgtgagagttagtcactgccgtgagaacagtatgggggaactgcccccaaggttcaattgtctcccactgggtttctcccccagcacgttggaattatgggagctacaattcaagatgagatttgggtggggacgcagccaaatcctatcacctaccttactgggttgtttctgaatcctggtgaattaacttcagtggagtgtttagacaggcgcctgccacagtaagtgtttgctgttattattatcacctctcccaaatgcttcacctggctgggctctgttcatgagccagtgtgcggtatcttgcagtatctcactgtagactcccctaaccatcatttctccaaggctgggtgagatgtcttcctctaagcttctgcaggcagccttgcaaacattggtcttttgtgttctttcctagatcttgagcccttcaggggctgaggttgaatctggtacaacatctctgcctgtatctggtgcccagcctagaagctggtgtagatgaggggccaggaaagggatggaggatcctgcagcatggcctgggaattcaggacttcaacgacaatgaagaagaaatactgccaagagctgaggtaccactggcatcacttgggcctgtgccattctgcccacatccccttggaagtacagaatggagtacagaatccccctcctatctggactaggcagggagttgaggtgtgatgaggccttgccagccgctcttcatggtgggaatacattcaaatccagcctcacctggatatcccccaggtaagcaaatggcatctgccaaacagagtccttgagcagggaagatgccttgtaacccatctcagggaggcagtgtaacgtaatggtgagaacacaggctccagagttggggcctggggttcaaatgtattacctccctgtgcctctgtttcttcaactgataatggagttaatcatcatgcctatctcctagattttttatttttgagacagggtcttggtctgtcactcacgatggcatgcagtggcatgatcatgctcactgcatcctcaacgtcccagacccaagtgatcctcctgcctcaacctcccaagtagctgggactacaggtccacaccaccatgcccagcttattttattttattttttataaagaggaggtctcacaatgttgcccacattggtctgaaattcctggcctcaagcaatcctcccgcccaggcctcccaaagtcctgggattacaggcatgagccaccacacctggcctcattccatgtttttcatggtggctttccaaaggaactgaagctctgcatgatggtgactcatccctttgcccccaccacccccccccccccccccgcccagtggtgagatagatcagacccgcttgctaaggtgctgtgtgggaaagctgttgtaagtgcgtagatgcattggccacccccttctctgtgttgttttagtgccatctccactcctgtcccattacgctgtgattttgtgttttgttgtctatctcttttgctgggttgtgagtcctgagacttggcagtgtgttaattgagggtgtggccagtgtgccatgtgccaccccttcttaggtcattatcatcagctctcatccattgaatgactatgtgtcccgtgcctgatgtgtgttaagtcttcatgaccactctgcaatgacaaaagtgaggcacagagaggtgaagcggcttgcctgaggtcacacagcttgaaaatggtgagatttgaagataatccggtctgattctaaagctcatgccctttctactatgccatcctggtccaatgcctgctgcagtgtttgatacgtagcaggcacatgggaatgaattgatgtgtgttgaatgcacagatttagtgtgtcagacactgagaacagaaagaagactaggacacagatcagcggttttacagtccaataggcttgaatgtgttggccatccagaagcttccagaatcctgtgggacacttatttcaggaggatgctgtggtacaccgtcttggttgcttgccccaaagctatcaccatcttttctctttgatagcagaacttccctgcctgtctagttctggctaatgggtgtaaggggaaatcagctgggagagggagcttcctccttcataagagagaaacaagtcaggggaaaatctgcatcttgtaagcccctatgtgctggctttaacatggccatagggagaatactatccctgaactgtgactgcaatcttgtgatcctgagataaaggtcagagaattgcaaaggccgcctgtgccctgataatcagtgaaccactgacctagtcctaaaacatcttacctccagacttctaagaaaatacatgaccatgaatgagaaaaatgcaccttggtgggtttcggccactgttacctggggattatgttagttgcagctgaaagcattcccaacagatacagaagctgattgcaagtgggaagagcaaggaacctggcatcagaagacctggctgggacactcatctctgtcgtgaaccagcaggaccctttctggactagtcactaactgatgtgcagctcagtttcctgatatgtgagatagggcttcctctgtggctgaagtgagatgtagggggcatttctaaccccaggatccccttgctcaacacaagagaagtctctttgattattctctgataagcacttagtgtggacagagaatcctctccaacatgtaaggtgaatcatgtagaggggttcttaaaaagtaaaaggccccatgagagccacagctggtgccttcctcctggggcagagctgggtgggggagtctagtcatgaaggccacaggtagcatggctgcactggagctcggaggagccaagggcttgggcggaaagtcaagttaggagacatgtaagaaacagtggctaatgctaaatgacgagttaatgggtgcagcacaccagcatggcacatgtatacatatgtaactaacctgcacattgtgcacatgtaccctaaaacttaaagtataataataataaaataaaaaaaacagattgaaaaaaagaaacagtggaaaagtaaggatttggaggacaggcaggaaggtcaaaagcagaaaagcaaaaagttggaaatgggtaaaggcagtggttctcaaagtgtggtccccaaggtgctgtatcagcatcaactgggaacatgctaggaatgcaggtccttgggacacccagacctgctggaccagaaaccctgaggctggggccctgcagtcagcattttaacaggctttccgggtgattctgatgcacactaaagtttgggaacaactgggattgttcaaacttggtctgggaacaataggtaggtacccaagagtccccttggcaaagtgcctgacctctgctggggaaatgcaaggaagagatttcagggatctatatcaagacatttgtggaaagtattaataagttcatttgtagaatgagggcacagaaagcttcacattcctgctttctttttgctttgcagggagctgagccttaggttttgtgacagaatttgaggcagtgaatgctgacccagctttgtaagaaagaataggagaaaggtatgtgtgtgtgtgtgtgtgtgtgtgtgtgtgtgtgtgtgtgtgtgtgtaggtagctggagggacctgctgacatcctgccacagcttgaggcagcccttaattgggacccatttctctttctcccaagctgctggctcagctcatggagaagcaacacgctgaccatagctagaagtctgggcaacgttgtggcctgctcctgttgttgtgtgggctctgcatggggcatcgatgccaggtgagcagcttgcccactgaaggatgaagctgaaggagcatcttagctgagggccaggtccctgaccctgttctggaactccagaatgccagtgtctccgctatggcatgagaggctcatttagcagtgatgtgcttgaacgagcaagctcttaaatactggctgctctggatgcttggtttcccaggtgggtctgtcccattggagggatgaggaagcagttccatttaggctgcaaatggctccaattagcttccttctgtctatcttcatttatagtgtatgagatgtgggaggcagtggtacttctctgtttgctgggcctctgcttcttcccctccaccctccatccttatctttccatgaagaatatctgtgttcacttcactatagctcatcaaatacctttctcaccagcctctccatcattatggcgactgcatcagcatggaccccagtgactattgtgatgcctcctgcatggtctccctgtgtcttgtccccagggctgctgacttatccaatgggcacagtaggcccagtacctatggcccatgatacttttaggggaacccatgaagatattttaaagtcagaagaaaaaccaaacttttaggtcaataaaaatgttttaacatatgatattaatattttcacctttacaacagatttaaatcacagatttaaaatgatttttctatctctattaatacatgtaacatagcatattttgtatatatgcataaaaattttcaataaatagtgtagtactgtaaaaaatagatttacctttataccaacacatggtaaaatataatttctaatatttttatggaggaaggaacccatgaatacacaagtgccaaaaggcccatgaagtcataacgtggccctgcccgcttcttccaattcatcttttactagatgctagtctttaaaaatacaagcctaaccatgacctttgctgcttgtagtatgatgagaagaatggcctgaactgaccacagcagcagactctgggctggctggacagtaaacaagggaagactgagttctctccatcccactctttccagtgaaggagctgcactgaagctcagctccccataggactgaatactttctcttcttggtaaagaggctacaatatctcctgagcactgaagtctccaagtactggacagctggtattcctaggaaactcctgcaggatgctagtcccttgtatccagtcactctgtgccaagaggtccgttgtatcccccatggataaagttgctctcaaaatggcactttctaaagtggcaagagggaggatctctccactggaatggcagacccacctttacctattcaaagtggtatggaattgttctaaactctggtgcacagcaggcagaggccagaagggctctaccttgcaggatcctcctagccctgagtccccagtgctcacaggatgaagtttgagatccttagcctgtctccccagtgcctccatgatctggccttggctatttctctggctccctgcacccctccttgcccatttacttataattcctgaatatgcatgctgttttaggtctctgaggttttgcacatgcttgtcttctcgtctagaatgtctttcttccatctttctccttgatcctgtacagaggagaacttctattcatccttcaaaatgccattaaagtatcacctcctctctgaaggcctcctggattcttatcacctttattccaagatatatatgagtacgagttaagaaaaaatggattcgttttagctcttcattctccttccccacttccagggaggagaggccattattatttatttcttattagaaagacaagatggaagaaaggaaggaaggaaagaaagaagggagggagggagagaagaagaaaggaaggaagggagggagggagggagggagggaagagactcacctttacctactattctgaattcatgaatgttagcatgtgtcccacatccttttacaaaataagaaaatttaaaaattactaatgaagctgaagttctttagtcccctttctagtctcaattctccttcttcatccctcagagacaattataatcatgaatttgttttcatcctttctgttcatgttttcacatttttgccatatgtatttgtacttacagacaatatgtagtggtttttgtgtgattgaacatgttacataaatgattcactgtgtttagccatctgcaatttgccttattctcccaatactctgtgagtttgatctatgctgatactcacagatctagttcattcattttaatagctgtataatattccattatgtgaatataacacattaaaaactattttcatgtggaagaacatttaggtcactgccttttcttttcagttatagtcactgctacacatggaattttctaggtctatatatagacctaacagtagacatgctagatcatagaatatttgcatgcctaacttcgatagttactacaaaactattttccagggtgattttcccaatgacagccccaacagtgtgtgtgatcctgactggacaaggatggtgggaatgattttttttttttttttttggccaatgtgatctgtatgaaaaataattcaattaaaaaatgttatttcccagcttagtattgaagtttcatttttaacatatatttgtcaatcatttgggttttcttttatacatcttttgtgttttcttttactcagcttaaaaaattgggttgtttttctttctttctttctttttctttctttctttcagagtctcactctgtcacccaggctggagtccattggcacgatcttgcctcactgcaacctccaactcccaggttcaagtgattctcctgcctcagcctcctaagtagctgggattacaggctcctgacaccatgcctggctaattttggtatttttagtagagacgagatttcaccatgttggccaggctagtctcgaactcctgacctcaggtgttctacgtgcctcagcttcccaaactgctgggattacaggcgtgagccattgcacccggccatttgtcgttttctttttgagttataggagtactgtactgtgtattctgagtactatttctatacttttgcaactatctttttcaaatgtattttgtacttttactttgttttatgatggttttagcatacagaaattttagtatttgatgtagtcaaatggacagggttttccattataattagtatcttgctatttgtttaggaaatctttgcctaactccatatcataaagatactcaactacatttccttataatagttttaaagttttgtttgatctatctggaatttatctttgtgtgtggtatgaggtagggatccagttgaaaatgtccctcatagagattccataaagaactaaaagtagaactactgtttgatccagcaatccactactaggtgtctactcaaaggaaaagaagtcattatatgaaaaaagacaaatgcacacccatgtttataggagcacaatttgcaattgcaaagatttggaaccaaccaagtgcacgttagccaatgagtggataaagaaaatgtggtgtatgtatgccatggaatactactcagccataaaaaggaatgaaacaatgtcttttacaacaacttggatgaagctggaggccattattctaagtgacgtaactcaggagtggaaaaccaaacatcatatgttctcacttataagtgggagctaagctatgaggatgcaaaggcataagagtgatataatgagctttggagcttcgagggggaaggatgggagcgaggtgagggataacagactacatattgggtacactgctttggtgatgggggcatcaaaacctcagaaattgccactaaagaacttatccatgtaaccaaaaccccagctgtacccaaaaaagattgaaataaaaaaatgtccttcatagaggtagctaattgtccgacactatttattgaataatcattcttttcttgatgatacataaagccacctccaacatacaccaagtcctcataaatacacagagttctctagtctgttccgctgataaatttgtctatcctgcatacctctttcgttattttaatttcacatggctttatagttcatctttatgtctagctgggaaagttctttctccttattcttttgtcttgactcttctttgttctcaactacttcagattaatgttagaatcagtttgtcaagctctatgaaaagctccattgggatttggattggaattgcaatgaatttataggttaatttggaggagaactgacatctgtataatattgagtcttcccatgcatgaatgtgttatatttctccatttttttcaggtcttctacgtccttcagtaacttttcataattttctccataaaggtctctcacatctttcattggatttatttccaagtaacttacagtttttcttgcttttatgattgggaactttctctcagttacatattgtaattgattattgtgggcatataggaacacgattgagctcgtatccagaaatgaagctgactatcttatctttctagttgtaattctctatagaatatctgggattttccatacaaacaatcttatgataaaccaacaatgatttcttttttaaaaaattcattacatgacattttcttgctttatgttgctaactggggtctctagtacaatgctgcataaaaaggtgtagcagcaaaccaccatggcacatgtatgcctatgtaacaaacctgcatgttctgcacatgtattccagaacttaaagtaaaataaaatttaaaaaaaagaataaaaaaaaggtgtagcaggaacacttattttatttctgactttaattataatatgtttacagttgtaccactgcatataatgtttattttaggtctttggcaaatacactatgagttaaggaagtttcctctattttagtttacttttttttttaaaaaaataacagcttattgagataaaactcacataccacaaaatccactatcttaaagtgtataattcagtggattttagtatgttcacagagttgtgcaaccatcaccactatctaatcttaggacattttttatcaccctaaaaagagacccccaacattccccctctccaacccctggtaaccactaatctactttctctctctatggacttacttattctggatatttcatataaatgaaattatacaatatatgtggtctcttgtgactggcttctttcacttacgatgtgctgaagtttcatttatattgtagtgtgtatcagtatttcattcctttttatggacaaataatattccatcatatggatagatcacattgtgcttatccatgttgagggacatttggagatgttcccacttaactactgtaagtattgtagctgtgagcatttgtgtataagtttttgtgtgaacagatcttttcagttctcttaggtatacacctcgagtggaaatctgagttatatggccactccatgttaactttttaagaactgctaaactcttttccaaagtgacggcaccatttcacattcccaccaccagtgtataagctttctaacttctccacgttcgtgccaatccttgttattgtcttttaaaaaattatatccagcctgttgggggtgtgacatggtattttttgattttgatttgcatttcccttatgactatgatgttgagcatcttttcatgtgcttattggccacttgtatatctcctttagagaaacatctatgcaaatcttttttgattaaaaagtctggtcatttgtctttttactgttgagtagtaagagttctttatatgtctgtacataagttccttatcagctgtatgatttgaaaatatagtctcctattctgcagattgtctttacatttttttgatgctgtcctttgatgcacaaaagttttaatttttatgaagtcgaatttatgtattttttttctatgctttagatgtgatatgcatataagtaaaccattgcctaatccaaggtcataaaagttttacacttatttttttctaagtgtttcatagttttagattttacacttaggcctttgaccacttttgagttaattttttatatggtggaatccaaattcattttttttacatgtgaatattaagcgccatatgttgaaaagactaatattctccattgaattatcttggcatccttttcaaaactcaattgactatagatgtttatttctgaactctgaattctgttccattgattgatgtgtctgtttttataagtctgtcttgattactgtagctttgtagtaagcattgaaattgggaaagttgagtccctcaactttgttcttatttattaaggttgttttggctatttgggatctctggtattttcatatggattgtaggaccagcttgtcaatttctgcaaaaaaggcagctgggattggaataggaattgttttgattctgtagatcagtttggaaagtattgccaatttaacaatattaagtatttcagtccatgaacatgagatgttttgccattgatttaggtctttaattcatttcaacaatggttcatagctttcaatgtacaagtcttgcagttcttttgtttaatttatttctaagcattttattctttctggtgttattgcaagtggaattgtttttgtaatttcgtttgtgtctttgaatctaaaatgagtctcttgcagacagcgtagagttgaatcatttttagaaagtcatttgggcaatatctgccttttgattggagtgtttaacctgtctgtgcttaatgtaactaacgataagataggatttacatctcccgtcttgctatttgttttatatatgtcttacgtctttttgtttctctatttctccattaatgccttcttttgtattaagcaaatgttttctagcacaccgttttcattcctttcactttatttttagttattttctcattagttgctctggatgttacagttaccaccttaaattaaaacaatctagttcaggttaataccaacttaacttagacaatacagtcatgcactgcataacattttggtcaatgatggacctcatacatgatgtggtctcataagattataatagggctgaaaaatttctattgcctagtgatgtcatagtcattgtaagatcatatcataatgcattacttacgtgtttgtggtgatgcagttatatgactgtgctgccagtcatatacaagtatatcacatacaattacgtgtagcatgtaatgcttgataatgataataaatgactatattactagtttatatattactataccatatattttatggttattttagagtgtactccttctatttactaaaaaaaaagtcaactgtaaaacagccccaggcagatcattcaggagatattccagaagaagacattgttatcataagagatgacagtttcgtgtatgttactgaagaccttccagtgagacaagatgtagaggtggaagacagtgatactgatgatcctgaccccttgtaggcttaggctaagaatgtatttgtctttatttttaacaaaaaaaagtgtaaaaagtaaaaaaaaaaaaataaaataaaaatgtaaataacagaaataagtttatagaataaggatataaaaatatttttatgcatctgtacaatgtgtttgcatttggtttacaaaagagtcaaaaagctaaaaacatttaaaatttataaaataaaaaagttacagtgagctaagtttagtttattattgaagaaagaaatttaaaaaataaatttagtgtagctgaaatgtatagtttataaagtctacagtagtatatggttatgttcttggccttcacattcattcacaactcattcattaactcacccagagaaactttcagtcttgcaaactcccattcatgataagtgccttctacaggtgtacctttaaaaaaaatctgttggattatatttttactgaatcttttctatatttggatacacaaatacttaccattgtgttacaactgtctacagtattcaatgtagtaacatgctatacaggcttgtagcctaggagtaataggctacatcgtacagcctaggttgtagcaggctacactctgtaggtttgtgtaagtacactctatgatgtttgcacaatgatgaaatcacctaaagacgtatttctcaaaaagatccccattgttaagcgatgcataactgaatacaaatcattgccccaatatagttctatgtaggttgatgcaaaactaatggagttttttctcattaaaggtaatggcaaaaatggtaattacttttgcaccaaccaatactacctcacttctcttttgtgctattgttctcatatgaattacatccttatatattataatatctttaacatagtttttaaaaatattgctacatatagttaacttttaaatcagatagaagcagaaatttataagaaatacatttatagtatcttgcatatttacttatgcagttacttttacagttatccttgtttctttctgtggatttaaattacctgtctagcatcctctcatttcaacctgaaggacttcatttaatatttttttggtcttctagcagcaaattctgctttaatttatctcaaaatggcttaatttcttcttcatttttaaaggataattttgctggatatagaattattggttgtcaggttttttggccattattttcaatatgccatcccactgccttctggcatccacggtttttgatgagaaatcagctgttaatcttattgataatcccttgtatgtgatgagttacttcttctctcttgctactttcaagattctctctttgtctctctctctttttatttatttatttattttttgagatggagtctcactttgttgcccaagctgtagtccactggcatgatcttggctcactgcaacctccacttcccaggctcaagtaattcttctgcctcagcctcctgagtagctgggactacaggcgcacgccaccacatctggctaatttttgtatttttagtagagacggggtttcaccatgttggccaggatggtctcaatctcctgacctcatgatccatctgcctcagcctcccaaagtgctgggattataggcatgagcgaccgtgcctggccttgtctatctcttttgactacatttgtctaggtgtggatctctttggatttatcctccttgggttcactgagcttccaaatgcacagattaccatggttaaaaaaattatatttgggacattttctgccattatttcttcaaatttttttttctgctctttattttttcctctcttgctgagactctcactattcatatgttggtatggttgattatgtctcataggtctctgagactctgtttatttatcattgttcattttactttctgttccgcgaaaggataatccaaatctgttactgggctcttctagtaaattcttcctttctgttttaattttcaacttcagaatttctatttggttcgtcttataatttctatctctttttttgtattttctatttcataagacattgttcttacactttccttaaattctttaaacataattttatttatttatttgaatatatttaatttataatgtagatttaaaggctattcctagtaagttcaacatttagttctttaaagacagtttggttgcctatttctctgtgtatgagccattctttgctgtttctttgtgtgtcttaatttttttttgttgaaaacggtacatttttaataatataatgtggctactctagaaattggattacttccccagggtttgtggctgttgatgtttctttccccctatatgtttgtttagtgacatttctggactaactgtataaagtctaaattacttgtcatgtgtggctgcctgtttagcctagtgtcaagctaatgattagacagagtcccttaaatgtcttgaacaaataggacttctgccctttgtcaaggagctctgtgtgcatcttcaatgttctgtcagtttacaactctgctttactctcacttcctgcttgtgtagggtctcaggtcatccagaggtgagagattaagaccttacttggtgtcttctgggcacatgcacagccatgcacctgttcatggcattccagattcccagggatatgttggaggttttcaaagttccctatgaacatctcatttcctaaacattaagtttttgatcaacttcttatttcttccaactggtctgtgatgttcaataatttccaccattttttttttaacaaattctctgggatatgactttttccagttatcaaattctgtctcgggttaaataatgagaatatttgcaaatatggctttttcagggagctgccagttaggtaaaattgtgacacttctctggggatgggactttttgaagtgctcctaatataagcacagtggggtatgttaactacttctaactatactgtagagtttaaaggaagaaaacaataaactcagcattctgtattcatgactccaggccacttaagagaaccagaaaacttctatggctgctttaaatgtaatttctcatctctgttagacgtagatctagcatagttgaaaattagttgcattgcttgaaccacaggctgctgaactacaatataagttgaattcatagccttatgggtctcttgagtgacagcaagcacatgcattaaaagagtgggactcagctctaaaatgtagacttttggagaagcttttagtggctgaagcaatccccagttcacagagcctcccatgtcagcgaatcttgccttgtttgaaaattctgggatgaccactttgtaagaggaagccatgtttcttcctgaccacctccactgcatctagtctatctctagagctgtgcttaaagttagacccaagcattgtatgcacctaaagagtgattttttttggaaattcttgttagcagaaaatggggagataggtgggcatagactcagaatgtgttagaccaggaatagaaaaacataattttacataacatttctgaattaatctttgatttattctttggggggattttccacagaatctggattcaatgtgctagattgagcagctgggagttcttactatttgcttggttggctgccatgacccacacctccctgtatttatttccttgtgtaatttaatcccatgttggatcagggctggcctactgacttgctttagctagaaatgcagaagaagtgaagtccaggaagcttctgcttttgtgctcttgcgagccctgagtagtcatgtaagaaatccaactatcctcctggagagagagagatcatgtggaggggtacagggtgcaagatatgttagtgaagaggtcagcttggatgttacagcccacagagttggcctgttttgttatccactgcccttgctcaaatctgaggtttctctcgcaagaactcaaattgggagatctgggtttgttctgacgaaaggagaaggtaggttcttatacaacatacataccattgcccagatacttccaagaaaagccacggatgggccagattctggtggctgggcagggggattcagagttccatgtgcccatcagacatcacctgccttggtgcagtctgggcatactcaaagccctggcctgcaggagagcaattattattattattattttgagacagagtctcactctgttgccaggctggagtccagtggcacgatctcggcttactgcaacctctgcctcctgggttcaaatgattctcatgtctcagcctccctagtagctgggattataggtacgtgccaccacacccagctttttgtatttttagtagaaatggggttttatcatgttggccaggatggtctcgatctcctgacctcatgatccacccgcctcgagcccatggactttcaggatgtcgacagctggagttacaggcatgagccactacacccggccatgcttttaaccagatttgaacaagagaatggccacttggtccaggtagaagtagatgaagtgtttgatttcacgtgtcatgtaactaccgaagttcctccccacgatacaatgccaggtgggattgttcttcttgtcaaattccttcttaagatgagctgcaatatccttctctatgttatatttctccagtgcctgaatagcgcactccaccgagtcctgttgcatctcttccgacatgtctgcatttttgatcatggtctctcggtggcacatggttaccgtggagaagggggctggccgacggcaacagtctcctgggggaggtgctagcattgctcaggcggggctggagctgctgtcgctactgaagctgtggcacatctaatgggaggcactatttgtgccacaggaagaacatcaggtttgaagcctcaaggctcaagtttaagacctggctattttacttatcactggtggaaccttgggcaagggccttaatcttctgagtctcatggttttttttcatctgtaaactaagggtggtcatagtaacttcctcacagaacagtggaatggtgtaaatgagatagcatgtgtggaagcacttcaaaaatggtcaagtactctctccatatggcaactgcccttattttgcctcattgtacaatgaggagcagtgcatgagctcatctaccaatggtctgtcttttataacctcctcactctaggaaacaagatcgctgaggggaagcaggtatcgtcactgtcattttcaccttccccatcatcgtcaccatcccatcatgataattgtcatcatcaccattattgttgttattgtcagcatcatcatggaccatttcctgaacatctaccaaactatacccttgtcatagactcgcacagcaatctttcaggttgtgctgattatcaaccctcttttacagatgaggaaactgagaataatctagggtaatccacttgctcaagatcaaacagaagaaactttggctcactggaaaatttaaaaccaattaaagggatgtttgttgttgcatccatcttcctcctttccccatcaacctcagagaactaacatcttctctgacatggctctggggtatttgggatgtcaacaacattatcaagctgcactccaaacaccaatgatgtgaatgacacttttttttttttttttttggaaaaacggccccacgcattggaatagtggcgacgaatgctgaatctgaagctgtcgacatcctgaaagtccatgggctggagctaaggggaagccaagcgtccctgttttatttgctgtgtgcagccgtctttcagaagctgggcaggcactaattagatagccactcagaaagttgctatcgctaactggaagccatccaaattgctctctttattccgaggctttggaagaagataccccctccccaattctcctcccaccccatcctcacttgccaaacctcaaggaccacaaatacagctaattatgtcagcttggcttggcactagttttccagatagcatctttcatcagcgttcaccttccggctgcctggctttctgtacctgcggggactgtgggtgatgtgttggttaccctggtgacacaggaaagtggtagggggaggcagagggtgtggacatctccaactgtcccccaaactatgtgtcctttttcctccatgcttcctgtgctcccacaagatggcagtaggcgctctagggaacccagcagtatgaatctctgggggtgacagggagaatctggggtcaatttgttggctgtctcagccttgagcatcctaaaagcatctgctggatggtctccaggggtgagtttttaagggcagtcactgtgttttattttaaaggaattcactgtgttttattttttttatccctgtacctcacctccaaacacacacacacacaccacacacacacacacacacacccctcccaacacacacacacacacacacacacacacacactgcccacccagccctagcagttggaggctaagtcttaggcaatgtatgtgggattaaattagcatcatttatgcaccaatggcatgcaccaaaggcaggggaatggtagttgatctgcttaagagaacagactgtttctgtgttcttaaacccaacactcaagctgagctctgagcccaggagtcaggctaaatgtcatcggcaactatgaatttgaggaggatcttgcttgctaaattctctacaaagtggggaggcatgtggccttttaagagacaaaaacatggcacagcatatacagaaatgagtgtgccattgttttctagacgacctgatacacttcctctgagcaggtgacccttttcctttcgccatgccttggtcacaagatgtttctagtcccagccccaaagtggccaggtgagcagccgaccaaagaaagggcagaggtgtcttatgtgcaaagcgatcccttcctcctccattgtaacatggcccagttaatgggagggttaacaataattgctttttcattcttctgtcttccattttcaaaactctttcttagcactttgggaggccgaggcgggcggatcacgaggtcaggagatcgagaccatcccggctaacacggtgaagccccgcctctactaaaaatacaaaaaattagccgggcgtggtggcgggcgcctgtagtcccagctactcgggaggctgaggcaggagaatggcgtgaacccgggaggcggagcttgcagtgagctgagatcgcaccactgtactcaagcctgggcgacagagcgagactctgtctcaaaaaaaaaacaaaaacaaaaacaaacaaacaaacaaacaaacaaactctttcttagtcttagtgtgaccaagaccaccaggggagactgactgcaacattctgcttttttttttttttttttttttttgtgccaggaattgtgagcccaccagtacccagcaccatctgccttcctctggcttatcagccttttagtgatgaaagggggaccagcccatgacgagggatggttgccatctgaaatggtcatcttagcagaaaccatgaaacaaaccttcatttacatggacaataatgctaacaacatttagaaaaaggtttggaatgttgccccagactccctcaaatcaacaaaatatggaatctagcagtgacccttatgaaatacacaggcctgaaggtagattggttcctacggacaagaaaataatatttctttttcatttccagcctagaaaatttggccagcatcccagctggccacagtacacagaagtcagttcaaatagagattcctgcctccccttgtttgcaagagttacttgtataaaaacagtcaacaaacgaatcagccagatgagctttccttcctttattcagtcagacagtgttttatgtcgggaatccatgtagaaacaaattcatgtgctaggtgctgatgagaaacctgaatttgctggtctggttatataaactgtgctgagataggctgaagggagaaggcccagtggagagccaacctgcagtcgactctcttctgcacatcagcaataagacttgcagcctggtggccagtatggaccgtccattcctctttctacggcagctaatattcatcaaggtcgttgatgtgccaggcattgtgcaaagttctttgcacgtactgcctcattttgtctcacagcagccttacgaagtgggctattctctaaggctcatctctaaggctcggaaacagagataatgcatctgaagtcatgaagctggtaagtccggaagccaagattgggggaagattctccaagattggggaagccacgatttgggtttgcttttgtttctttgagacagtctcattctgtcacccaggctggggtgcagtggcacaatcttggctcagtgcaacctctgcctcccaggctcaagcgatcctcctgcctcagcctcccaagtagctgggaccacaggggcatgccaccacacccagatcatttttttatttttttgtacagatggggtttcaccatgttgcccaggctaatcttgaactcttgggctcaaatgatccacccacttgggcctcacaaactgctgagattacaggtgtgaaccacctttcaaatttgatgaaaactaaatccacagatccaaagctcaatgaactgcctccaaaagcataaatgtaaagaaaacccaagctatgtcacatgataatacaatcactaaaaatcagtgatgaagagaaaatactaaaagcaaccagggaaaggggacacattacatatcaaataagaaagatcagaatgaaagcagtcttctcataagaaactatgtaatctggaagactattaaggtgacatttaaaaaataatgaaataaaaacaatctgtccgtttgtaataatacctacaattttttaaatgaaggcaagatagtttttttccagacaaacaaaatcttagagaattaatcaccagtagacttgaactataagatatgtaaaagtagtttcttcaggcagaagaaaaatggcaccagatagaaattgggtctatgcaaaggaataaaaagtgccagaaatggtaaatatgtggataagtataaaatatatatttttatagtttttaaatctctttaaaagattactggctaaagtaaaaataacaatgtattttggagtttgtaacatctgcagaaataaaatgtatgataacaccagcacaaaagatgggagcgtgggataaaagaacactgtttatgatttttaccccatgtgtgaagtaatatttttcaatggcagcaagttaaaaacgtatattgtaaactcaagagcaacctctgaaaaacaaaacaataccaaaaaggaaatatagttaataagccaagaatggaaataaaaggaaataataaaacatgaatgcaaaagaaggtgggaaaagaggaaataaggaaaaaataacagatgaaatcagtggaagacaaatagcaagatggaatattcaaacacaaccatattgttaattactttaaatataaatggtctaatgatactaattaaaagtcacagactttcggtttcaataaaaaagggtgcaaggcctaatcaaatgctgtctttaagaaacttattttattttagattcagtgggtgcctgagtaactatggggcttgggcttctattgaacccatcacccaaacagtgaacatagtacccagttggtagtttttcaatccttgtcactgtcctttcttttgaagttgcctgtgtctgttatttccatctttgtgcctggatgtacctactgtttagctcccccttacaagtgagaacatgtggtattcgattttctgttcttgcattaatccacttaggataatggcctctagctacatccaggttgctgcaaaggacacaattttattctttttcatggctgcgtaggattctgtatatgtgccatattttctttatccaatccaccattgatgagcacctaggttgattccatgactttgctattgtgaatagtgctgcaataaacatatgagtgctgatgccttttggtagaatgatttcttttcctctgagtaggttcccagtagtgggagtgctgggttgaatatggtagttttatttttagttctttgagaaatctctaaactgctttccacaggggctgaactaatttactttcctgccaacagtgtataagtgttcccttttctacacaggcttaccaatacctgttattttttgattttttaataatagacattctgactggtatgagctggcatctcttgtgaagaagcctattttttatttttagtagagatgaggtctcactatgttgcccaggttggtttcaaactcctgagctcaagtgatcctcctgcctcggcctcccaaagtgctaatataggttagtgttagtgattggttttggcatgagccaccatgcccagccaaaacctattttaaatataaagacaaaagtaaaaagaaggatgaaaaagatataccatgctaacattaatcaaaagaaagtcaaagtggctgtattaatatcagtcaaaggagatttcaggacaagaaatatgagagaaatatatcatcatgaaaaagggatcaattcatcaagaagatacgataatcctaaatctttttgcaactgataataggacttaaaattcatgaagcaaaaactaatagaactgcaagaagaaatacaactatgtaattatggtcaaagatttcagcattcctgtggtaagcagaataatgggcctccaaggctgatcatgtcttactccctggaacccatgaatctgttgccttacacggtgaatgagaattaaagttgcagctagaattaaggttgataattactaggttggtgtaaaagtaattgtggtttttgccattattttcaccaacctaatagctgacatcaacatagggaagttatcctaggttgaattggcctaatgtaatcccagggatcctcaaaagtggaatgaggaagagggaggaagaagaggaggtcaagtgatgcaatgtgagatagactcaatctgccattgttggcttcaaagatggtggaagggaccacaaaccaaggaatgaaggcagcttctggaagctggaagaggcaagacaacaggtaatttcccagagccaccagaaaagaaagcagtcctgccaacaccttgatgttagcccactaagacgcatctcaaactgttctgacctacagaattgcatgatgatacatttaagttgttttaagctgcacgttttgtggcagtttgttatagcagcaatagaaagctcatattactccggtatcagtaattgataaaataagttgacaaaaaatcagtaaagatatggattatttgaacaacactaacgaccaagacctagggattcgtatctaaagaatagaatgcagtgaaaatgcatgacttctgcagccaggtcataaaaggtgatacaatttctgcctggggatctttctgtttctccctttaaaaactcagtcactttgacaggtgcagtggctcaagcctgtaattccagcaagtttggaggccaaagtgggagaatcacttgagctcaggagtttgagacagtctgggtcacatggtgagaccctgtccctaccaaaaaaaaaaaaacaacaaaaacaaaaaagctaacaaaaaccccaaaaaccccaaaaatagtcagtgtggtggtgggtacccatagtctcaactacttgggaagcagagatgaaaggactgcttgagcccagggaagttgaggctgcagtgagctgtgattgcaccactgcactccagcctgggcaacagatcttgtctcaaaaacaaacaaaaaacaaccacaaaagaacctcagtcaccatgttgtgaggaagtccaggtcacacagacagggtgtgtttaagtgttctctctgacagccccagctaagatcccagccaacagtcaccatcaccctccagtcttattcactcacaggtgattctagctcccaggcttcaagccagtccagctgatgctgactaatgcagatatgagctgctgcatgagcaaattgcagatgcatgagtgaaatacacactgtcatcttttctttcttctttcaataggaaagatgtgtatttctctctactgtaaaagaagtctaaggtaggcagtggactgaacatggcagttcatcaatatctgggacctacgttccttctgtcttgctaacaccatgtttggttgtcaattcatggtccaggacagttgcttgagtaccaagtatcatggcatgttctgggcaatatgaaagggaaagggtggaaaaaggcaggtttcctccctgcttagggagggaaggccagcaatttttctaggccagaatttggccacatctagctacaggctatgggaaaggagctctttatcccagatggccatacattcagataaaaattgaggattctactactgctggggccagcacgagctgctggggtgagtaattaataatgcttgtcagctaaaataagcctctatcatttctttttaaaaagttaagatattcacataccatctgatatggtttgactctgtgtccccacccaaatctcatcttgaattgtaatccgaattgtaatccccacatgttgagggaggggcctggtaggaagtgattggatcatgggggtggtttccctcatgccgttctcatgatagtgagtgagttctcctgagatctgatggttttaaaagtggcacttcctccttctctctctctctctcacctgccaccatacaagacgtgcctgcttccccttcaccttccatcattattgtaagtttcctgaggtcttcccagccatgcagaactgagtcaattaaacctcatttgtttataaattatccagtctcaggtagtatctttacagcagtgtgaaaatgcacaaacacaccatcaaatttactattttaaagtgtacgactcagcaattctttttgtgtatattcacagagttgtgcaactatcatcactttttaattctagaatatttttatcaccccagaaagaaactctgtacacattagcagtcacctttcatttcgccttctttctagcccttggcaaccactcatatgttctgtgtatctgcatttttcctgttctggacattttgtataaaaggaatcttgcaatatgtggtctttttgtgtagctccttaaattttgcataatattttcaaggtttatccatgttgtagtgtatatcagtactttgttactttttatggctatgccacattttgtttatccatttatcacttgatagacatctgggctgtttccactttttggctattatgaataatgctgctatgaacactcgtgcacaagtttttgtgtgaacatatgttctccattctcttgggtatatacctgggagtggaattgctggatcatatggcaactctatttaactctctgatgaactttcaaactattttccacagtggctactgcattttacccccctaccaggaatttatgagttctgattttttgacatccttgcctacacgtgttattttttattttgaaagtgtagccatcctaggggatgtgaagtagtatcttgtggtttcaatttgcatttccctgatgactaatgatgttgagcatctttttgtgtgcttgttggccatttgtatattttctgtgcagatatgtctattaaaaatgttggcccacttttcaattttttttactattgagttataggaatttgttatatattctggatagtagacccttatcagatatatgatttgtaaatattttctcttattattgtgtggattatctttttactttcttggttctttctccttccctcccttccttccttccctccttctttccttccctccctccctccctccttccctccctccttcgtttctctctctctctctttctttctttccttctttctttcatttttttgacagagtctcactctgtcaccaggctggagtgcagtggcacggtcttggcccactgcaacctctggctcccaggttcaagttattctcctgcctcagcctcccgagtagctgggactataggtgcacgccaccctgcccagctaatttttgtatttttagtagagatggggtttcaccatgttggccaggatggtctcaatctcctgacctcaggggatctgcctatcttggcctctcagagtgctgggtttacaggcatgagccactgtgcctagcctactttcttgatagtgtctgaaccagtcagggttttccagagaaacagaagcaatagaagtaacagaaaaatatttcttttaaggaattgtgggaactggcaagtctgagattcctagggcaagccagcaggctggaaacacagacggaattaatgatgtaatcttaaggcagaatttcttttttcttccacattcctcaggttttgttcttaaggcgttcaaatgattggacgaggctcacccatgttatggaggtttaatctcctttacgtaaagtcaactgattgtagatgttaaccacatctacaaaataccttcacaacagcatctagactagtgctttgcataagtaatggaatatggtaggcttgccatgttgacacatagaattaaccaacacagtgttgcttgatgcatagaagttttcaattttgatgaagttgagtttatctattttttctttggttgcttgtgttttaggtgccatatttaagaaaccctttctttctttctttctttctttctttctttctttctttctttctttctttctttctttctctctctctctctctctctctctctctcttcctttctttctttctttctttctttctttctttctttctttattttttttttttttttttttttttttttttgagacagcgtctggctctgtcgcccaggctggagtgcagtggcgcgatctcggctcactgcaagctccgcctcccaggttcacgccattctcctgcctcagcctcccgagtagctgggattacaggcgcctaccacctcgcccggctaattttttgtatttttagtagagatggggtttcaccatgttagccaggatggtctccctctcccgacctcgtggtctgcccgcctcagcctcccaaaaatgctgggattacaggcgtgagccaccgcacccggccaagaaaccatttcttaatccaaggtaggaaagattcatgcctttttttttttttatagaattttatagttttaggcttacgtttaagtttttgatccattttgagtgaatgtttatatacaatgtgaggcaggaatccaaattcattcttctgcatgtgatgttgtcatctttttaagcttctctgttcaattttctccatctccttaagattccagtaatgtgttcagggtccttagagggtgtgaacccttgactgaccaatttgctccttaatccagttccaggtcccaaactgggagaaaactgatctcatccgctctgtttggtggctttacttagggcttgaaaaacaatgggaggggctggcacaggtgaaacttggtgttttagagggaatgtccataagttgatcatggtaaagtgcctaaatttgtttggacttataacctggcagaagaggctgcaaggacctgcgaaatatagcccatgggccaaatctggccctctgcctgctttgtcaataaagttttatagaaacacaacacccgttcacttacatattgtccatgcttgcctgagtgctagaaggacagagttaagcaattgtgagagagaccatatggccttcaaagcctagaatgttgactatctggtcctttagagaaaaacttagttgaacgaaatataagtatgtgttctattcaaacttagagaaaatggacatgtagcaggcgctgttggtgccacacccagatccctggcttcctttttatagtagattgcccatcccccaggtcctgtgcaaattgctgccttctcaggaggaatgacctggaatgattgaagccatccctcccgtaactggctggggtcaggcggtgtgcaccagaactctctgtggaatcaggcagaagctagacttcatcttttttttttttttttttgagatggagtctcgctctgtcacccaggctagagtgcagtggtgggatctcagctcactgcaagctccgccttccgggttcacgccattctcctgcctcagcctcccgagtagccggggctgcaggcacccaccaccatgcctggctaatatttttgtagttttagtagagacagggtttcaccgtgttagccagcatggtcttgatctcctgacctagtgatctggccgccttggcctcccaaagtgctgggattacaggcgtgagccaccgcactcagcctagacttcatctttaaccatgttcctatgtggctcttttttcccctacagaacaaagctatacagaagctagcttaaaggcgtgcacactggccagatctgaagcaatttgaacctcaacataaactatgttaaaggagattataatccttgaataaaagagaagtccatgagtccgcatggatatacataaataaatagataatggggggaagagaaaggtattactgtagaaggccaactaataactgtagaaggaatgataaaattaggaaatcaccatttggcaaccatcatagtaataactaatttctgccaagaaatatcaatggctactaaaaccagtgggtgaaagtttgatgaggcacaggttacttacagagtctcaaaatatctcaccacaaaatacttgttacttatatagggaaaagagtaactttacatgcagaaagctggcagatgctacctcaatcaagtgatcaatgctgccagtaatgggacacatcaaaattgcatgtcacctgacaggatgcaatgagaagaacacagcagcacttttgtgataagtcctgccaaaatgcataacttgaatctaattatggaggaacattaggcaaacccaaatggagggatgttctacaaaatatctggctagaaatcattgaaagtgtcaaggtcatgaaagtcagtggagttgctgcagattgaaggagacggaaatgacctctggtgatgcatgtaatgtaggaccctgattggattagtttgctgcaaaggacattattaagatagttggggttggcaggttgcgtggttgtaacatatcaatattaatttctagattttgatggttgtattgtggttgtgtgggaggatgtccttatttgcagggaataaataaatactaaagaatttgagagtgttgaagcatcctgtcaccaatctgctcatagagaaaaaagttcagaagaaaaggttttgggactattcttgccactctccagttaacttgaaattacttcaaaagaaaaagagaaaagaaagcagccatcatctcatggtccattccttctgcttcacccctgagaaaaagaattccagtggagagaaacattagcagttgtacaccattgaagctggtacctctcttccctacactttctgcagggaccccacgctgtgtacagcccctcggtcttaatacctttgactctgcctgagggctttctctgggtgcccacatgcagcaggaagaagcgtcaggaaattccagttcctcccctcttgcccaagaacagctctcaaacactgactgatgggagccagtgattaaataccccaatcccctctcttctctggtgggataactcaggtaggctttgcactggctccctgacttccccaacaggattgagtctcacacacactctttagtgatttttttccattccttattttactccacactccactatccatgtttcttggaattgaaatgggagagttccccgacacacctcgcaggatgtgtggcaggggtgtgtcttgtctgttcaagcacatgcgcaaaccccttatgggagggggagcacgtagacaggcaggtgcaggaaccagggcgagtgtttttgggctccggccccagggtagcatctaggggtggatgcctgttaatttcaaagccccagtgggtagtctacagtggtctgttagctctgccatccaaagatggcttaagtgttaaccagctcagtgccctcttgctacccgggttcttgtccagcatccaggaagaatcaggtcatgtgtggacttgaaggatggtgaatgtggggattttattgggtgatggaggtggctctcagcaggatggatggggacctggaaaggggaaggagtgggaagatattcccctggagtttggccattctatggtcgatttcctctctgactgtccccagtcaaacttctctcaatgttcagatgtcccttctcttttctccttctcttctgtgccactcttctcttcctttgctcttctgttcatctgcttgtctgcttgtggagcctggggtttgggaattatatgggtacagggtaggcgggcatggcaggccaaaaggtaacatttgggcactaaattcctgttctcatttagggctgtgggttttcaggcctgaggttggggcctttgccggggaactgccctcttttacccagtatttccttgcctcctgcctcctacctatatcagaatcacctccttcatgaactattttgcactcaaacccttttctcagagtctgttcttgggaaccccaattgaagactctctctgttgtgtcacctatttattgtcttcatagcatttctgactatccaaaatggtcttctttctttatttatttgttctgtgcttgaaacaggatctgaagctgggtgggtgctcagtgagtattagtgaaatgaatgagagaagagtgtttttccatctggattcccagaggtccatggcattgcttcaaggtcccaccccctagtcaagggagaagctcagctgggggactctgtctctgggccagaccccctcaacccagtaaaactctgggctatataggttgtagttccacttgaaatcgaaggagatcagaatatgccactccaaggctgggcatggtggctcatgcctataatcccagcattttgggaggctgaggtagaattgcttgaggccaagagtttgagaccagcctgggcaacgcagcaagaccctgtctctacaaaaattaaaattagccagacatggcagtacacacctgtagtcccagttacttgggaggctgaggcaggaggatcacttgagcccaggagttggaagctgcagtgagccatgattgcattgaagcctgggcaacagagtgagaccccatgtctaccaaaaaaaaaaaatgccactccaaaacatgaagaaaacttaggctcaacagacgaaggaagcgttctctggcctccccttatctgcctaaaagcaggacataaatttctctttgagtaatgggttccctcacactcctgttccaggagagaggaggactcttaacatcaaagactgggagttgacaccaagatgagtttgtcataaacagatttcactcaaatagtctttatcttccgttattttccccatatattttctagttacttcccataacttcttatcccttgaaccccaacattttttcctctcttaaaagagtatataagtccccaagtctaaccacttctttgagtttcaattctctgcgaactacatgaatattaataaaaatggtatcattcctcttgtgaatctatcttttttgttactttaatttgcagacttccaatcactgaaccaaagagagtagaggaaaagtttttcctctccagcagaatataaacaagcaaagaaaaaaaaatttttttaaagcttaaaaccgcaaagcaaatgcacccagcttatttgtcagaagacacttgagattagagaagtttggccccctgttgcccagctagttggtagcagagcccaggtgatatggtttagctgtgtccccacccaaatctcaacttgaattgtgtctcccagaattctcacttgtcgtgggagggacctaggcggaggtaactgaatcgtgggggtgggtctttcccatgctattcttgtgatagtgaataactctcatgagatctgatgggtttatcaggggtttctgcttttccttcctcctcattttctcttgctgctgccatgtaagaagtgccttttaccacccgctgtgagtctgaggcctccccagccatgaggaactgtaagtccaattaaacttctttttctttccagtcttgggtatgtctttatcagcagcatgaaaaccgactaatacaccaggttcaaggtgatgctgttctcattccacaaatacagtgttggctgaatcagtcagcaggatgcctggtcctccccagccgcagctgagcctagagtctatctcctcattcgatcaaatttgggggaaggccagagtgaatctacctcccatttacagacataaacttactcattaactcctcacagtaactctatgagataggcattacccctactttgtagatgccaaaattaaggcctagtgagaattaatgaaaattacctaaatatctgaatataggggactgctttcagtgaattgctacattattcctttcaagaacatgtggtgatacaaactaactgttggcaaagcgttgccaagcactggtcctgctggatc

SEQ ID NO: 1102 - DNA, 134292 bp, Homo sapiens
  Genbank Accession No. AL031983
gatcatctggctcaaatatcagttcttccaaaatcctcatagtgccatcctcgagggccctgggagccctgcagcttctctctggggtgacaatagcatgtgtagcctcaacagggacactataagaataaaagagtgtgctattactatttatgccatgatcacaggaatacccaggactgtccctgacacactggacatagggtcaccctacttctccctaagttcaggtgacacaaggagtaggagtgaggtgggcagacagcaagtgagaaatggggtggacagggcacacagtggggtggccaggctggtgcatttgtggccctgtctatggggccagcaggaccagtggggtcagtagagcatatactgagcttgaagaggtggcatggagcacttagaagctctatctgctgcttgtcatctcttggcatgtggaaggccttctgcagagttacgctccagacatagcctcggagtcctgaatatcccccaggctcctggaatcaaggagtgtcttagacggcttgagctgctttaacaaaaataccataagctgggtggcttataaacagcaagcatctattactcacagttctggaggctggaagtccaagatcgtgacaccgacagatttggtgtctggtgaaggctgttgcttgttcatagatagagcgttctcgctgtgtcctcatgtggtggaagggcagaggaatctctctgggttccttttataaaggaagtaatcccattgatgagggcttcacccttacgacctactcacctcccaaagaccccacctccagataccatcgcattggaggttaggtatttagcacatgaaatctgggggcaacagacattcaggccacagcaagaagcttcaggagaaagctttcagtcttgtgaaatgtgaatgaggctttcccacagcctagacctgtcttcacgccccagccgcagcctcttgcattcacggtggcttttgagcatcctctgaccactgagtcacaaacctccctgttccctctctatctggctattttcttggtaggaccagaaaaacttttttttatagtcttgccaccatgccatgtagttttcgtacattgcagctatttcaaattactgcattaccacagaacactttttctgtaataacccagaatcaacagtttttttctagctgttaacctggcctcaaaatcttccctttatttgggccccctttttcttctgtccttaactctgactctggtagagcccatggaactgacagttcaaagcccgcgtggcttttctctccccaccacaacatcttcatctaaatagagtcttgtaacatttacctgccctctctcccttgaaaatcactgttccctggtccctgttggggagcctgggccttaagcccctttgtctttgccctagaagaacttcctctccagctgagtcaggttctcatgagattctaggggtggcttggcctcctatatccacttccctcaacattggcctgtagccacatatggcctggactttggcccagcttccagcatgcccaataatgtcagccctgtggggaagttcctggaggtgtacaaggacgtgacaattcagtggtagggacatcggggtgcttgttcatgtggaaactgactttaccattttcctcttttctgagtagtttatcatttctggattgctgtctgtcattttgggaagaaaatcaaacaagcatctggtgagtataggaacaacagtgcctcacttactaaaaagagactttagcggaacctcatccagttggatctttccaaggttcagacaaaggaactgaaccccaggttgctgacaagtgtcctttggtcagtggccctgtggaagtacacagggcccactgatctgggggacacctttcatgatcctcattttgaagagagtcctgtaccctctccaggctctgggtggctttatgggaaaattctgcctcatcatgacaccctttggtgttcactgaccaccggggttcaggtccttggtgagcacaggggaaagaggacagtgagagcatgggctgttagttgtgcaccacagcctgggtgagaaaagcatcaatcaaaagagatgagccttgctggtgggggccaggaagggtgcagagtgaaaagggggtgttcagtgatgggtgcacatctgattgacaaacttttgcagaatcatttccaggcctttcttaggaggctaagaggcatgggttgggggacagagatgggtatggtggagattctggtgacctgggatttgggggtctccctgtcctgacacagaagctgccaagaaactggcagccaagcctcaaggtggcagtgccaggtttggacactgtcattctctcagacctccctcaaaggatcagatgcccttcttcatccccaccctcagcctcccctgagccctccaggaaagcagcctgtgtggatcccctaaacaagggcaggagcaccagccctacagagcaagcagcagctgggtgaggcagacggcggcacaaggtggggaccacggtgttccagggccacttaggctcctaggaaattcacccgccaccatcctcagggacctcttctttgaaaaaaagggactttctcagaacattctgacaacacgagttgtgaatccctggggctgtatggagaaatggcccacgacctttttccatctcttcccccatcactgcccagctctgagattgagcccctgggaagagggcccggatctttgccagaggctgctgggcatacctgagcacacgtgccatgggctgcttgtgacgggctggaacacctagcccaggtgtcccagaagccaccacagacatcagcctattcctcccctggtgttggtctttgaaaagtgagtctggacaccgcaaaactggaatccaggtttcctactttcgaggggaggtagcaccccatggcgcagctgtgattctcagccctcctctgggccgtgccccagccgggatctgaacatccaccctcggccccaggtgctgttgcccccacactgagccctcgtaccccatgctccctggccctcctgccagggcacccttttcacaaagtggagtggatgaaaagaacaggaaagagcaccaaccctgctgctgtccccatatgacagaggctgctgtgggggcatctgttgtacttgggtgagcaggccccttggcctcgagctctaccatgcaggggtgctgcagacagagccaggtgataggaaagagcatgtctgggaacccacctgatgacagcctcagctcaggatgaggcaggaggcctctggctaggcttaggggagatggctggaggaacctcctcagggtgccagtggactgggtaaagccagcagggggcttggaggtcagggaagctgtgatttatcaagcactgtgggcattgcaatattttctctgttcggttcagtccaatgggacatcagttctatacatatcttcctcttcctctagccctgctcagtcctgggtggagaagctaccagaaccacatctcctgtctgtcccaccataagtctctgcttcattcacgctttcatgtgtcgtgcatcaagcaagcatttgcctgtaggcttggggagctctgagaggggttgagagtgaacaaaattaatcaaatcgtataacagaagaggaagtcccatcctgccgaggatcctggatgtgagaacctgctgctggcctggtgggatcgtggtgccccaggagcatgaactgctcaggagcagaccctgaccagatcccctgcaggcctggaacagcctgatcagcagcctcctaagccccatggctgccacagtgggcctcattgtccttccctatcacctagccggggtgttcccagctgccagacagtgccaactggtggtgcctgcccatcagtgccccaagacagccactacttttcgaagaatgagaccaccagctgctttgtggccagctccagcttactggtgagtatttttaggtagaatcttccagactagtgaagtctttgagattttctgcttcttgttcactgcttccttctgatgtggaccatgcggaaagaggcagaacacaggaacccacacatgggagaatagcaggcatttgactggactgtgccaaaagagttgttcaagtacaatatcaagcaagactgtagttgcaaaaagacataaccaacaacttggtttcaatttgagcaccttaataaacaaactgatttaactgtcatagtctcaagggatgggtttttccaagcaagaactctagggtcagggtagcgaattgctcaagaaaggccaagagctcagggagacataggaacctcataaacagggtggccacaggctggcagtgcccaggttcagccaggcaagagccacaggtcaagggaggctgcaagaggctaaatcctaattccatcacatgcacaaaaatggatgggatggccaaaaatgaccccaaaaaatcaggaaacaaatacggaatgggctttttaattgttgtttgcaatcagaactttatgaaaatgacagaatgtggtttcgcattctctgttgcattagagccagtctgagcatcagtatttgctctaaaatgtgtttagtcaataaagtcaagagaacatgtgtgtggaacactgagaaaagaaggcagaggaagtttgcattcctgcagccatagagggggatattctaggggtggagaggcagcaggcagggggaatgtgtgcacagcctggccgttgtcccatcccctcatcgctggcttcaggccatcctcccatagatggagcagctataatgggagtggagggttgaggggcaggggaggcatctgctgagcggctggatggggtttgtgtagtgggttaggatgagctcctcagaaaccagcctgagctctctggctcaggagcttctcaggaagagctgagaagcggcaacccctgcctgaggggtccttgtgttcatttcccatggccacaataacagaggaccacaaactggtgactgaaaacaacagaagtgaattccttcacagttctgaaagcaaagtccaagatcgaggagtcggcagggccgctctttctctgaaggctctaggaaaaaactctttcttgtctcttccagctttggggaactccaggcattctttggcttctggacacgtctttctaacctctgtctccatcctcatgagggcttcccctctgtttgtctctgtgtcctgttctcttcttataagaacaccagttattgcatttagggtccaccctaaatccaggatgatttcaccttgagatccttaactaattgcacctacacagaccatatttccagataaggtcatattctcaggttctatgtagacatgaatttgaggggggacactaacccactatagtcacagtctgtacaaataaattctagattctgcccacctgtggccttacctgttctacttggaagtcattgttccatggaaggtgacccagggaagcagaattgttctcctcctcaggcagatagctcctggggactggcgtgagaattagcaactgtgccagcacatcactttgattggtcaaggtgccccttgctgcctcccagccaagccaagcaggcccaccccagggagcataggtgggtagcaggtgctggcgctcagtttacaaaggaaggccttctgcctcaccacctctgtggacctgcaaaccgccctaaggggtgagtgggaagtccccatcttacagaagatgaaattgaaacccagacaggcggagactctccctggaggccagatgaatgaagagtcaggaggctcagctcaaccttgggtgtcacctgccacctgtactgctgtccctggagtggcccaggatactaggatatgacactgtctcccagatcatgagcaggttgagtcaggtatgagggaagaggagccagcagatgacactgtctaaacccatctggtcatctcaggaaggcagaagggttggccagtccagcacagacctcgtgcatcctgcatttcagaggatcctgtctgtgatgctcctcttcacggcattggagctcagtgtcgctatcctttcttctgtcctcttgtgaaaaaagacctgttcagatgtcctcagggtgaacctgctgtgccctgggctctggggcctgggtggtggcacagggcatggtcctggggccaatggcaggtggtactaaggtcgacccatgaatcttgaccttagtcgaagtcgacaggttttgttgagtgaggcagcagccggcagaacaggatgagagcaagtgcccagggtggaggaatcacaataggaagctatgggaccaaagagagcacatcacacatctgctcatttagcaaagcaggaaacaggctaaggtgcagaagccctctggtccctggaaccctcaagtttttatatttgtgtatcccttgtcttttgtttcaagatattttttaatttctctggtttgattttttggagataaaaggccttccactcagcgtacaaggcctgttcacttgctttgtcctctccagaatgtgtttcctgacccaaagtgacacagtgatcaccagcatgccccaggcagcatttgctgacaccgtcctggagatgaacaaggagtgcacccttagtgtgggggcagagagagagagagcacattgtctgcaggagtcagctgaatgatctcacagaccccacctgctgggctcttccattttatcacaattattccgcctgttcacgtgcagagagaacacttggggcagattttaagaccttagagagtaacttgtttacaaataaaatatctctttgatgatgtatttggattccatgtcattttgccacatttctcttaatttactggacaccaacaatgatataaaagttaagattttaggaaatgtagaaaatttctaaataaaaatcaaaaaagaaaataaaacaacaaaatgaagagctgcctgggagagatgaacccatggtccccgtcttcacgctaagatgcaaaagagcagagcttccagcttccaactggagctcccacacaaaatactggggaaatcttcctccttccaacaatggtcttcctattgatcctgagaccttgctggcaaccagccgtgtctctgcccctctttctgtgctctcgtgactcatcccagcttctctctctgtgcccctttcttgttcccctctgcccatttctctttttatctgaatccccagatgcccctgcacaatctgagtgtgcagagtggcccagccctccctaggaagggaaagcactggccccttgcttggagagaaggcagagactgctctcccacaagactgtagtgccctaaaaccccctgatcagctcacaccttgtttcctggtggccaggccaatgatgaggttcaccacagcctacctcagccagggaccttatgacttaataggggaagagccacagaatatagccacatatatgggcagaagtcctgagatatccatggggctggatactaaagggtctccatttccaagtagaacctaaggttagatgagagaggtttattatcaatgcaggaggatcctcacaggatacaggatttaacagcctaacagggattccagaagatagttcaaatcagattcaaggtaagctcctgtaagtatggaaaaagtgacaactccccacgaaagacagaggtgagaaggctcagagaagtggatatgctggggtggatacactctgtaaatccagaaaaatctacctgctgcctatttttcaattgttcaatttgcctgttaaatcatctgggcctggtcatgctaaatttttttaactaccaattttgatttacttaatgattgtaaatctggtttatccatttcttctgttttttaattcactctgcattgatatttatactacaactctccaaacactatttcacaaatcaagcttctatagcaaaagtaggaaaacgttttaagaaattttattttaccttgtcaatgaccaaaaacacacaagactggcatcctcacccaatttctctagactttgtttctgggatcatcagctatcacatgttgtattagtccgttctcacgctgctataagacagcctaagactgggtaatttataaaggaaagaggtttaattgactcccaggtctgcagggctggagtggccccagaaaacttacaatgccagcagaaggggaagcaaacaccttcttctttacatggtgtcagcaaggagaagggcagagtgaaaggggacagggggaagccccttttaaaaaaccatcagatctgataacaattcactatcacaagaacagcatggaggcaacctcccccatggttcaattacttcccaccaggtccctcccacaacatgtggggattatgggaacaacaattcaggatgagatttgggtgggacacagccaaaccatatcacatgtcttcaatttctgcctcctaaaaatgacatctttgccaggtgtggtggcgcacacctgtaatctcagcagtttagaaggctgaggcaggtgaatcacttgaggtcaggagtttgagaccagcctgaccaacatggtgaaaccccatctctactaaaaacacaaaaaacttagcctggtatggtggtgtgcacctgtagtcccagctactcaggaggctgaggcaggagaattgcttgaacccaggagatagaggttgcagtgagctgatatcacatcactgcactccagcctgggtgacacagcgagactccatctcaaaaaacaaaacaaaacaaaaaaatgacatgctcaaccttggtctttcctcaactgtcaactctgagtgctaagaacctaaaagatatctctgctttactgcacagcaaggtctttgttgtgagttgggttgtgtcctctcaaaatttgtatattgaagttctaacccccagtatctcagaatgtgactttctttggaaatagtgtctttatagaattaaaatgagatcattagggtgggccctaagaggatattagggcacggacactcacagagggacaactgtgtgaagacacagggagaagacagttatctacaaaccaacaagagaggcctcagaagaaatcaacactgcggacaccttaatgtcagaattttggcctccaggactatgagaaaataaatttttcttgttgaagcttcccagtctgtgatacttcgctattgcagctctagcagactaatacacccttcaaattcaccagggccaaattgaacccaccattctcctctaaaaatttcttttgctttcaccattttgtttaaggtcctcactcttcccatcactcaaactctgaaagttcttttcccatagtgaaaaggcctaatgaaggtgtttccccatggattctttccttttagttctgtcttgtggactgcagctgactcagccctgagggtgcccttgatgtccccgctcaattagcatctctaccatttcaccattgcttgcatgagacagtcgaagggtcatgaaagcttctgtgatctggaagacgtattctataacagtagcgtttcacagcagaagccagacttgcaacattgcaaagatcatgggatttggaagcagaaaacctgagtttctatttggactctgccacttaccaagtgtagaacttttggaaaaaccttggaaagtcttcctatctccattatggatcaagagtgtgaccttggttcaccctctcaccattctttccttaatttttttttcttataaataatagcttccaccttccaccctgcagagcaattgtaaacttcataacacatgcgaagcgcttgactcaaaaaacaggaagcactaaggactgttaatttaactggcatctcattacttttataagaaagcctagcataaagaaaaggtgtgtccactgttatgggttgaattgtgccctcccaagaaagatacattgaagctctactccccaaacctcagaatgtgcccttatttggaaatagcagcattgcagatgtcattagttaagacaaagttatactagagtagagcaggccctaatccaatacggcaggtgtctttacgaaaagatagcatgtgaagacacaaacatacaaagagaaggcaaccatgtggtgacaagaggagagactggagtgatgctcctgcaagccaagattgctggcaaaccaccagaagttaggaagaggcaaggtaggattcccttacaggtttcagagggagggtagccagctgacactttagactgctaacctccagagttatgagacaataagttcctgttgtttgaagccgcccagtttgtggtacattgttgcagcagccctaggaaactgatacatctacacaatgcaatgtccttcagccataaaaaggaatgaaacactgacattggctatcatgtggatgaaatgtgaaaacagcatgttcagtgaaagaagccaggcacagaagaccacatattatataattccatgtatgtaaagtgtccagaataggtgaatccatacagactaaacacagattaatggttgccaggggctgcaggaggggagaataggaactgacggctaatgagtataagctttctcttaagggtgatataagtgatctggaattagatagcaatgatagttccaaatcttgtgaatatatttaaaattaaattgtgtaacttaaaatggtgaattttatgtggaataatagcaataaaattcaatagaataaaacaaaatgaacgacatgaagcccaacacctcactggaacatgcaaaacccttcctttattctctggtggatcccatttctcgccattgttcagtgctctctatgccccaccatgctgtcctactctcttcatcctctgccttctcccatgctgtctgcctacctatagtccctctttccccacgccctgttttgttcctgtgctgcccctttctcaccctgtactctttcactttgaagtcactgccccagaaccttctctttcactccacgattgggttgtgttgacccacttgcacatcatatgtttctgagggcagaaatgttggcccataattacagttgtctggttatgtctctgtctccctcactaacatgcaagccctacagaagcaggagctgtgtccagcatgttcaccagggtatcttccaagtgtatcacatgatactaggtgctccgtagacacctgctcaatgtcatataggttcttggtcttctcttccaaataaggtagaatagttatttttcattttacaggtgagaacattcaagttgaaagaaatgaagagaatatttgatgtcccgcaatacaggggaaagccgttactgcatcccaggaatgtttgaccataaagcccttccttgcccactaggccaggtatgtcccatcatagagcccctcaccccacttgcaggttacccttccaaagtgctgttccaaaagagctcaccgagacaaggtgatattggagaagtgatagacacatagatctatggaagacattgggaagcttgggaataaacccacacaattatagctaattattgacaaaggaacagcagcaattcaacagagaaaggaaggtcttttcaacagtgttaaaacaattggacagtctttttttattttttagtttttggttttgtttttgtttttaagacggagtcttgctctgtcatccaggctggagtgcagtggcaatctcggttcactgcaacctccgcctcctgggttcaagcaattctctgcctcagcgtcccaagtagctgggattacaggcgcctgccaccaggcccggctaattttttggatttttagtagagatggggtttcaccatcttggccagtctggtcttgaactcctgacctcgtgatccaccagcctcggcctcccaaagtgctgggattacaggcgtgagccacggcacccagtcaacaattggacagtcttatccagaataatgaatcttgatctaaacctcctaatttacatgtaacaaattgcattagttacaatattaactcaaaatggatcgtagatctaagcataaaatatataaatatataatgcttagactaaaacataggagaaaaaatttttccaatctagttaggcaaagagttcatagatgtgacactgaaagcaaagtatagcaaaaggcaaaaataaattcaataagttgtacttcatcaaaattataacttttgttctgtaaaatacattgttaagtgaatgaaaagatgagctgtagatttggagaaaatattttaaaaaagcacacgtctgacaaggactcatattcagaacacttaagaatgctcaagccaacccaattaaaacaatcaattcaattcaaaaacaagaaaacaaaaccagtttcagaaatgagacaaagactcagacataaacttcagcaacgagggcacgcagcaggcagagcagcccagacaaggtactcaatactatgactcactaggggactacaaatcaaaaccacagtgagatcctgttacacacccattagaatgtctaaaataaaaaccacaaacactagtagtgccggcgaggatgtggagcaacaggactaacacatcgctgccaggaaagcaaaatggcacagctgcactggaaagcaatttgtttcttgtaagtttacacatatacttaccacgggaaccagcaatctcagccctggtatttctcctaaagacataaaagcttatgtccacacagacacccgtacacaaactgttataaaagctccagtcataataggcaaaacccagaagcaaactaaatgtcctttaacaggtgaacatgtaaacaaactatggtgcatccatacaatggagtactgttcagcaaaaaaaaaaaaaatactacactgtatacacacacaggtacacacacatatatctcctaatgttagcagaatttttttaatgtgtaatacagcattgtttactataggtaggatgttatgcatcgaatctctagaatttaatcatcttccatacccgaaattttacacaagctgaaaagcaactcctcatgtccctcttctcacctcccagtaacccccattctacattctgcttctatgagtttaactattttaggtactttatctcagtggaattatacagtatatgtctttttgtgactggcttgtctcacttagcacagcgtcttccaggttcatccatgttgcaaatggcaggatttccttcttttgcatggctggataatattccattgtgaggatagcctccatttcctttcatctctcaatggacatgaggttgtttccacatggctgtgtgggagcaagggggtttcttagccactggagcgtcccattgggatggggcactggtggtgacccctaagcagggatgtgccctaatggacttgcatctgatagggtctccaggccactatggccccatgcctgggtgaggttaagagttaaagagtagaaaacaggaggccagtgagggggcatttttgggcccatgggaaggtttctgaggagatggaagggctgcaggtataggttcccaatatgtccccaccccagttcaatttcaatgaccaagggagatagcagaggtaaagaaaacagataagagggggtcacctgacacctggtggacagaagctgacatccaagaggtgattccacccacctccctcctgagcttcctccttcctcaggtccagttaggcaggggacctggtcagtggtgcctagtcacctgccactgtgtgacctcagacaggagatttgtcctgggagcctccttcccttcatctataaaaggggaatggacacagcagcccagaaggcttcgaggaggaggaggacgtgagaaggtgtgctgaatcctgccctgctgagcatgtaggcctaaaattttacacacaaactgagtccctatgaggaaagggcaagccctctgccctctgcccttcctatgtctgcatatccagaactgcctcaggtggagagggcagagactagggagcacccatagatgctctgatgctggccacagcccttgggggtgacagtgatgaggacctgggtgcacatgtggtggagcagccaagaccagccagagaagagacacactcatgcacacacgtgttcacaacatacacattcacactcacacacaaacacattgaatgcatgcgtgttgacagttcaaggagtagaggacactggacctgggccctgctgacccaggcagggccccactctgatgggtgctgtaaccccagacgtcactgttgctgaacatctgcctgcctctgagttgtggagcagctggagacacacagtggtgtctgtgagtgtctctgtgtgcaggacccttttctaagtgagaggcacatctcagcacagctgactgatcattctcgggtaagtgtgacctgctgtctccccttcctgctgacatgggggcagatgctaccagatggcatcactggcctccggggcgctgtggagggtaatgtcgctgagctcccaccaggtgctttctcttcactgaccatgtattgcagccgtctcattcaccctcacactgacttcgtggaatgggtgctaatgtacccatttgaagatgagatgcctgaggtcagagcggaggcaactgacccagggacccagatgtgactctggactgtgatctcagccctgccttgtgctgtcctgcactcaactcctgacctctgcagccttcctgccttagatacaaaatctgctgaggattctggaccccagtgggggtagaacctggctctggaagagccacaggaatggggggccctgtgggtggggttagaggcatccctcagtccaagtctgtgcaagaaaaagttccccagaggcagggatcttatccattcagactttaagtgtgggctctgatggttactgtgggacccaccaggcactggagttttccagtttgggagcagagctgggagccctctgccctcgaatagttgtggaaaatgaagaaaccctggaggtctggccgaaaggtgacagtcattcctcctgttctctgaggcctggggacaggggtttaacctgcaaggccctctctctgacctgtcctccagacgtatcaccttccctttgtctcaggtattcccaggagagatggcccctctgggtgttctccagaacctgtccccaagagttcacttgttctttggtgacctgggaaaacaaagcctcttcctgtatcaactgctcaggactgtggaatctgccctccctccaccaaagggaggctgctttggagacaatagatcaagccttctccgaaccaaacatcctccttcttgactggtgttattcttcaaatggattcactggccacagtgagtaaagatttgagtggaacagaacactcatgagatttcttctttcctatagaaaactgggcatcttcatggtgtctgaacaatagcaggaggctgatcatatagagatttctggttcctggccctagtctgcctccaggtgtccattatagtcatcatggcccttcaccctgagcaggtagatgccgttcatcctgctgtggagtgtgtgcccatttcaggacatttagggacaacaagtcttgttgtctaggtctccttgttttaaagtcctcaggaaagggcccacctctggtcaggcccagggactccagaagtcctggcagaggtggggccatttggcttggtcccattgtcctgggggtgttggtgaaatgaagttcacccggctggcatctgggagcagatgtatggggtgttctctaaagctctcaggtgccatgtaattttgggagtattttgtcttatagggtggatatggacaaagacatggatatcctgctcgcccaggagtaaagggacatcattgccaagtataagcagacacaggtcaggctgctccctccagggaggcgggtctcacctctccctctgttccctggtctgatggtcctggactccttcgggatgcagggcaaggatgagctgcccacacgcccatacccaacaacttttattttggcctccctcaccctctctccctctgccttgcaggttgctgatccagggcaccagtggacacaggagatgaagatgtttacatctacaaggtcatcagtcagcttgagattccacagtgagtcagtcttctgtcctcccaaccaattgccaagaccagctcggtcgtggagaccctaacccagtggcgctagaggaattaaagacacagacacagaaatagagtgtagagtgggaatcaggggctgatagccttcagagctgagagccatgaatggagttagacccacatattaattgacagtaagccagtgataagcattgcttctatagattatatattagctaaaagcattccttatgggaaacaaagcattcttagcgaggagcagagaaacaggccctggctgatatctgcagcaaaagcatgttgttaaggcaaaaaagcatgttgttaaggaatccccctgcagatgtggagtcaggcatggtcactcctgctggacgttaagaaggtgaaggctgaaaacccaagtaagtaccaggtatggtccttccacactcagccacagcggaagaaacaggccaggccatgtcaggagcccgggtctctagctagaggaaaagtcaagcctgagtgatggtcagtcccatatcctaggcacagacgatggcatgggaaccacaagtgaactgggctctggtgaccctcagtggctttggaaataagatagagaaggatatttctgcaaaaaaaaaaaaaaaaaaaaaaatcttctttccttccagaagtgctgaatgattgctgtttgtggtagtgagccttttgtctgttatgaggctggttccttcctgaggaaccagccctttagccctgccctaaagaaaataaaggagcagggctcctatacagggctctcactgtaaagcaactgcgggagagtgagccccagggaaggaccagccccatcctcatccaccacaggttatcagtccaggtggccacttagggaagggaagagggtctttctatgggctcacactcaggagggcctaggatttgggagcagagggagcagaaaataaagcagcagggcaagatgtcctcagcgaaaataaaccagattgacctggacatgaagtgcaccttcagacaccatgtcatgttttgggagcactacagagtcaggtaaggcctatgggggatggagggtcccaggggagacggaggaattcagaggaataggggcatcccatgcaggagtccaagataggacgtgacagagccccccaagggctctcttggccagggagcagccagcatcacagagcatctactgagctccaaaccatgggccgagctggggcatgtgggtccagaacccaagtggctactgaggaaacaagcggtagcaaacacaatcatgctgcatggtgaaaagttctctctatgacccacaagtacctgaggtagagacccacaagaggggctcagacttcacaggcaacactgacaacaccaaacaccatagaggatgtggagccacaagaactctgtgcattgctgctgcaaaatgctgctgctgctgaatgcaaaatggtacagccgccttggaagacagttgggaattgctcacaaagctaaatgtacttgtaccacgtgaccacaagtgtcatagacgttgacctagctgacttgaaaatgtatgtacacctaaaacctacatgtcacattcactgccttattcattatcactaaaacctagaagctactgagatgaccttcaacacaggtcccaggggagatggaggaattcaggggaatgggcgcatcccatgaaatgaggttatacctgtttggtataataaaattacaggttaaatctataaatataaattataattatagattattaggttacatttatttggtataataaaattatacagtaggtattgtcaaatatgaaattaatatctaatgattgtattataccaaataaggcaaatatgtgtcttttggacttaaggggacctaatatcaaaaaaattaatgagtcaaaaggactgaatttagaatttaattttgaaaaaatcaaatatcaaaactttaaaacacctgctatcacaaaataggatcattggtcattggtcattgtaaaataagtcattcatttaaccaaagtgataactcaaagatttcaaaaaaaaaaagtcaaaagacaaaaccattactctttgagagaggagacttaattttccaaacaataagccctaataaagatagcatgaggccaatgaaatctgtttctcaaatcttataaacaaatctattaaattttaatgatcttcaccatactatataatttccaaaaacctttttgtaacattttataattttttaaatgaaaaagtgggttaatactccaagaaaaccttgttaatctgacacaggagctcagaggttagtcttgcatcagtgagcctttgatactaatctttacagagaaactgtaaccaagataaaaccaattttatctttcaaaataggctcttacaatcgcatgtacccacatcttccacaatagcccctggactttgaggggtaagatagtttcaatttctggccctgtgtttcatgagtgcagtttcttttgattatcatcttctcctggttctgaagatacggttttagaagctttcagtgtttaagatttagcaggacttggtgtcctttttagatacaggagtcaaagccctgtaactcaacagaacaaggactttaaaagcaatacagaacattgtatggatgttaataactttaattttttaaatctcagttttcctaggcaaataaaaaacttaatgacataggaattgtttcaataaaatataaaatctgtttgttaggccagttaccaaaaggcaaaaaataaataaaagacctgcagcaattgcttttccctagacttcaagtcaaaactaatgaaaatggtacttgaattagttagatataggaagggtgtgtcttgcatcataagtgaaaattttcagtttcatagaaaaacttcaaaccaagagcacagaatgttatattggaagaaaatatttcctttagacctttaagataaaacacttttagcatcatgtcacagtagcagttagaacctgaggaaaaaaaattatagaaactgacaagaaagttggagagagcgattatctcaggacttatgaaggggagagaaaggtgaaaacagtgagattcaataaaagttgaaatctggggtaaaaaaattaaaatatcttgtaatttgttaagagtaaattaatatcttaagaaaattttgttcttctagcccattcttgagtggattagcatatttttaatatacagtaagtgcaaaagcacagtctctagaaagactaatttccttttaattatagccaacttgatcaaataaattcttttctcataaagtctctttttacaaaccttactatgacttacacaagccacttatgacatgcctagacttcctgttttatcctaaacagccttctttcctaaataaccaatcattttatcttctttttcttttttttaagatttctttgttgttgctgctgttgttgctgctgttgtttccttgagacaaggtctctctctctgtgtcacccaggctggggtgtagtggcatgatcacagctcactgcagccttgacccacccaggctcaagcaatcctcccatttcaacctcccaggtagctgggactatagatgtgcaccagcatactcagttaattttctgtgttttttgtatagacagggttttaccatgttgcccaggctggtctggaactcccaggctcaagcaatctgctcacctcagccttacaaagtgctaggattacatgcatgagctatttgcatccagccattttattttagaacaaacatttaccatgcaagatttttttctcatataaaattttccttttaacctttcttaccaaaaatatctctttatatttttaactgtctttatatcgctcttatttagtggttccttttatcttgtttcataacctttaaataacctttgaattcaacaaaaattattttcctttaaataagaacatattcttagcaaaatgtttttctgtaatttttttaattgtgaatgacccagacatttaataaatgcctgttatgtaatataactttagattctaaattatattatgcttatttacaagcattccttccattacatttacctaagttatttttaatagtttacctagattacttatgaaaactgtgataatcaacatttaaaggtattttcctgttaatcatttatatagcctgtgaatttcaggtgtttacctaagtaagaagcttaaggttaaacaaatgagtttttcgccaataactcaggataaatgacttatttatcaaaaaaaattacacaaggataattatcttttgagttacatttataattttataaccgtcatgccaaattttgacaccttatgtatattagcatttaatcaagctgacttttaaccactgagctttaaaaatcctttaaaatctcattgctgtaaccgagtacacccattttcctgagacatcaattattattttttttctttccttttcttgttccttcagttccccactccctacttaggcttttaggaatgcaaatatagccttttacctccccattaccggactctccctacagtgcaagttcatctaactacacgctcaaactggaaagtcaacttgagaattaacagttgatttataaaccaatcatgcccactgtggaactctcactctttaggaggttgtctcaagagataacagcctgcccatgaaggtgccagcagtcacaagctgattgccccgtagataaggcacaagagctagcatggaccccccgccaccacccttgctcacttcctcccctgctttttaaaagtgaagccatatggaggacacctgcatttcttcccctaagctagttttggaaataaattactttctttataccagacttcacttttgttaattggactctgcaagcaacaagcgactaacctgcattttggttacattaccatgttttaggtgggacaaacttctaatatttcaaatgtaacacaaatatcaaaccagtaaagactttatttaggaaccaaacccaggctgccatggtggaaaaagggcagaaccttagctactgaactacagcatggggcaaccactattgctatttcagtttggcttggctagcaaagggttgttttgttatgtaaataaagcccttcaggtaattgaaatctttcttgtttcgatggctgatttttcttttttttctctttgtttttccagcttcaggaatttagccagttcagaggtcttgttccccataatttagaactttccttcaggtttgaccaagtcaactagagtggtcaaacccaatggaaaaaagactaaaacaacaaaaacggaaccaaacaaataaacaacaacaaaaaagtaaagcaaaacaaatgattgcacaatttataagattactgagcactctaatggtaaggaggaatcaagaccagctggtagttaatcttaactttcagagaatttccaagacaaaccccatttcagctacttatgtaggaataaggcccaggttgaagattgctctctatcatcctagaagcaggaaaaaactcaaaactcatcttccctgttggaagcaagctgaaactctggaaaggagttgcctgctttccattatcatggattcagaaaaactcatctttttggatgcaagtaaaactctagaaaaggagttgaacagcaaaataaaccttagatctcaacaacattttgagaaatcagggattctctggagatgatacctcccaggcctcagcaaatcgtcctgttggttttgttactggcagcaaatccatatgggtctgcagcaatctcaattcttgccttctcagaagaaagaattcgactgaggggcatacggcagagtgaaagattgaggcaagttttagagccaagagtgaaaatttattaaaaagctttagagcaggaactgaagaaagtaaagtccacttgaaagagggccgagtgggtgacttgagagatcaagttcatggtttgatctttgacttggggtttcatacattggcatgcctcttggggcgggggagtggtttgcatctcttctcccttgatttttcccttggggtgggctgtccacgtgcacagtggcctgccagcacttggaaggggcaacatacacattgtgtttaccaaaattgtacacatgctcacttaaggcattcttcccttaccagccgagtgttcctggagaaaggttatatactggttcaactctgccattttgcctgttagtgcacatgcttaagtccactagcccacctcctgagatcttattgggaagctgctgattaccaacttgaggtgtttctattgggaggctgcctttccctggcaccggctgcagccaattattattttcaagaggcagtttaacaacttcctgaccaccatctgatggttgcctgacattcctgggcgagggtccctctcctgacctattcatgtctgactaattacctattgtaacagtttgaacaataaagatagctcaaggccagacatggtggttcatgcctgtaatccccgctctttgggaggccttgcaaggccagaggatttcttgagcccaggagttcaagaccagcctgggcaacaaggcaaaaccctgtctctatgaaaattacaaaaattagcccggtgtggtggcacaagcctgtagtcccagctactcaggaggctgaggtggaaggatcacctgagcccgggaggtggaggctacagtgagcagggatcgtgccactgcacttcaacctgggtgacagagtgaaacactgtctcaaaattaaaacagataaaataaaaatatagctcatactggtaccatgcacaagtagatttgtcaaaggtcagggccaccttcactcagagtctcttccgttggttgccaacttgtaaacgaaaaagtatgtcagataggtctcaatcagtttagaattttcattttgccaaggttaaggacgcacccaggaaacaggtatatgtacctttctcaaagatgattgtgagggcttcaatatttaaaggtgagaagtgggctagatgggaaagagggtgtggttatccacatgttgcaagagaaaaggagtaggcaggaaaacagtcaattatggattcatctcacactcagtaataggccctttacataaggtgaacataagactagctacttgaggagctatttaaccttctatctgtagctatctgctgaggaacaaaaggaaagacagttttttgcatgactcagctttcagcttaattttttccatttggcatagtgaattggagtcctgagttttattttcctttcccacctcaaaccccacaagctttgcgttgttgcagattgtccctctcagaatattttacaagatggtgaagtgcctaatgaacatttcttttgtcataaagtgagtttggatcctgaagaagccatcatcttaatcaggctttgggatcaaagttccccttcacccgaaccctgaacagcacagcagacagggaaggacttactgagatggctgctcccactctccagcccccactttcctgaccattcctggcaggaagagctgctgagcagactccatgggctgcccacacagggtctggacctagctgtcttcctgtgcccagcagcctgtgagccatcccagtcccctatgtgcagtggtcagcacccacaagccagccttcatagggattcagttcatgggtgttgccctgagcctggcacagtggcctccccagcttagcatctgcagttcgggtcagggtgttcttaacggccctcacctatgccttttctggccacacatgagtttggatgaagcaggagtctcttccatagctccttttcatctgagatgtccatgactggctcaagtgaaccacagtgtcaggagaggggcacggaagctgcaccctaaattccccgggacctgtggcaggccttcctggtgacctctgccttctcaggtgacttctgccctcctgggtgacattagttctcccctctcaagtgatctgtgccctcctaggttacctcagctctcccaggtgacctctgcctttccagatgacttcagtcttttcaggtgacctcagccctcctaagtgacattagtcctccctggttatctctgccctccctggtgaactcaggtcttccaggggacctctgctttcccagatgatctctgccttctcaggtgacattagtcctcctaggggatattaactctcccaagtgacctcttcccttccaagtgacctgtttcctcaggtgacctcagctctgccaggggacttctgcctttccaggtaacctctgccctcttggtgacatagtgtgctcaggtgacattagccctctcaggtgacctcaaccctccaaggtgacgtcagccttggtgaagtctttccatgatgactttggcttttgccagaggtaggctactgcgggggcataagccatatcatgccatgagccactatcctgctcatgttccagaatgaggagacatctgggtgctggcccagctgctggccaatgagaggcttgccaagcatggtactctccaaggtgacctctgccctctcaggtgacacagtcctcccatgtgacattagctcacagtggacagctacccacgaggcatcacacagccaggacaggggacggccacactggctgggtaattgtgacttacagacaaggcaccttctgtcccctgctcattttgagcctccagggtatcccctgctgagagtcccacaggagcctgtgactggccagggacctgacaccccaagtcagatgcctcttgtccccatcagcaaatgggatcacagctgccctgtgaccaccttctgcatcctggtgtcacaaccttctggccctgaccttatgcaggggactcttacaaccctgctggtccttccacctcccagctggccaccctcccaaccaccctccctgcccatggctagaccaagcccagatgacagcttctctctgtcctgtgtcccctgccctgaccccacatccaggagaaggccacacaccctccagcacccctggtcaccccaccagctcccacctgtcctcactgcttcaaaggcaggcctgcccttctggagccatggccctggaagccactaagcagtgcctccagccaggccccaggggcattcccacccctcctctcctggccgagaccacatgatggggtcactggatgggacagtgaaaggccttggggtctggaagcaaccaccactgcccaactgccactgcccaaccgctgctgcccaactgccactgcccaactgccactgcccagcctgatggctccacatctcaggagtaggctctgattccttggggccccaggagcctctcaggagtctacatcccaagatgttctaacttccagagtctccaagcccatcaagagcaagttttgctaaaagtgttctgagagcttatgaagcacatggtgagtggtcagtccctcagctcttccccagaggccctgggtcccatggggttagcagggacaggggaagcctggggctggtgagaggccaacttccagccagggcttgatctggttttcaatggattcaaagtttggcctccttttccttacctggaggggacagaggcactgggaccaggccaagctctggctgagccagggctaggggaagtacatccactgggggcccatgccatggggaggtgttggggcacagccaccactgttctacctcttggggaagggtctgcagtggggtctggaatacagaggttttcacggaagcccaggggaccctgaacacttctattccttctatcaggacaaggaagggttgtgcatccggctttccaccttaaactggtttctatggtgcttcatcgatgagataaggatgcataggagaccccaggccaggtacctcctttccccacagtgctcagctcccccagcccaggggtctggcttccccaggaggacccagctcacccccaccccacaggaggcacaggcaggtctctgcagggcacacaagccaggacctgtatgatgggagctttacacaccagacaccagggaattctgggcagactgggccaagacccatcttggaagagccaaaggagccagggaagccacaagccctcaggaagccccttattctgggaaccacatttctgctgagatgagtccatccctatgaagagctgccggaccttgtctgacccagccttatggaagattgggtgggtctcttcccaagcagagggagcctcaggaagtccagactgaggctacagtgggccctgctcaagccaccagccccgaggttggaaaggccaggtcctcccacacctgctgttcccacagacttccttcatgctcatcctgtggctctgggatgtctacctactgggaggtgagtgtgtggtgacaactatggtatacatggccttcacagccacagaattaagtccctgggtggccaatggtgcccagaaggagcatgcaggacagaccctgggacctatagccaggacagattcctggcttctggtgtgtgatgacctgagagcagcatccacactgtccacatggctctctgctccagcctggaggtagggccagaccaggcctggtgggctgggcagggagtggacccaggtaccaaacccactcctgacacaacccagatgaaaggcaagagtgtgttgagcacttccctgcccaggccttcctccagctgtggttttctgtgaacatctggacccctggggcagccacagtaggatccagcaccgcccagtggtgggtgcctggggcaggaacaaggtgcagacactgactctcccacagacccctcccagcctcatagtcaccctgtccctagaacaccccctgaagctgttcctgtttggcttgcaggagttccttcaggacacactgtcctaggcctgggccctggaggaggacatggtgatgaggcaccctgaggcctccatgggggaactgagaagcatgcactgtgacctgcacacccaggtgggcttcagcaccaagtctcctcctgtgtcaccctgcggggcagtaaatagtgggaagtgcccagacctcaccagccctgctccctgggccttcctccagcccctcctctccctcctcctctaagaagcttctgaaaccaggctgcctgagcctagggcaaaagctgaccttgggtttactggacatgcctcagagacaatgagacgtgagcaagactcttccaagcccctcccctgtaccctcctgctctcactcctgaaagccccagaaggacactggaggggtcagatccatctgtgcaagcccacaaccacacctgtgagtaccagcagccctggagagcagcagggggtcttcactcctgagcacccctccaagggcctaaaatcagtgtcagagaccctaagagaatctagggagagggcataggtgaaaccctggcccagagccagaattgattgctcagccgagtgtgggaacagtccagccctggcatggagatcccccagaggagtggagggtgtctcatccactgtggagataagcccccatattgtgtggcaaaggggctaggtaacagttaaggccccatccatctgagctctgaatcaaggctaaagcccaggctaagcagccctggggcaagagtgtgaggcaggaagactgagtcagcctgaaccctgggggctgtccctggagtgacttgagcttccctgacagcttccccactctaggctgcacacacacctcgctctgggagtagcagcctgcaggagtgtcctcagcattagaccagggggaccacacggggaccctgaggactgcagggacccaggtctgtggggtccagcctggcaaaagcaagatgttctcaatggaaaagctgaccaaatctgctttcctttcagccaaacctgagcaagcacccccaccacccaggcctctgcagatatcccccagcattgagaccctccccaaggggatgggctgcttctccctggcccacagcccagctccagcagcccatgggtatagccctcctgaaacaggagcctcatcctccctcaccctcacctggctatgctgtacccaaggccaaagcccagaggcataagggagcttctgcagagcccaggacagcaggctgctctctgggggccctggggactcagagtgtggccagcccatccccagctcaggatagaccacagagtgcttggtgattcctgcattggaactccctctctaagctccccatggacctggacctcagaggcctgtggttttcacagtagagcttggagcagagatgctaggcccctatcacttccatatgtgccctggacacctctaagatcataggactggcctagcccccaataccagacactgcccagccccctgatagcccagaggtagggccagagacaactctcctgcatgtgatgcctacagctgatcacccttggcagacagtgaacatcacggcccagaaggagccagggcagcacttggcaagctgccccaaagccccagagagctccttagacatggaaagtcaatactgatggggaagctggacacttggaggccactggagggaggggtgagcatggtgtccccacagcccaggccacccagcagcatgccctgcatccatggtcccaacctgtagggcagaacccccctctcaacgcacaattcctagacccagagggccctagcccagactcaacctgagccctgaaagggaaggggcaccaggggtgccttggggcctccagcagcagccaagatacacaggagatggagccccctgtggccctggccagaactagtatttggcttaaggcggagcaagcccccttggagcactgcgtacatacccggggcctatgtgtgcctggcaaggccaagctgatgatgttaccaagctcaaactaccactggccaccttggtgagggtggggcagaaacacgtggaccagccaccaacctcatccattcaaggaagcagaaatggtcaggctcctgcaggataagtggccaccaccagaccaccaatggggcagagttctgaggcccaaggagatggcactggggccctgcttccagggtccacaatctgctccaggacacaagactgaagaaaactaagcaaatgagagtccaggaggctggatccctcatctgccattcttggcagttgcattttgtggtcagaaaaagtcaggaaacttggctctactcactgcaggaggctccaaggtgggaccagagcttccagcatagattcaacaatgcctaagaatgcctcttcttggggaaaaggaccccttccttggcctcaaagcccccacttattttgattaaagcacaataaagtctttgttgttatgtcctgcctgtttttgagttgcccagagctctctgcaggaagccctggacatactggggtggatgggaaatgaagatggcacagcccagaccctgaccagcctctcacagcctccccatcccaaaggccgcagcagggccaagcaccagaaaggccaaggttcccacacaactgtgagccacactgcactgcagcctcccactctcaggcagatgccagggttaagaccctccagtaatttcctgtaattcaaactgcacctgatagggacccccagagggctgggaagggagcaaaagttggagttccagtgacattgctcattcatgacagtctgtacaaagcatccctgagagggtctgctgtcacctgtgtctactgtccctgggtggctggtctccggcagccctcccttcctttcttccctccttccctccccacatccctccctccctctcttccttcttctcttgcttccctcatcctttccatctcatctcctctcagcatctggcaatcccaggtcctgagcctgtgccaaggcgggacacaaaggacaccactgacaacaaggcagatgactagcggggtcggggagccttgtggaatcagagtggatggggaggggctcatctgtgcagcccaggactgctgccccgggaacagtctagaacagtgcagaagtgtgtgtccctgtgtgtgcacatgtgcacgtgtatgtgtatgtgtgtgcgtgcctgtgcacacctgtttactcagttctgctctaagtccatgtccacgaccccagaagatcccaggtatgtcctcactgacgtctgctgaaatcaagcatggcccctgctggtagttattgcactgtgtaatgccatcgtcgggacctcagagcaatagaaaccagtggacccctttaggcttttctttccaatgggacataaagaagttatatggacagaagttatatcctgttttctttccattgattcttttaccacctttctcctcttactgattttgaatgaagggggtttttcatgagggtaaggtaactggcaagaaatgaaataacagccagatgcagtggctcacgcctgtaatcccaagattttcggaggccaaggagggtgggttgcctgagtccagaagttcaagaccagcctagacaacatggtgaaagcccatttctaccaaaacaaaaaaattagccaggtgtggtggcacgcgcctgtagttccagctactggtggggctgaggtgggagaatggcttaagcctggaagtcagagagtggagattgcagtgagctgagatcacgccattgcactgcagcctgggcagcagagcaagaacctgtctcaaaaaaagaaaaaaagaaaaggaaagaaatgagataccgagaaactagcaaagcttcacctggctgtctggagacagcccttgtgtggtccccagcccacctcacaggttctaggctggccaccctgtggcctctgtactgtgtatctggacccaggctctgtgggaagggtacctggtctgacaaacattcctccatttttctggctgcagcttggaataggcccagacagcatgtccaggagatgccagacaacctcactatatcctgtgagacaggcccagtgggccttgaaggaaggggtgagcatgaagctgggcacccagagcctgagaccaactgtccctccctgtgccctggaggaggggcctggcctgtcagtgtagatgtggggagagaagggtctgtggacccaggaagggacattggtaggggactttgagcaccactgctcaggggacatgaatgacagggtgggaggcatctcccatttctgccctgagcacagcacccctttgactcctgagggccacgaggagtccactccccagagctttttgtagaacctgcatatgagtccatcagaggtgagatttgcaaatacttcctccagcctggggcttgtcttttcattctcctcacagggtctttcagagtgcacacatcattttgatgaagtccaattgatcatttttttttccttttatgcatcatgcttttggtgcttatctaacaaatatttctctaatccaaagtcacactaatatctacctttttccttatgcaaattttaaagttttaggccttacattttggtttatgatacattttgaataatggtgccatgtatggactgaagtttttaatatgcatatctaattgttctaatagtatttgttgctaagattgtcttttctccactgaatttgctgtacaacttttgaaaaacaattgaacacatatgtgatggtctattctggactctgtattctgttctattgatccatttgtctagcctcttaccaataccataccgtctgaatttctgaacctttacgataggtcttgaagttaggtattgttagccatcttacttaattcttcttttttagagggttttttatttctaatctaggtccactgcattgccacacacagaaacccgtgcccttgagcatacatacatatgcaacacaagtataaatatatgcacagaacgacaaagtgaaatttatcccaagaatgcaaggctgcttcaacgttaaaaatgggccagtataactcaccatattaacagatgaaaagacaacagcacatcattatttcagtatatttggaaaaagcattagacaaaatccatcaaccttataaaaacttccagtctatttctattcctaaaaactaggaatagaagtgaattttcttaaactgataaaaggcacctacaaaaaccctgtagttgatgtttactggacgttattcttaatgatgaaagactggatagtttcaccccagaggaagaactaggtgaggatgtcagctctcactacttgtattcagcatcctatggagagtctagcagtgcaaagggctccttcctttagtagactcagatttccatctggagtcattattctcctgctagatggatgtcctttaccatttctcaatctgtacatctcctggtgatgatttctttcatcttttgtcaatctgaaaacctctttattctgcctttttattggaaaacaaaattttgactgtgtaaagaattctaggttggcatttttttctttaaaaaaaatactttcatacaacttgcaattttccaacaagaaatctgctttgtatctttgattctctgtacatatatgtctttttcttctctatctagctgcttgtaggaggactcagcttctcgcagatagacatgtatgataaagatgcagtaactacatcaagtgtggtattgtccatggatggataaatagactgatggaatagagcagagggcccacagacagacccacaagagtccaactgtgattgatcaccaaggaggagcgtgatggtgaaggactgtgcttgttataatgtgctggggcctttggataaccactgactaagtgggccaagtggccttttggcttaggctgaagcaggataataataacgttatctattcatagaattgttaaaattacctggttttatatttgcaaagtaattagagcagtattgagacaaagggaatcttcagtgaacatttcctctagtcatagttttttccaccacttgacttcctgccctattcagagtcttatgtttgccaggactcaagcacctccttatggggcagactccacagggcatgatatggtttggatctatgttccccacccaaatctcatgtccatttgtaatttccagtattggaggtcgggcctggtgggaggtgattgaatcatggaggcagattttcccctctgtgctgctctcattatagtgagtgagtgctcaccagatctgattgtttcaaagtgtatagcacctctcccattgctctattcctgctgttcctgccatgtgaagacgtacctgcttccccttcaccttctgccatgattgtaagtttcctgaggcctccccagccatgcttcctgtacagcctgtcaaactgtcagccaattaatcctcttttctttataaattacccagtctcagatatttctttatagcagtgtgagaatggaccaatacagggcatcatggtcagtcctggggaacagcttcctggagtgggaggagctcagtcctggtaacctgctgttcccttgcctgaaaccccttgtttcctccaccttccatctcattcaacaaagctcttgggagaacaactttaaggactccctatgcctcttccttcaaaggtagccagccaagaagtagatggctggttgagccatactgactaccatggacagcagcaacagaaggtcaaaggcaaaggtcaggtattcttttcctggcaggtacacaaggacaactaagggcaggccccaaaccaggaagctgatggccacaaagcggacaatgtggtagatccggatgggtgaacagttcttcaggcagtacaggctcctgatgatcaaagtcaggctggaaatgcccaccacaagacaaataagcatgtgaaatattataaagcctgcctgaaattggtcacatgccaggcccttctcccattactcacaaacctggctaaccacatgcaaagaaagggccagggcccagctcaggatgctcatcacagcagaggtgtgctttgggcggtggcagcaccaggtgggacagaggacacacagaaagctctcaatattcatggccaccaggagacagagactcactgtgtcagagaaataggacacaggctccagaaacatggccacctgcaatgtcacctggtgatacagcatgaggattttctccaacaggatcacagttacacaggagaggttgaccatatcagcagcggccaggttaaggacataggtcacgtaggggctgctcctgacctggaagcagaaaagccagcagaccacaccattgcccaccagcccacagaaggccaccagcactgtcaggatgaaaaccacctgtttgcccaccaaccactcgcctcccgtatgactcatgttcacttgtcctggggtctctgtcctgttgtcccaatccagcttcccagagaacactgagagaaactgggccatggtgggctgccttggctgcctgggcacaccctgcaaagacaaaggttggtaacttaccaggcctaggaaggagagtcagggttgccttctgacctgctgggcttcccaagagggtcctgctgggcctcccaagattggtgggaatctcacagagcaaagtcaaggagaggaatgagtctcctgcaagtgatccatccatcccatatcctccactgcagggtaccctctcctgcttgcccccatccctctctccacctcgttcaggtattcttgatgctgtgcccaacaccaggtgtgtatccatgcacctaggtgcccataaaggaaagaggtgcatttctttacctttgttctccaactctctcattgacacagacagttttcatggcatggttttggtggaggcaccaggcaattcctctgccctaaggttctgagatattctgagtcccacatggggcagttgcttttcagtgctctagggaaggtctacccaacctctctcctgctcacctcccctcaactcctcactttcagcacgagggcctcctggtaggacctttatgttgttctgctgcctggaagggcctctgcacatctgtaagctttgtatcctctttccaatctttgccccagtatcaacttccagagaagcttctgcttcctattaacattgcattcatcacatgctgagtgtctatgcaacttacttacttctgcagaaatccctctgtgggaatggaagatttatcaggttttttattctcttcacaatgttgttcaataacttctccagctcctggaacagggtttgacatagaggactcacttgggtatggcacctatggagagctttatgcagctcagttacacttggggaagtgctggtgacctcttcataaaagcaaactttgcttctgaatcacagaagcttctggaacaaagcttgttctgcaaactgatttaaaaaaaaaggcttcttggactcctgagggagactcacacctgaaccctgggctacgtccacaacaggagcaggcactctcctccacattgccaatcacaggtctttctttgtagaatcatgaggggagggtgaccaacttatcctgctttgcctaggactttcccagtttaagctctgaacatctcttgtcctgaaaatcctcatagccctaggaaaaccaaggtggtttgttgcccaacttgaaagttaaacaggagaaggtcagtaccccttctggaatcccacagcttggttaaacccagtgatctgaggagttcatgctgagactgtgagagctgacctcttgggggcaaatcccagctctttttcatagtagctgactctttctttgcctcagcatccccatctaagtaagggctgctgctatgggatgaattgtattcttctaaattcatatgttgaactatcccagtacctcagaatgtgactgaatttggagacagggacattaaaggggtaattatgtttagatgggtcattagggtaggccctaatccaataggggtagtgtcttcataagtaaaggagattaggacacagacacccacagggggatgaccatgagaagacacagggagaaggcagccatctacaagctaaggagagaggctttggaaagaaatgatcccggcaatctttggatctcagactttcagcctcctaaaactgagagaatgaacttctgctgtttaagccactcagtctgtgatctctgtcatgggagcctgaactgatgatcacatttatgatgaaaagtttacagacggaattatggaaagtctcagaacagtgagatctacctggttctacaaccctgagctgctgaagctttgcttctgaatcacagaagcttctagaacagagcttgttccacaaactaactgataaatgcctgcgatatgcctggaaatattccacaggtgaccttgtggcctgcagtcacatattggtgcatcagcagggtttaggagaatgctagggaccagctccaagtgagcccagtgtttgaatcttccctccttgctgggatgatggagtccccttcagttggcagctctcttgaaatggaagggtccagccccagcccctcccctccctgcacttgttacctagacactcttacctgaggccagggaggaccgcagatctggctcagatctaatctggtcataggatgagtcttggggcttggtaacattggtgcccatggaaacatcagggtgacctgcagttctgtgcctgggccagggtgtcagaactcgtgatgatgacagaagagaagctgcaaacagacctccgtggcccaccccaggccaccaaggcaccaagcaggagcagttgggctctggtccccaacaaagaaaggagatttatagataaaagagtttcaaggggagaggtgacttacccttcaacaaagagaaaatgcccattttggaggcagcatgtggcttcagggacagagccaggcttcccatccctgggctcactgagacctagctcatgcccagagaccactactgaggccagtgactaagcagcacattcttcctcatcacacaagaggaggacacagccctcctggggtgggaaggcttcagtgcctggtgcagccccagcactgggcacagagagatcctagcacctggaaatgtcatttccaagtcgggtcatgagccaagctccccaaggagcataaacaacaaacaggttggatcctgggattcagggagccagctctgatggaagtgctcaggttgatgcagccaaaatagccaagtaacctttgcattgggattgaagtacttgctctggttctgagttgagagcccaccctccccacttaatctttatttgaggtgaaatttacataacacaaattaactaatttaaagggcacagttctgcctcacttagcaccttcacaatgttgtgcaaccaccacctctatctggttccaaaatatttacatacccccataagaaagccttttacctgttagcagttactccccttgtcttcctcctcccagctcttggcaaccccatctaccttccatttctgcacattcacctattctggacatgtcctattagtggaatcagaccctctgtgattttttgtctgtttctttcactcagcctcttgttttcatggcttcttcacagggtagcatgcataagaacttcattccttgcgttagatacaaactaaatatgaatatagaagctgtgaaatcagaagacccaaaaggattttcctagaagtcatagactacacctcagtaatacagtggctcaaatcctacctttaacagaataacacaccctctgcccatctacacagctggggcatttgtgaaccaggggccagagcacagttgtggctcacctgctgggactaccctggaaccccgaatcctgctttctccaggaacctggtttctgtcctgtccccattttcctgagaaatgcaccttccccagtaaaaaatcatgaggtttcaaattccaggaaaatatgtctctgagttaaaatggtttgaaaatgaaagaaggaagagagatcttttctcatacctgggaagtcttggatagaattggtaccacagaggccaatgtcctgagagatgaaagttctgcccacaggtcaggaagcaatctaacgatgtctgatttgaactgggtcctgacaagaggttgtcaatttctctgtgtctgttgggtcttcctgtactggggcaaattgcatatcagggcccaggcctttatctgaaacattgtatctcagcatctcctgatatcccccatcccactgacacttttaattactccatcctgaacaataacttccctcaaaaaagaaggatctttaagacaagttgtcacctgcctccctgtgtgaatctcctagaatgacatccagcccagcccagcccatctgagacaggcaggagagggaactctggtgggcattttgtcaataaacttgagcatgccaggaactcaaatgtgctcctttcattttgctgtcaattgaattgcatttttttttttttgcaaaagatgtggaagttcttgtaaatctgtgtcagaaacttacattggattcaccaagcctagggagatttggctgtgctttgttggagccaatatttttcaccctggtttaccccaccactgacttgctttcttttttttttttttgagacggagtttcactcttgttgcctaggctgcagtgcaatggtgcaatctcggctcgctgcaacctcagcctcctgggttcaaacgattctcctgcctcagcctcctgagtagctgggattacaggcatgcaccacaacacctggctaattttgtatttttaatagagacagggtttctccatgttggtcagactggtctcaaactcccaacctcaggtgatccgcccaccttggcctcccaaagtgctgggattacaggggtgagccactgtacccggccttgacttgcttttatgaggcaagaaaagacatgtctccttgttgcactaatttcgatcaatcaataagtcaattagttcattttcattacatctctctgaatcaattgagagataaattgagaagtcaaaacaatgcccaacaacatagcatctttattcctccctcccctaatgacctgggaagcagtttgtgaccccaaagcacttgcttatatgttattctctccaggaattgaatttactcctcaaagtaataggcacaggcacccatggtcaacacctgtctcctgaagcttatcacttaatggagggaacccaggagtatgattcctccatgcagacagtcagattccaaggagaaaggaggaaaagtccttcaaatgccacattcagccccttcttctggatgccccactcagcaaagtcacttgtggctgatgctggtcagagaagcccttccaaatgggaacatgggtgtaggaaatatgtgcttctcacactcccaaaggatcacaaatggggccctgtgtctcttaacttccttatgtacaaaagtacatactcactagaatatgattttacaacatttccatcattcctatacaatgtgttgggaagtgatcctttctgatctatattttggaagagtttgtatagaattgtattatttttttctttaaatgtttggtagaattcaccagtagagacatctgggcctgggccttttttgtgggaagatatgcaatgacagttttaatgtctttacttcttgtaggcttatacagattttctatttcctcttgagtcaattttggtaattagtttttctagaaatttatccatttcatcgaaggtgtctagtatgttaggataaagttgttcataggatttctttataatcctttaaatttctataaagttggtaatgatgtgcccaatttcatttctgattttaggaatttgaggccatttttttttcttggtaagtctagctaaaggtttgtcaattgtgttgttattttccatgattcaacttttggtttcattacttttctctatagtgttttattttctattccatctactcttgctctcttctttattatttcctttcttctgcttgctttggggttagttttctcttcttttccttgcttcttaccatagaaagttgaattactgattagaggtatttttcttttccaatgtaggcatttacagctacagattttcctctaagcactggtttatctccatctcataaatgttgacatgttatggtttcatttcatttcatgcatattctttttaatttcccctgtgtttttttttctttcacctgttatttgtggattcctgaagtttccaactgttggtgattactcattcaattccattgtggttggaatacatatattgtattagttcaatttttttttaatttatagataatttgtgccctcccatctagtctatcctggagaatgttccatatgtgtttcaaaagcgtgtataattcatttgttgttgtcaagtaggtcaagttggttgataatgtttcaggctctgtatccttgctgattttctatctagttgttccatcaatgattgataatggagtgttgaaatcttcaactatttttaatgatttgtttatttatcccctcaattctgtcattttcatgttttatgtatttgggggatgtgttgctaattgtgtgtatgtttataatcctcatatcctcctgataaattgaaattttatcattatagaatatgcctctttatttctagtaacgctatttttctcaaggtctactttgtccaatattagtagagctgtctcagctctttcatcatagttttctacatggtatacttttttccaccctctttttttaacctattcattttaaaatcaaaactgcctctggtagactgcatataccagacattggacatactaggtgaacatattagacgaacaattttaaacacgttcaaagaactaaaggaaaccatgtcaaaagaactaaaggaatgcatgagaatgatatctcaccaaatacaaaacatcaataatgagatggaatgttaaaaaagaaacaaggccgggcgcggtggctcacgcctgtaatcccagcactttgggaggccgaggcaggcggatcacgagctcaggagatcgagaccatcccagctaaaacggtgaaaccccgtctctactaaaaatacaaaaaattagccgggcgtagtggcgggcgcctgtagtcccagctacttgggaggctgaggcaggagaatggcgtgaacccgggaggcggagcttgcagtgagccgagatcccgccactgcactccagcctgggcgacagagcgagactctgtctcaaaaaaaaaaaaaaaaaaaaaaaaaaaaaaaaaaaaaaagaaacaaataaaattcagtaattgataaataaaatcgtagaaataaaaacttcactagatagcctcaataacagatttgagaaggcagaagaaagaatcagtaaatttaaagataggtggggaaattatccagtatgaggaacatgaattaaaaagaagaagaatgaacagagtttcggagacctgtgggacacaatccagtgtaccaaaacacataaacgagaattttcaggagaggatagaataaaaggaacagaaggaatatttaaagaaatactagctgaaaaactccaaattcaatgaaaaaatgttaatctacactttcacaaagctcaacaaacttagataaaataaattcaaagagattcacacatagaaacattataatcaaactgccaagaagcaaagaaagaatcttgagggcaaaaagagggaagcaacttatcatgtacaagagattctcagtaagaataagaactaatttctcatgaaaaattacagagtcaggaggcaatgggatgacatattcaaagtagcaaaagtaaaatactgtcaatgaacaattctaaagccagcaaaactattcttcataaatgaactagaaattaaacattctcagattttgaaaactgagagaagctgtaattaccagacctgtcttatgggaaattataaaagcagtcttgcaggttgacatgaaaggacactacatagcaactcgaatccacatgaagaaatgaagaactccagtaaagataactacatgggtaaatataaaagacagtataaatgcaatttgtttgcgatttcctctctcatatgatttaaaagacaaatacataatgaaataattataaatctgtattgataagcctacaatgtataaagatgtaatttgtacggcaataaaaacacaaagaagcagaagagaatggagctgtatggaagcaaaggttttgtgtgctattgaaattaaattgctattaatctgactaaattgttataaattattaattgcaagatccagggcaatatttaaaaaatacctcaaaaagtatagtaaaagaaacaacaaggagaattaagtaaaacactaacaaaatttatttaacatacaaaggcagtaataatggaatagagcaataaaaaacacgatataaagaaaataagtagcaaaatgacaggtcaaaatcctatactatcagtaattacattaaatgtaaatatattaaacaccccctttaaatggcagagacatgaaaaaaaaaaagaaatcctgtcattcatggcaacatggatgaacctggaagacaccatgttaactgaaataagcaggcacagaaagataaagactgtgtgttctcactcacatatggaagctaaaaaatgttgagctcattagaaatagagagtggaattttgattattagagcacaggaaggatcgaagggaggagagagggaaggataggaagagattggttcatggatacaaaattacagctagataccaggggaggaggctggcaagatggtggaataggaatagctctggtctgcacctcccagcaagattgacccagaaggtggatgatttctgcatttccaactgaggtacccagttcatcttattgggactggttggacagcgggtgcagcccatggagggtgtgccaaagcagggtggggcatcgcctcacccggggagcacaagaggtcaaggaactccctctcctagccaagggaagccgaagccttgagggactgtgtggggaggaacggtgcactctggcacagatactgcgctttcctcacgtcttcgaaacctatagaccaggagattccctctggtgcctatgccaccagggccctgggtttcaagcacaaaactaggaggctgtttaggcagacaccaagctagctgcaggaggtttattttttctgattaagtcaagcagcagttctcaccgtggctaattaggcctcccactgggacatttggcaatgtctggagctggttttgattgtcacaattagagaggatgcactactatcacctagtgggtagagccccgagatggtgctaaacaccctacaatgcacaggacagcacccccaacaaaggatgatccagtcaaaatcgtcagtagtactgaggtggagggcactgatctttagatcttgtgactaggctttttctttctgagtaacatggaaactgctgaaagattttgagataagaagtggtatgatctgagttgttataaatgggttactctggcttccatgttgagaatatactaaaggttaagggaagaaccagaggattatttcaatcatccaagcaagagatgttgacaaggacagaccagagtggtggtcctaacagtgataacgacttgtcagtttcacaacatatttttgcaggtagagccaatagaatttgtgggtagattatatgtgagtgagatgaagaagagtcagtatcacaagatttttgtctgagaaactagaagaatggattttcattacgggagatgagaaaggctacagaagaagcacattgtgggggagagggtgggtagtaaggagctcagtttatggcatgttaaatctgagatgtgtattagataccaaaagctgctggtgggtagacaattggacataggaatctggaggttaggagaaaaatccagcctggaaatataaatttaggagtcatcagcatatagatggtgtacaatgtcataagactggatgacggaagtgcatgtaagaaaggaaagaggactgaaccctaggcacagcagggagaggaggagaaaccaataaaggagattcagaaggagcagctgggagactttggtgatttgaagctgtcagtcagctcagactgccataacaaaataccataaactgggtggcttcaacaacagaagttgatttctcacagttctggaggctgggaagttcaagatcaagatgctggctgattttgttcctggtgatggctctcctcctggcttgcagacaactccctacttgctgcctcctcacgtggcctttcctcttttataaggaaactaatcctatttggccctcacctttgtgacctcatttaactataattacctcctaaaatgcccatttcaaataccatcacattgaggattagattttcaacatatgaattttggggggggacacaattcagtccatagcagaagtgaaaggcatgttccaaaaaggaaagctaagtccactctattgaaaagcttctaacaggtcaagtaacatgaggactgaaaactactatatcaatgtggaggtcagtttgtgaccttcgatgaaaggtttccagtgcagaaaccttgttggagccaacccgaaagagaattcaaggacttggatggtagctagggggaagtgaagtcaagagaagattattttctgatgagtgaaatcaaagtatgtttatgtattgatggggatggtccactggaaggacaaattatattacaggaaagaggggaaagattagagtaatgtccctgaataagtggaaagggatggaatatagtgggcaagtgggggtactggcatcagacagatgcaaaatagtatattcctagcagtatcagaagaaaaggtggagtcccatatgtgagcacagatgcaagtaggtgaacaggtgggttagtaagaacttctctttttattgctttacattttttcagtaaaaaatgaagtaaaatttttatctgagaaagatgatattatttgagagagaggagtactggggatttgaggggagaccagaaagtatgcatgagttacgtaggagaggggaaagtgagtggactaggaaaatatgattatcaatgacattagccccttcctcttaaagtagtggtcatgaatgtaaagtgaaacctctcagtgtggctattggctttccttcggccacagtcagctgaacaaatatagggagagagtaggactatagttggatttaaataggaaagcaatttagctgaaagagtgtaacaagtgaaaagggcaggaacattgatgtatgcaaaggagtaatagtgattgacgagacagtctaagcttgatagagaactgaagatacaaggggcgtgaggggccacgatgaatttgcggacctctcactgaggaagaaactgagaggaaagtatagaaagataatctatgaggatactgaattcaccaagaatcatcacagtactggagagagtgagaggggatcagggacaaaaatcttcaaggacgaaggaggagcaaagggaaagagaatgatgagagccacaagtggggaggtggactttggagcaaagctgatgacataacagtcaaagctacattcaaaactaataatgacttcaacaaatctacaaaattcctgacagaaagggttattttccttgttttacagatgatgacattgagagtcactgaagttaaacaattagcttaaggtcactccatcagagaatgaaattctaaaccagttccaattgaatagtagaaatgttaatgagagggaattacgctgcctttggccttcatacactgccagaggcacactaccctaaagggactttccctccagaatttcctcttccccactcttggggactcctctccggacaccttcatgcaaagtactaatgataggagtgggacatctattccccagagctccatcctctcttctaaataacagggaacgttgagtcccctgttttttctctagtgagagcactcatcagcatgcttcctccttctctctaactgtgtcctttagatccaggagggatatttgctaccaccaccagctaatgctgatttgctaccagcacaaggcccaggtccttgtctggtctgtaccccattacaaggttctccaggaacagacatcaccacctctgcctagatcctgaaatttcacaaatgtaggttctttcttacccgttctttttattcctctatttacaagcacaatgacacccacccctcatcttcttcctgaaatacctggctctgatctcaggcatccattccagaaatcaacacagctatgcaattgcatcttttattaaatactcccaactccatttcaaatccagagaatccagagcaggagcaagagaccaacctatcatctggaaactcaaggtgtaaacattagtgccaaagattagtcatgaaggtaagttgggtattacagtgccctacaacaaaatggtcttgtgccgagagccacattctgaaataccaagtgaagtttgatgacacattatattatatatttcacaacagatttgtcttctagatgtgtgagggagatgatgggtttatgtgtacaggtgcacacatgcctatgttttggggaatttgtgcatacatgtaacaagaatgttatctgtgcagttttattattgtgtgcctgttttcatggtgtggcatatttgaagaggaatggtttagagcttgccaggctgaacagttatgtgtccgtgtaatcaccgcattaaagaatttgaccttttgtaactcaacatctctagccaccattggtctgtaagcctgaatgtcacctctcctactttattcatctctgatatgaccccaaattataaaatgatctataaatataggtaagactttgcatgtcctttcatactccacagtctctagcacagtggatcctggttgatcaaacaggaaggacctcgaagttagtcaaatataagtggaaaacctattaagcatttacaaataatgtggccttgggcaagtaatttaacttcagttactctcctaacatactctataaaataaggctattgcctaatattcaagtgagttaagattagagttaataaatgaaaagagctgtaaatgttcatagcagttgtatcactgcctagcataagaaccccttaaaaacctgtttcttaatttgggaaacagatatgacgatagttagcatttattaaaggatgacagttaacaactgctatgtgccaggccttgttctaacagcttttcatatttagcccacttaacatatttctattttcatatgaggaaactgaggcagagagaggctaagtaacatacccaagtttttccagctagaaaatggcagagccaggactcaaacccaggcagtctggctgctgagccctggttcttaattatgacattaatgcttattctgcccagtgaggataaaatgagtgaaacataaaatcaaacaggatgttttggtagggagcagtgttttttccctctgaaaaatgaaaaattaggttattgtgattttgtaatttacagcagtgaatatgatgtgaaaaataagttatccatataataatttatgtcaggagtcatgcagcagaaagatttctgtccatcacgtaaactttcatccattacataacccatatgtttctgtaccattaagacacttggttcaacaagacccttggagaatgaggttccttttgttccctggggttctctttttattttatttttggattaatatttgatagtaaagccaaggatttgggacaggaaacttagatgacatctagttcaaactccttgatttacatatgaaaaaattgagacagagggaaatgaagatttccccatatcatataactggctaaagggagctatgtaggtaaaaccaagatgtcctgatattctagtctaccagaaagtgttctttttttctacccaacttattcctgatttaaaggctagtatacgtgtgctgatctcccctcagtgggaggggcatggacgttgggagtagtctctattcacaacaaattaaaaatcagtaatcagccgtataatgggttgtgttagaaagtaaactaaggcccaataaaatatttaagagtttatttgagcagtgatccagaagtggctagggagctccccagagagaacatgaggaggaggctttttaggacaaatagataaaagcaaagataatatttcattggttacagttatacagttacacagttatacagttgccttatttggtctatcccatgaggaagtcctagttactaattacgtttttgttggctgcttctgattggttgagcttaagttctgtgtttctttaacataggcatttacaagaaataccacaaataaagtttcagacatgcttgcaaatcaagcaaggttaaggtcacttaggaggcccaactggctctgtctgctcaaggattcttctggcctcgtctccattttacatgaactgttgcataaataaacacagagtacctgaaacaacggaggtgatcattctgcctaccgagtgttggccaggccaagcttggagtgttgctcttattcttagggagtttatttttaagtaatctcatctgtaaatgggattacaatccacaaactgaccttgtatatgattccattccttctcccagcccagccccacactccaaggttttccctttgcttataaggggtagtcacccttttttatttcgaccttccaaacattctgggagttttcctcctttaggccaactacagcgcagaggagcgctttctcctgctgggtttctccgactggccttccctgcagccggtcctcttcgcccttgtcctcctgtgctacctcctgaccttgacgggcaactcggcgctggtgctgctggcggtgcgcgacccgcgcctgcacacgcccatgtactacttcctctgccacctggccttggtagacgcgggcttcactactagcgtggtgccgccgctgctggccaacctgcgcggaccagcgctctggctgccgcgcagccactgcacggcccagctgtgcgcatcgctggctctgggttccgccgaatgcgtcctcctggcggtgatggctctggaccgcgcggccgcagtgtgccgcccgctgcgctatgcggggctcgtctccccgcgcctatgtcgcacgctggccagcgcctcctggctaagtggcctcaccaactcggttgcgcaaaccgcgctcctggctgagcggccgctgtgcgcgccccgcctgctggaccacttcatctgtgagctgccggcgttgctcaagctggcctgcggaggcgacggagacactaccgagaaccagatgttcgccgcccgcgtggtcatcctgctgctgccgtttgccgtcatcctggcctcctacggtgccgtggcccgagctgtctgttgcatgcggttcagcggaggccggaggagggcggtgggcacgtgtgggtcccacctgacagccgtctgcctgttctacggctcggccatctacacctacctgcagcccgcgcagcgctacaaccaggcacggggcaagttcgtatcgctcttctacaccgtggtcacacctgctctcaacccgctcatctacaccctcaggaataagaaagtgaagggggcagcgaggaggctgctgcggagtctggggagaggccaggctgggcagtgagtagttggggaggggagaaagtattaagccagaacccaaggatggaaataccccttagtgagtcagtttagacttcaggctgttcatttttgtatgataatctgcaagatttgtcctaaggagtccaatgggggatatgttttcctcccgtgaggaaatgtttagttcttgagggaaaatccctaaatcctctatatactcaggtttagggaaggaaaacctacccctcacaactccacgcgcagggaaaatgatggacgtgatgctcgcctttagcttcctccctatctgatggaagaccatggaagacctcttggtctctgcaatcagaagtctcaagttgacaagaaaatcatagtccctaccctgcaggagagggtacatccagaaaaagcgaccatggactctattctcagaaatcagtccaacttagtgcagacctggccagatgaccagtgccctccccggggcatttcacccataaatgtgatgaggaaagcccataaatggtggtgaattttgctgagtggggttaagactggaaacccccctgcaggagttggttcttgagcaagttttaaagaaacaaggaactaggatgagtgtggaagaaggcgggcacgtctcagcccgtgaaaaaaactcacaggtgatcagtagtgagtcatgagagagagagcaagagagagagtcagagagaggagtaaatggagggaggaagatggaggaagggactcaagttctcaagacaggaacagggatctcctcatgaaaaaaagaagagaggaaaatgctcaatcagcagaacctgagcagaatattgaggtcaacccagaagccagctcctcacccaccctcacccagactggcgccctcatcctggagaagacctgctagaccctaaggcaggtaggagagagggtggtccacagtcccccagctttagaaagtttgttcgctcccaatgtccatctacccctaggaatccccactagttaaacagaattgctagatccctgtggaaaatacctttccttgcccaccatcatccccagaaataataactattttagttgggtgtgagacatagagaataaaagggggcatggtgccagacttcatttcatacaaatagctttaaaggagaagaggggggaaggagtttaatttagtttctaaaatgtttagtaatttgattgtgatcatgtcagagcaactaattcattttataaaatatcatttcactatgctctataagtagaaattcaatttggttcaaccattattgagtgatataaataaagcactggacttaacaaagacagaaatacagaaatcagtagaacatggatcccaacctaaaacttactctcttgtcataaaggaaaggagataggagtttttgcataaataacaaggtatcaagacagaattaaattccaagctggctttgaatgctctattttgccttaaaaatttatttactagtctcagtaatacattagtaaaaatcatgtcacttaattaattgtgttagaatcaaagaaacatagagttgggcaatatacttcatcctacccatcccacccaaatcttactctactcatctcattctcattaattttgggaaatcatcagaagatgtgttcgttgagtaagagattaaaagaaataagctttttgacccctgccaacaccccatgcccagggtggtcaccctccaatacaataagatgccaggaagagtaagttgccctttctgatgccgtaatctgccatcatcttcccatcttccagtctctttccattgcaagtcacaatctgggtctcagggattatacccgtcttagtctcgatcattgctttcacttgtgccactgagctggaccttcgcacctggaggaggtgcctctttgcctcatcacctgactccacaagaaacaagggcagctcctcatcactgggcttcaccactttcagggtaaggtggatggtcttctctttgtcaatgccgtaagatgagaggcttctccgtggctttaagatcttggagcccagcaaaagaacctggtcctgcacaggaaccttggtcttagaccggacatgttctttgatttttttcacgctgtcatatgggttggcatcaaaggtcattaaatcccattcctcggaacggacatgcacctgggaagtgaaagccacaagacagttacctaggatgcctgcctcctttacacttctactccccaccacaatggctccccctcttccactatctatctggtcctctagctcctattcagtagccagtgtccctctctttcttggaacttcttttttggaattaccaagttacaacacaaataagataatttgtcccattcctttataatcacacctttttttcgatcttgagaatggaaaataaaatcctgagcccccaaccaactgaacggacgctcttttgctcagggggaccctagagaaactttaaaaacttagtcattgggccaagggtggtggcttacacctgtaatcccagaactttgggaagctgaggcaggctgatcaattgatgctgggagttcgagaccagcctggtgaacttggtgaaactctgtctctactaaaaatacaaaaattagccagtagtggtggcaagtccctgtaatcccagctactcaggaggctgaggcaggagaatcatttgaatccaggaggcagaggttgcagtgagtggagatggcactactgcactccagccagggcaacagagtgagactctgtctcaaaaatataaataaataaaacattcagtcatgatggaacaggaggttggatatgcctcattgtatcttctcccttttgcagtttagacacaactgaccagcaaagttagagattataagactgagagaatggattctttgtggcaataagatagcaaattataaacaagaccgagggctataacaggcaaaagttaagtcatgcatcccttacacttaaagaataaactatgttctgccacaaagttttttcttttttctctagcagctaaacaagcactggccttgacaggaacaatattaaaacaattacagctcaccctgtgttggggaacacaggctaactgaccccgtgttccacaagccataactacagttttaattggacaaaagactgatttcagtaattttctcctgataagagaccactgaccatggactggttctggctagtttacagaagctgtgcatttgaatgcctttgtgtccctgcttcaccttttcatgtataaggcctaactgtaatgcaattaaatgttaagtctccacttcagagtgaccatgggtggtatgtaacatgcaagcttattcaatatgcatgcattaggaccccctccatgaatattcattgcctctgctataacctattggatatgtatacttagcaaaccccttcagcataaattcctgtgtcacctttcctcctgcaaagtgcttgcttttggttttcaatcagaagcaaaacttcccagcctgtcagaatggctaccttgcagactataacctttcataagaaataaactccccttctaaatttatgaattgtgtgattttttttagttgacaatctttacatttcgtttttctgtgcatttcaatggatgtaaaaaacatacctttatccatctcaaaatgtaattagtgattttccaccttatttacctgcctctcctatccagataaagtttgtcaaatgtcaacaagtaaatacgaggcttcaaaagatgtacatcagactctaaaaacaactctcaaagagaatttccaaaatatgacagcctcatgaagatactcatagccataggataccctctgtcaatacttcagaaggaaatcctgggtaggacacataatcactgaactgttagtttcttttcaaatatcccactgctttataataataactcacatactaccgtgacactatgttcagtgtttcttgttaatttatatttcttgtgtttttatttctatctaatgagagacaggactagctggatttcctaggccgactaagaatccctaagcctagctggggaggtgactgcatccacctttaaacacggggcttgcaacttagctcacacctgaccaatcaggtagtaaagagagctcactaaaatgctaattaggcaaaaacaggaggtaaagatatagccaatcatctattgcctgagatcacagcgggagggacaatgatcgggatataaacacaggcattcgagccagcaacgctaccctctttgggtcccctccctttgtatgggagctctgtcttcactctactaaatcttgcaactgcactcttctggtctatgtttcttacggctcgaggtgagctttcgcttgccatccaccactgccgtttgccaccgtcgcagacccgcggctgacttccatccctcggatctggcagggtgtccgctgtgcttctgaaccagtgaggcgcccattgccgctcctgattgggctaaaggcgtaccattgttctgcacggctaagtgcccaggttcttcctaatcgagctgaacactagtcactgggtccacagttctcttccgtgacccatggcttctaatagagctgtaacaaccaccacatgacccaagattccattccttggaatccatgaggccaagaaccccaggtcagagaacacgaggcttgccaccatcttggaagcggcctgcggccattttggaagcagcccaccaccatcttgagagctctgggagcaaagaccccctggtaacactaatatagaatgtgatctcctttgataagactagggcctcactcacagaaggtagggactatatctaagtcttacttcaatagctggaaaatcctaaaagatgggaaaactcacccctaatggccacttgaaagcctgagaagacctccctcatactccattcagaaatattttcccaatctagatattgcagacatttcttcactggaagatctgtgttaagcattgccttaattccaggttctctccatagtgcatattttcttatataatgtaatgtgttagatcattaacaacttcagatgaatgagttttgtgaagctctcctttgagaggagagggaagattaagtttaagaaccttaaaaaatgttaccataatttcaaatctcaccagccctgtggaacacaaagctcacccccactttttcttctaccatttatccctaagagtagctagtccaatgttttatttaaaaaagaacacagaagccagataaccagcttctcttcagacaatccctcttcccattctgcaaatgtcaatgccagcctcttctcctgaaggatgcctgcccagccccccagagccctgagtactgcccagcccccgtttctaagatctctccccaactcttgaaagtgcttttcctttccccatcccctttatcaaatcccaacttacacagaggcaggaagcattgggagccatctctgcagacaaggggccagaaaccagagacagaaaaaggactttgcatgcagcttatataccagagttgagttggaaatcccctgcctggattgctgtgtttgtccagctttgctgtgctctttgttcttgcatgctcccatgaattttctttcacttttgctgggcaggagttaatagacaaagaatgctttctgatcacatacttctctcctcaagcaatctatttgcaaacctcattccaaacatgggatggtctttctgtgttgaaaacttttcccttttctcaggaaagatctttgtctgttgaagccacctggatctatacccacagcccaaacctaagctgcagatctctatgtctagctgtgtctgtgtctatgggaattctcgttccttgaattcccggcatatccttgaacaccccaatctctctgccatctccacgccactgagcatgccttttcctccaactctatccccaccaccatgaatttataagaacacacggtgtaaacagtatcttcgtcaaaaagccttccctaactcttttcctccccatcctgggttatgtgtccatcttctatcctctacacttccttcaaatgcctctcagagcatgtttcttcaacaatagcatcgtctgcttgtctgtaatctttagaaaagagtaggaatcttgggggtcgtgattgtgtcttaattaacttgtatctttagcactgttccagcatgctgtcaggcacaggaaataatttataaatgtttactaaatgcacaaatgaattaataaatgaatgaaaagtaagtaaataacaaaaaaaggaaaagtaatatttggtgagtacttaaatttcaagaactgcacaacatattattaaatgttaccttatttactgtttcagcattttaatgaagtaagtacaggtgctccttcacttatgatggggttacatccctgtaaacccattgtacactgaaaatatccaaaatcagaaatgcatttaatacacctaacccaccaaacatcatagcttaacctaacctgccttaaacatgctcagaacacttacattagcatacagttggacaaaattatctaacaaaaagtgtatttactactgaagtgtgaaatatctcatttaagttattaaatactgtactgaaagtgaaaagcagatgattttatgggaacttgaagtaggtttctactgagtatgtattgctttggtatcactattaaataaaaaatcataaatggaatcattgtaaggaaccacctctattagtatccccgttaataagtaagaagctacctcatccacaatcatattagtagtagctggtaagcaagggttcaaacactaatctgtatttctatagtccttgtattcttcctatattattatgttatttcagtgggaaaaggcagggagaaaagtgctactggagttgggtatttccagcatggggttactgtgagggcaaatctaatatactctcagaaaaaactaattcaggggattccctacccagagatgacctggattctgggaaatagtgccctttcaagaaaacatatgaacaacaaacctggactctgacctctctctctctctttactcttcccttcctatgggaaattccctccctgcccaaagccagggccaggactgtcccagacaccttggtgcccctttgctgaccacaggcaggacttcatcttgggacctgacctccttgcttcttacccagtgtcaatctgacttttttctgtctctctctatgtcacaataagttctttcagagacagatctcttttcatttgctgttttagtctcttttgcatactataaaggaatacttgaggctgggtaatttataaggaaaaaaagtttaattgattcatagttcctccaactatacaagaagtatggcaccagcatctgcttctggtgaggcctcaagaagcttttactcatggtggaaggtgaaggagagcaggcgtgtcacatggcaagagagggaggtaagagacagtgggaaaaatgccaggctcttttaaacaaccagctctcttgtgagctaatggagtgagaactcatttattacaatgatgacagccccaggccattcatgagggatctgccaccacaacccaaacatctcccagtgggcccatttccaacactgggggtcacatttcaacatgagatctggagagtacaaacatccaaactacatcatttacccctctgacaaattcagaaaaccaactaaagtgtcagaggtgtttgaaccagagcaactccatcttgaataggggctggataaaataaggctgacatctactaggctgcattcccaggaagttaggcattctaagtcacaggatgagagaggagatcagcacaaagtacaggttataaagaccttgcaaataaaaggaagcagtaaagaagccagccaaaacccaccaaaaccaagatggcaacgaaagtgacttctggtcattctcactgctcattatatgctaaataaaacattaacatgctaaaaaatattcccaccagggccatggcagtttacagatgccatggcaatgtccagaagttactctatatggtctaaaaagaggaggaaccctcagttccaggaatttcccacttctttcctggaaaacttgtgaataagccaccccttgtttagtatataatcaagaaataaccataaaaatagtcaaccagcagccctcagggctgctctgcctataaagtagccattctttttttcctttactttcttaatacgcttgctttcagtttactctatggattcaccctgaattctttcttgtgcaagatccaataacgctctcttgggggctggatcaggatccctttccagtaacaaaagtaaaaagatgatggtatgaagatcttgccaagttataaaacaattgtggcggttatctacgagtgtcccaatgtggccctggctgacgggatgctcttgggcctgtcactgcccccattgaagcctacttgaagcctacttggaacagatgtctctttctagtctctttaataacgtccatgaaagagtttctaaactgctttgagatctagaatattgcttcaaaaatgccaaccaaactcagtcagaaagctagtgtgaattctcatttattggtgattgggaaaaaagtctacactcaaagaagaacagtttgaaaatacctaccaaaatttaacatggacataccaaaccaagacaaccaaatgcctatcagtattagggaaataggtaaccaaattgtagaatatcataagcagcataaatagaaggatcatacctgcaaacaacgatacagatgaatgtgctagaacctattgagtgaaaaaagtgttagaaacaaatgcttattccacggtgccgcaaagaaatagcactcagacataaattcaattttctcagcaaggaatttttacttctatagaagggtgtgactcgcggatggagtaatggcaagagcatacctggacaagggaggggaaggagttcttattcctgaggcaggtagcccctactgctgtgtcgttcccctattggctaggtttggaccacacaatctaagctaattccgattggctattttaaagagagcaggggtatgagccagagcggcagggtgggtagtttggtgggaagggtggttacagaacaggtgactcaggatgattcaaatcaaagcaggtggccgagggtgactccggatggagcaggtgaccaggggaacagatatgaaccactgattagaactgacaggaaagttgtttactgaaactagaggcaagagggtgaagagaacccggaagctcaactttcaaatggagaatcaaagaataagagagatgaatatgctgacatactgattctttgaagagaatcttggagttcactatatctaacaaaagcaagatgagtaagactacataaagtatgatactctccataaatctcaaaagcaagcaaaactacatagtgagacagagaaaaagaggaactacttgaaattcaggatatgtctgctttttaacaaaaatgaagcccaatctaaattttgatataagctacttgaaggagattttcaacaggaagtaagagggcattagaagccctgatattatttcatcttgccatattcagaatctgaagtttaaccaagagaacttaatgtttgttaaagcaatttattacttgagagacataccgtatattcactttattaaaggtaaagtaataatatctaaaacaaatgttccaaagaaaactaaacataagcaaaactgaatatagtatctagaactacatatgtaagcaataaggctcttataaaaatgtaaaaaccatgagtgttcattatgctactattatgttttatagtgttacattatattattctatatgggttacatttatttatctgtagtatcaaagattataataaaaatataatttaaaatttttcatgttcatatcctctagctcagcaattctgcttctaggaacttatcctattagtactcttttggtttttttttaaggagtatcactcttgcctcccagcctggaatgcaatggcgcgatctcggctcactgcaacctccgcctcctgggttcaagcgattctcctccctcagccttctgagcagctgggattgcagtcatgtgccaccatgcctggctattatttatttatttatttatttattatttttatttttagtagagatggggtttcagcatgctggccaggctggtctcgaactcctgacctcaggtgatccacctgcctccgcctcccaaagtgctggcattacaggtatgagccaccatgcctggccctattagtacacttatatatgtgtgaaataagccatgtacaagaatattcatgtgaaataattatttgcaactgaaataaatgggaacaacacttatcaatagacaactaaataagtgctggtgtatacagttgaattaaatttaaaagccaagttgcaaaatatatgtataatattttgttatttagaaaggaagaaaatatacacatatgctaaaatgtgcatacaacatctctgtgaggagacactgactctgcaagttgcctgaggagcaggaatgagaggtggactattcattatatgtcttatcttattattgttgctattttttagttttgcaactgtgcatgttttacacattcagataggcagatagtatgggaagggatagtatattttttatgtagtcatcagctcagaatggagctggctataagctatgcaccaatgggaaccagtttcagtgctcatcactagttgacaggcaaagggccatgaaaagttggtggctatagtaggttaactattgtgattctgtgccttccctactccccaaaatttattttccactaatcttttacatactgcaaaatttagaaacattgataatatagcccataatatatctgaaagcaaagaaatttataattagctaaaatcagagaccaaacctaatgaaaaaaaaaaagtaattctgagacaattgctgagcctggtacatgggactgatgtcaatgtgcaaaaattgtccaacctgacaaagcaactggaataactaatgcagtcataagtgcaggatgatgtgttgaccaatggcgcatttccactttgtagcagtcaggccatcttggagtgaatccaggctctgcctcctacttctcatgcaagttatttggtactttcttttgtcagctggggatttcggatttcacttaggattaggctctgctaccattaacagacatctgaaaataatgtgcctttaactaaaaccccaaaaggaccagatcttagaagtcaaaatgacaaccaaggcttaaggagttcaccctagaaccaagaaaaaactgcaatgatccattccagcaaaatgtaaagccagtttttcagaagttcaaagtgataagtgggtaatatatctgcttattaaacaagattcaatacgcttcagagaaagataatagaatacaaaatagataaaggtaatagaatacggaatctctgtaacatattactcacatcatcaagtgtaaaacaggaaatcaccaatcatgtgaagaaacagaaatattagacaaacagttttaaatcctcaataaaaacaaacccaaacgccaccgaaatgttagaattatcagatggagactttaaaatcactatagtattttaaagaatccacagggaaagatttatacaatgggtaaagaaatgatgaattttaggagacagatgtagaaactgccattttaaaaagccaaacggaaatgctggaactgaaaaatacaatatcgttgacccttgaacaacaagggtttgaactgcatgggtccattgaatgtagatttttttcagtaaatatactggaaaattttgtacctttgtgacaatttgaaaaaactcgcaaacttcatagcttagaaacatcaaaataattaagaaacaattaggcatatcataaatgcataaaacatacgtagatactagcatactttatcatttactataaaatatacacaaatctattataaaaagttaaaatttattaaaactcacacacaaatacttataaacaatcataaaatacagtattaaatcataactgcgtaaaattagtcatagtacattctgtcctactataataattatgtagccacctcctgttactattgggtgagctcaagtgttgggagtatgggattaaaatgtcatgtaatactaatcattcccacgtaagcagttcgtcttctctttaggaaaaagtgatgtctcacggttcttgcggttgtcctgtttttgttttgtttgtttgtttattacagagttttgctctgtcgtccaggctggagtgcagtggcacgatctcagctcactgcaacctctgcctcccgggttcaagtgattatcctgcctcagcctcccaagtagctgggattagaggcatgcaccaccacgcctggctaatttttgtatttttagtagaaacgttctttggttcaagacggccaggctggtcttgaactcctgacctcaagtgatccacccccctcggcctcccaaagtgctgggattacaggtgtgccaccgcgcccaggatcttgtgtatttttaattgtgtttagtgcaattccataaagcctgaataacaccacgagacccatatagtgatgctggaagttttccctggagacagagaaaagccataacattacaggaaaaagttgaattgcttgatatgtgctatagattgaggtctgctgctgcagtttcctgccatttctgactgatgtttcatctcttaacagatgacacaaacttacataattgataaatacggtattgtactgtcagtgtattttctcttccttataattttcttaataacattttcttttctctggctcatgttattgtaagaatacagtatataatacatacaacatacaaaatatgtgtcagtcaactgtatatatgatcagtaaggcttctggttaacagtagtttattagtagttaaggtttaggggagtcaaaagttattcatggatttccaaatgtatgagggggtcagcacctctaacccacgcattgttcaagggtcagctgtatacgactttctggtaaaaagaaccaggagtccttggagagatggttgatcccagacagaggaaagagaacatacaagataaccctggaatactgtatgatgccagaaactaaagaagtcattaaaaaaaaaaatgaggacacatcaaaaaactcacagtaatcacgttaaaggatttccccatagccaagtctgggaaaatgtaaacagcaaagtaaataatgagaataatgaagaaagaataaaataaacatccaggagtcattactggatatgaataaagaaaataaacagtaaacgaataggaggagagggacagctcttacaaaattcaaaataacaaacataggagaaatgatgaaagttatcattaggcaaacagcccaatagtaattgttacagtcaaaactcatttgtggatgctaaaattagtaggcaaaactataatgagaaaaagatacttgcataatctcaaagtattaccataaatacttattatgttacttatattattataagatatgactacagttttaataagacaacacagttaaaaaaatgaaaaataatttgaataaaagacacgtaaggaccaataaagcacatgataagatgtttaacaccattaaccatcacagagcaaattgaaacgacttgagggagcacttcacagccgatagaatgcctaaaaccaagagactgacaattccaagtattaccaaggatgtggaacatctggaactctcatcgctgtagggagtgtaaatggcacaatcactctggaaagcagtttagcagtttcttataaagataaacagacagcaaatgactcagaaattccaattctaggtatttacccaaaataaagaacacatgtgttcacacaaagaacgaagaaccatatacaacacaactaactgttctctccttcttcttcttcttcttcttcttcctcttcctcttcctcttcctcttcttcttcttcttcttcttcttcttcttcttcttcttcttcttcttcttcttcttcttcttctttttttcggacccaggctgttgtgcagtggcatgatcatggctcactgcagcctcaacttcctgggctcaagtgatcctcccacctcagccccccaagtagctgagactacaggatgcaccacgatgcccggccaatattttgtattattttgtagagacagggttatatcatgtttcccaggctggtctcaaactcctgggctcaagtatcctcccaccttggcctcccaaagttctgggattacaggtgtgagccaccatacccaacaattgtggcttctttcatagcagcccaaaactagaaacaacccaaatgcccatcaatgcatgaatggataaactgtggtatatttatacagtgaaatactattagcaataaaaaggagcaaattactaatatatgaaacactatgaatgaatttccataacaagccagataacagaagccagaaataaggcatgaagctaggcatggtggctcatgcctgtaattctagcattttgggagtccaaggtgggtgaatcacttgagcccaagaattcgagaccagtctgggcaacacagcgagaccctgtctctacaaaaagtacaaaacttagccgcgtgtggtggcctgcacctgtaatcccagctacttggggggttgagtccaggaggttgaggctgcagtgaactgtgatcacaccactgcactctagcctgggtgacaaagtaacaccttgtctcaaaaaacataaaaaaagtaaatttcattgaagtacaaattacgggtaataaaatgcacacattttaagtatattgttcaataagttttgacaagtgcatacacttggataaccaataccccattcaagatatagagcatgcattttcattattctagaaagttatcctatgccctgtcccagacaaccaatcatctgatttctatcttgctagatttgcttttcctgttgtaggaaagttatgtcagtgaaatcaggtggtatgaatgtatgaatgcttgcttgcttgctttttttttttttttttttttgagacagggtctcactctgtcacccaggctggagtgcagtagtgcagtggtgcaatcacggctccctacagccttgacctcctaagtatattgaacaatatacttaaaatgtgtgcattttattacatgtaaattctatcttaaagaagtttattttattttatgtttttttgagacaaggtctgactctgtcacccaggctagagtgcagtggcatgatcacagctcactgcagcctcaatctcctaggcgcaggttatcttcccagctcagccccccaaggagctgggactacagatgaaggccaccacacccggctaagtttttgtacttttcgtagagacaaggtcttgctatgttgcccagactggtctcgaactcctgggctcaggtgatccattcctcttggcctcttaaagtgctgggattacagatgtgagccaccatgcccagactgaagttgattttaaaagcagaaatgagctactgatacttgaaacaacatgaataaattgcaaaataattactcctagtgaaataattcttactcaaaggagtatatattattccatttgtatgaagtcctagaagaggcaaaactaagtatcaaggaaagaggcaagtggaaggtttgtaggatgatggaaatcttctgtttcttcattgaagtcatcaaaattcatcaaagcgtatatttcaaatctgtgcattttattgcatgtaaattatatccaaatgtctaccagtagagaagaaacaagaaataacgaagtcttacatgggttcaaatgagacttgagagaaaagaatgggacacactcaggagaggtggcaatgagaaaacatgaccttgtgctcctcaatgacacagaggagcagaagtgacctttttacttaccacagggagcaccaatgctggcacgtttcctctgaatcatctccttctttcttaatcatcattagcaccagtggctaattaattgtctgtgaactgtgacgctctggagtcttgggagaattaacaagccatttctctccatgggatgggagtcccgggatccctccctccatcacttcaccacgttttcttctctatctccactaccattaaaagacaggttaacttactaggttgaagaggagaggttgtgggcaaagagcaaccttcagccttacaggtccagaagaaggatggtggtggggtatagtttgtgcctgactctagagccaacccacctgggttcaagtctcagctctggctatataattctgagctaattatttaacctatgttttagtttcttcatctgaaaataaatatagaatatagaaatattatccaggtcatacagaggttgtgaagtgctttgaaaggtgtggcagcagcattagaagtcaacattactacctgagccctaatccaccaccctttcaaaggtgcccaacactcctgactttgcttgtagatttcattgtgaggattaactagaggctcactcagtctagaagctcgttgtcagggagaagctccggcagcaggcaatggggagattgtgacatgattgaggaaaagttataagtttattcttctcctactgtccattaatgtccacatatcgtcaatggtagagctaccccaggagcaccagatttggaatcaaacaggactcagactccaggcctggtcttcatcggctatgtaaccttgggcaagctacttaacctctctgcgaccatttcttcttctgtaaaaggaagatgatattaactacctcaaagagttatgagaaccaggtattcaggaaatgtttagcatggtgcctggtgtataggaagcacacaacagatggtagctgccaaagtattaacgtggttttcactaatgaattggagaaaagaattgatatttcattcccttgtagcacctagtacacaactaggtctttggtgattaataaagaaataaatacatccgtgaatatgaaattaataggaagagagtaaagttgtactggacttttgtgggtgtccaagaaaaattaaaaagaccagaagaaagagagtgagaacaaatacacgttgtgaaacacagaacaagagagaacagaaagagagtcaaagaactatgtaaattgaagagactgaaaaatgacatagagtgaagcaatgaattaccaagagtataagagtgtaagagagggatgcagaaagtgtattagaatgatggttgacagataaataaggaggagttggctattttttaccaacacaaagggtgtaatgttataagacaatataggaatgattttgtaaaagtaataattgaaatagtcattgcgtcttcaggagtaggtagtaggtatgattagggaagggcacgcagaaggcttttaagatttaaacaatcttttgttaaaatattcaacaatattttaaaggaaaaatttttctcagagtaaaaagaatataggaggaaggaaacgaaaaaagagacaaatataaacaggttgaacaaataaaaagatgagatggggcttttaaacacacaaaaaagagacactgcaatgggtagatgctgccaacctatagcctctccagccacctccccatcaacttgcccagttcctgcctctcaactgccagagtggctgccaccgtccacccatatctgagttggccctgtgtgctgaaactctcttcaccttctcaaaaacacagtcccctcctccaggaagcattccctgattcactcaaccaccctactcattttctttacagatctatctctcacctctagccccctaccccaatatttttgccttatttgcctgcaatgtttcaagttttctgctgatgttgaatgtactacccagggtttttcaaagccatgagactactctttcttccagcccataagctcctccgccttgaatgaccacattgttcaataatttgaagtagactccttacttcagtgacttaggataggctactaaagaggataaagtcagacctgacatctaagtacaatatgtgactctcaactggatcctacgtggaaaaaaaaaaatcctacaaagaacattattgggacatagagaaaataagaatatggactgtgtgttacataacaatactgtatcaattttaagtttattgaatttaattgctgtacagtgttaattaagatcatcttgttgtagaatatgaatactaagacaataaggagaaagaggcatgatgtccacaagttattcccaagtgactcagagtaaaaatgaaaatacataaacatattgagtataatgatagtgaaaatgagtaaaaatactaaaaattgatgaatttgataaaggttatatagaagttcttggaactacacttgcaacttttctgtaagtttcaacttatttcaaaatcaaaggtttttaattgcatgtgaataaaattaaccgagcattttcaaaagcaaaattctacttacatgtcccaaactcaacatggtatgtttttactactatattttatcttacatgaaaaggagaggatattgaaatctatttcagctttctaacaccaaacatcaattcttcaggatttttttgcagttacagaaccagaaaataatctttctgactgacattatattttttcttatttttacatattacacataatggaaaatttaggcaggacatttcatttgcaggagaaatgtttgttcttagtttaataagtcataattttttttgaaagacctaaatcacctgactgatctttctagcagttgagtcatttcacatacagaagaaatctccacagtccacatttctatcactggtcaaatctcttgcaaaagtgtaaagtagatagaatgtgaatgatttgagaaaatttatgcccaccactagaaaacatgatgaattctctagtaatgtttacaattaggaaactcactgaacacacatttctttgtatttccttccacacataacaaagggaaaattcagtagtagcatagcgatcagaacataataggtacttaataaatttttgcaaaattaataaaaactaactagttagctgatctatgcttcacatcagacgttttgcattcaaccaggaagtcagaggcaccagtgtgaggctcaatccgttgttgagcacattaatggtttcctcactcccactagacaatgtttgatcagaaggaacaggggatgagaaggagctgcttgatggtgatgagactgggaaaggaacgctgggcgagcagagacaaaagagaaacactcacctactgggacctcacaaacacccaggctgagttttaataagacaggttgaatcacactggggtgacagcctcatccttccagatacagagaggaacaggccatggttaaccaaagctccgcaccaggctttctccttctgggcttctctgaacacccagcactggaaaggactctctttgtagttgtcttcacttcctacctcctaaccccggtggactcatcatcctgctgtctgtgctggaccccaggctccactctccaatgtactttttcctctccaacctctccttcttggacctctgtttcaccataagttgtgtccccgggatgctggtcaacctctgggagccaaagaagaccatcatcttactgggctgctctgtccagttcttcatcttcctgtccctggggaccactgagtgcatcctcctgacggtgatggcctttgaccgctacatggctatcttcaagcccctgcgccatgccaccatcgtccacctctgcctgtgctggcagctggcatctgtggcctgggtcattgggctggtagagtcagtggtccagacaccatccaccctgcgcctgcctttctgcccccatcagcaggtggatgattttgtctgtgaggtcccagctctaattcgactctcctgtgaagacacctcctacaatgagatccagatggctgttgccagtgtcttcatcttggctgtgcctcagcctcatccttgtctcttatggagccattgcctgggcagtgctaaggactaactgcaaaagggcagaggaaagcttttgggacctgctcctcccatctcactgtggtcaccctcttctacagctcagtcattgctgtctacctccagcccaaaaatccctatgcccaagagaggggcaagttctttggtctcttctatgcagtgggcactccttcacttaaccctctcatatacaccctgaggaacaaggaggtaaccagggcattcaggagattgctggcgaaggaaatggggctcatacaaagttgagggagagctgtttaatgtgctttctaaattaagaagaaattatttatccttttgtgaacaagtttgagctcccaagtatactacctttcatacacccatcacagtgtttacaatgggtcacagtatatgagtgtgtgtgagagagagaaagagacagagaaagactaagagtcaggtaagaggaggtaggtatctttaattaacatctaaagctcaaaaagattatcatacctgcccatttttaatatttaatttctatatttttattttcttttcaatttggtttttaactctcttctcccctacaggttctccaaatgcaccatgcctatttctggttatgtaacccctctccgattgttacattatcatcatcattttaccatcacttgtgattcttttttttttttttttttttttttgagatggagtctcactctgtcgcccaggctggagtgcagtggtgcgatcttggctccctgcaacctccgcctcctgggttcaagtgattcttctgccccagcttcctgagtagctgggactacaggcacatgccaccatgcccagctaattttttatttttagtagagacggggtttcaccatgttggccaggctggtctcgaactcctgacctcaggtgatccacccgcctcggcctcccaaagtgctgggattataggagtgagccacatcacccagccacttctgattctgacaatgtcttctttcctttgtcatcaggatggttcatctccacttgcttgaggtggactgacaggaagctgacactcagagaatttagtaatttcacccaagaacacacagcaatttgttagacctaaattgagatgcatatctgttaacttaccaagtgcatgctgttggttttacaccattataaatataccaacatcattaggatttatacccaaatgggttatcaggcagaaaactctatttttccagtcctagtaagttttctgatcatccagctttccagggatcacaacactaatctcctgccaaatcctgaaaatgtgctcccattcctggagatgattttcctttacctcttctcaacctctgcatgacagtgaccatgaggagttgtgagtctgctcttcagtggctacacagtgctaacagctgtcctgcatccattttctagtgcagttctgaaattctgaccaacctctactagccaggcacaaacatgaaatccaattgtaagtaataaagtgctgcaatggagcctggatggagcaagggcctcagaaaaaagggagcagcagtgtaagccccaacttctatgaaatcttatttcctttttcaagttgatctacattcattacattctcaaagcctcacatgaatggaatggagagtgtgatggaaaaatctgtttagaactgaaccattctctcctctttcctgtcaggaaagaggttatgctgtgataacaataccaatcctcagtgacttgaaacagcataggtttatttcttgctgctgctgcatgcccattgtcatccaaccagaggttctgccttgtcatcttcacccaaagatgtggactgacagaacacccaccatctcaaacactcctaggtgctgggaaaggaggaaataataagcatgacaaatggcaaactagcacttagtttccaatcggaagtggcataacactttgactcattggtcatttgccaaagcaaatctcatggctacatataacttcaaggtgaggggaaataaaccaatcatgtggcaggaaagggaaccagaaatatttggtggatgatatgaatgactactaactggctctttgcctccagtcttgaccgattgaaattgattatccatgttgaaccagagtaatcattccaaaatacaaatttgaatatgttactcccttagccaaaaataatatatagaatccccctgcaataaaatgtggagcccaaactcctagatcgggttcctgttttccagactttaccatccccacctcctaaggctcaaccacctagaatcctgcaagttcacacaactacctgcaagtgcaagtgtatgaaccacaccaggctctctgccacctttagcctttgaacgtgctcctccctctctttggaagactctcccctccagctcctctctaccaccaacaaaaagcacttcccatgaagtaacaggatctttttaattgtctacctctcaaagtacacagtaaggaaagtgagggtcagggttttggctcacttatccttatactcttagtgcctggcatagtatctggcacagtaggtatgtaatgaatatttattacagtcacccctcagtatccccagggaattagttccaggacacccctcagataccaaaatctgcagatgctgaagtcccaaagttgaccttgcagaactcacaaatacaaaaagtcggttctcacatccatgagtttagcatcctgagaatattgtattttcaattcatgtttgcttgtggatgcagaacctgtgggaatggaggatagactatatttacagaaagaaatcctagggcctgcgtcctcacgaaagcattggcctccagcgtgggctaacagcagagcagggcggagctggcccatggttgcagacctctgtgccagcctcccctagacaagagcgccgtgtcgaggagaagaaatcggctcaagctctgggcccatgatgcctgctccttccaaagactgtggcagattacgccaactgggatccggcggtcgcaaggtctagaggagtcaagaaagccatcaccaacgtcgttcagcaggaagtaaaatccctttgtgtcttggaagcctcccaggttcctgcagaagaagctgtttctggagctagtgagccctatgacatcatcgacagcagtaacttgaagaagagcagacatggaagagaaatctgcttttcactttatatttttgcctgtcttttaaatgttacagctgtgtgtgctttacatattcaaaataaattgtgtgtatgtgtgtgtgtgtgtgtaaattttaagcagttaataggttcaaggcagaagtggctacaagtttatgccccagtaagaatcagttccagtgctcttcattaattgccaggcaaaatagccatagtaatgtagtaactagaataaaatttaaattaggttagttataaacaccctatccattatcgactcccaaagctgcttcatccatgaatatttaatatgccacaaaactatcagagattgctaatatatcccataatataatatgaaaccaaaagatttttcaaaaagctaaacttgggagagactcatagcaaaatgacatgtaattctgaggtcatcactgagtatggtacttgagtctatcgccacatgtgaaaagcatctgaatataatccaaaaagctattgcagtcatgggctgcagaataatgcggtggccaagaggctgtaatattgtgatataataagatatacatatttggcctttgatcccagttcctggcacagagttcctaaggcccttgtaattccctgagcaataggggtgctaggagagtcttttgttctaatatttggtctttgaccaaatatgtcagttcctaacattgagctctaatcccttggaatttcctgggtaacaggagcatcttttgttctaatgaggtgaccccttgggggacccctgaatggggactctgactagaaggaccaagccatgattagaagtttgaaactttcagctctaccctcatcttccagaaaatcgagagtggctagacattgagttaataatcaactatatctatttgatgaagcctccacaaaaatccctgaactacagagctccgagaacttccaggctggtgcacacacagaaatgctgagagggcagcatgccccagaagctctgtaacccttcccacacaccttttcctgtacatctcttctattttgttgttcatttgtatcctttggaatatcctctataataaactggtaaattgaactaaagagctttcatgtattctgtgaactgctctaataaatcatcaaacccaaggaggggattgtgggaacccccagtagggttcccagtaggtcagaagttccagaagcttggacttgtgattggcatctgaagtggggagcagccttataggatcctttaacctgtgggatctcactgtatctccaggtgaataatgtcagaagtgaattgaattgaattataggacaccaagttggtgtccactgaagaatgtattggtcagtctggaagaaaaaccaacatgttggccgggcgtggtggctcagccctgtaatcccagcactttgggaggctgaggcgggcggatcacaaggtcaggagatcaagaccatcctggctaacaaggtgaaaccccgtctctactaaaaatacaaaaaatcagccaggcatggtggcagatgcctgtagtcccagctactcgggaggctgaggcaggagaatggcatgaacccaggaggcagagcttgcagtgagccgagatcgcgctactgcactccaacctgggcaacagagcaagacttccatctcaaaaaataataaaataaaacaaaacaaaataaaataaaataaaaacgaacatgttttggtgactagaagtgttgaatgttgagaatatagtaggagaaaatggtcagtttgggggttttctacaaatacacagagccctttcgcattgcgcagcatccaatttgaatcctggacctgcaaactcatgcccaggatatagtgccatatcaagggcagcatttgcatgtttctggcaggccggacgttcagtagctgcaggagttagatcagtgttggtgagtgaaagccatgctgttgaacacatacagacctgcatcctgccaccatagttactgccttcataagtccatttttaccagcactagggtggcctgtggagaagactgcttagtgtgaactggcctatagtcactgtttacttggtttagaagaggtttagagcctcttctattgtggatgctttctagtgggcattagcatgtaacacaaagatattcacaattttcccaatttcataaataaaaagatttcccattttcataaacctatccaagtgcctcttcctcaaatttcattgttcttcatcttctaaacctcctccttccaagcacttgaccaaccaaccaagccatttgccactgcccatgtattcacaaatattcttccattaggccattattctttctacacaaaatagataatcaggtgcactactcaaagctttgcccattgggaagatttacaatttctactgtcttccagaactactcttgagtgtggctataatgcagcagcagtccattttcagctcacaccaatgtgttgagcagatacatccatgaaccaaggtcatcttatttttcctccattaaccaatcataaagtacccctccccccccatgacagattaaagatggctgcaaactatcggacaatcatcccatcaggagggctatctatttcccctccccttgaatctgtgctagtctatgactgttttgacaaaaacagcgtggcagaagtgacaccatgccagctctggggccagcctgtaagagaactggctgttcctccttgctatcctggagtcctgaatttccaagtaaaaagtctatcatgctgggcagaccatgtagaaaggccctgagatagcatgaagacagagaaaatgagcccaaacttacagtgaacccaccaaggtgccaggcatgtgagtgaagctgtctcggaccctctagagcagtccatctgccagctgaatacttccaagggatcccagctgatgcaacatggaatataaggaaacccagccaatttcgttccaaattcttggcccacaacatgtgagatacaataaggtttgtgttcatttaagccattaaatttggggagactttgttatgcagcaataaataactagaacactcccatgagccactggtatgagcaagttgggaagtaccaaggccacagcgtggaggacatgggaatctgggccccccacttcagcaccttgcatttaccctccagttctgcccatgactgatgcaggatatacgacttctctcttacaactgatgatgttgcaaccactagacctcatcacttgattgatttgacaggacccagctcatgatggacagttgtagcctaatagccatttgatgtctcatgatcaggagctctgtctctagtaaggcccaagagcaagctaggacttgtttcctaatggggtttactttcctgcagcagacagcatagatttgatgaagaaccccagggatctatgttgtgattttcctttcaaggcttgcccaaaatgccacactgtatcttttcccaccactgatacctttagtgccccagagtctattgagtcacatgaccaaagcactaccacacggctgatatgacagcttagaacagctgcggaccccaggtctgctctgggcttcagtcagtcgctagtaaactgttccatgtggtattcccatgagtgtggaatatgtttcctctagatcctaaataggacaaccaagcattctctaccctggagaagaggaaggagaagaccaagattcactgctggaagaagaaaacagcctatgaggctacagaaacaggcagaaaagaacgtggagaagaaaactgacaaatacacacagttctcctcaagacctatggactcctggtctgagcctaataaagactgtttattccaaaaaacacctctgtattataaattcttctgtgtaatagtgtgttactgtgcatctctttccaattctgcattactggtgttaagtgtgaaatgcaataatgtgttcttactttagagggatgtcctggcacaaagtctaaaaacttcaaagatgtggaggatgctgaatcttcacagggtgtatttcccactctctggagtgcatttgtcttacgagtgccgccaatatgcttgccctcatggctcattctgtttggttaataagatattgttgatacagtggaacgatgtcatgttttgtggaatgtccagaaggtccacgtccagtggtgtgctgcatgcagctagctcatactgcctcatggagccaactgttaaattttcagaaattgtgcaaaccagttgttaaacatgactattattttaaaataagttattttaaggcataggtaacaaatccctaagctcttcattttctaggtatttaactatcttatcatattttccatactcttctggttatttatatctgttatgtctatataataaagatactaaataatgttgtctgtataataaaaatattctggattggtgatgagcaacaatcaccatctttcgtttgagtctcatggccatgagaccaaccccatgcactgctctgagacctgccagccactcccattcctggggtgcggtcctcctggttcagaagtgattttccattaggctatcttttaatttaaacatgaactctgctgtgcccatcactgtctgtgtgcagtcacaggtagagggagagccttcagatggcaccctcagcacttcccaaccctttccttccctctaggccagaaggtggtggtcgtacaatgcgagagcatcaacatttctggcaagttctacagaaacaagttgaagtacctgggctttctccgcaagcggatgaacaccttctggaggccctgccatttctcggccctagccgcatcttctggtggatggtgcaaggcccactgccccacaagactcaccaaggccaggccgccctcaaccacctcaaggtgtctgacggcattccaccgccccatgacaagaaaaagctttggtggttcctgctgccctcaagcttgtgtgtctgaagcctacaagaaaatttgtccgcctggacaccgagcttatgaagttagctggaagtaccaggcagtgacagccaccctgaagaagaggaaggagaaggccaagatccactaccagaagaagaaacagcttatgaggctacagaaataggtggaaaagaacatgaaaaagaaaactgacaaatacacacaggtctcctcaagatccatggacttctggtctgagcctaataaagactgtttgtttattcctcaaaaacaaacaaacaaaaaaaaaccctctgtattataaattattctgtgtaatggtgtgttaccatacatttctctacaactctgcattttcagtaatctcacattgacagtttaaaattggccatggtgagaatatttacactgcagaaatcagcaaatgatgtaaatcaaggcttttttgcctggacttgcagcacatccatgtcccattggaccctattatgacgggagagttttaacatggtactgaagcaaaaatgtaaatgtaaatgtacacttatatccatacctgtaaattcaaactgcctttggtctttcttcctgatagtatttgaaaagaacacattcagccaggcacggtggctcacgtctgtaatcccagcattttgggaggctgaggcaggcagatcacgaggtcaggagttaaagaccagtctgatcaatatggtgaaaccctgtctctactaaaaatacaaaaattagccaggcgtggtggcattcgcctgtagtcccagctactcaggaggctgaggcaggagaatcgctcgaacccgggagggggaggttgcagtgagccaagatcatgccattgcactccagcctgggcaacagtgagattccatctcaaaaagaaaagaaaagaacacattattcaccagattaatagccatataacatggacctgaaaccgtgctaatcaggcacaacagctgtaattacagctatttcttggttgagtttgtgctagtctggtcatctttcaagttgcatctgatatttgtagtgaccagactggtgaattaaatgtgaaatatgatagaaacaaacccccgcaccctttaaaggtggcctcaatcagccatttcccttgaattgtgatattgttcttgattcactgtctttgcggtaagaggtgtagattcagggcttccacttcaatctgtagctcgtactccacagactaaagaactatgtggggattctgccaatggccaagcatgtgcattccagttacagatttagagactgcagaaatgactactgggtagatccatggacctagtacatgccatttattagctgatctcataggctccctttctaatggaagagaagcataacgattcagttatatgaagattggctaaatgttctaagtactctccaaacccagagctttataattctctgttactacagtgtgctccatctcagaataactaaatagaaaaggaggaagctgagaactttaaaaactgaggtcctgaatagatgaatcataagcctgagaggactatcaggatgcccgggactcactggaggtgggagtagagacactgtcctttttcttcctgttgacagaaagaagcaatgagtgacctcttttacctaccacagtgatgactattgttggcatatttcctatagatattcccctgccccttttaccataatttgtggctaatgaattgtctgtgggctatggaccctagagtctcagcagaattaatgagctctttccctccgtgggatccctctaccaccataccatgtcaacatttctacctccaatgccactaaaacagaggcacacctctgcctagactgagggggaaaattgttggcaaagaactcaatggcaaagaactcgatggcaaagaactcgatggcaaagaactcaatggcaaagttctgaccttggcttcatcctccctgcagagatttggtgggctttggttggtgcaaaccctctacagttagcagatttgggttcaaacatcagctctggtgcttactaactatactgccttgggaaagttatttatatttctttgtttcaacttcttcatattggaaggaagagaataatatgtagagttgtgaaggataatcagcagtgtagagtaaatgtttaataaacaacttggttggtggcagatggggagagccctaatttgtagtgtttgccaattttcatagtgtaaatattcctgccatggctgtctcaagccactgatggtttaataactgtctcacaaaattcctaaaaatttactaatcaagagataatctgagccagctccagctcatcacacacatgtgtgcttagaaaagtgccagatggtcagcattagcaatccctattgtgaccagagatgcagttgcccattcaaggatgcccattcctttttatttttttgtttcttcctgatgtacaagtggaggctgggcaccagttaagagctctgtcatggggaattgctggtaccagaagagatttttatttgattgaaggtaagcagaacctttgctctttggctgtgagatatcagtttccgcctatcctcaacactggaggaccagatttggagttaaacttactctaaaatcctagtcctagcacttattgactaggtaaccttctacaagtctcttgtcccgtctgtgactgttcactttttggtaaaattgggataattttatctctttgtagggtcactgtgagaaccagatgttcagggagttgtttatcaccatgctttgatggtagctactaacagcaagggtagctcatggtcactagactatcataaacccctttcaaaggacctcccaactccttccccagctcctaacacaatgctggcactttggggctcaagaaatgaataaatgcgtagaccaatgcatgaatatttcagaaggaaaaggagtaggagaaaaataatgagagtggaaaagacagagaacaaagagggaaagggaaacagtcactaagaaaggtgtaatctaaagagattcagcgatatagcagagaaaggaaaggaatgaaatgccaagataatgacaaagttagaaatgtagaaaattaattaggatgacacatgatggataaataagaaacaattggctattgtttaaggttacatgcaaagaattttatattacaaagaaaacaaaggagggggcggcagccaatgagcatgaggtttcttttgggagtaatgaaatattctggaagtaaatggtgttggttgcacaacttgtgaatatactttaaaccactaaattacacacttcaaaagggcgaattttatggtacgttaaatacatctcaaaaaatgaaagcgaaggcataattaaaaatttagaggccaggcacagtgactcatgcctgtaatcccagcactttgggaggccgaggcaggcagatcacctgaggtcaggagtctgagaccagcctggccaacatggcgaaaccccgtctctactaaaaatacaaaaattagctaggcatggtcttgagtgcctgtaatccccgctacttgggaggctgaggcaggagaatagcttgagcccaggaggtggaagttgcagtgagcagagatcgtgccattgcactccagcctgggctataaaacgtgactctaaaaaaaaaaaaaaaaaaaaaaaattagaatggtggtgacatcttgaggggtgacaaattgagaaaattgagagatcagggaggggcacacagaagcttctaagatacttgaaacatttgctcagttccttaacctagttgtttaaatatgtaacaatattttgaaaattaaaaatatattttaagtgagaaaagaataatgggaaaaacaggaagaagacagagacaatggcagagagtcctggcaaaaagggagatgtgatagagcttaatacaagatggggaccctgtaagaggaagacattcctgccatcctctgagctccatggcacgtttgtggtgtggcccaccatctcatctcctcccctcatggccttcctaaggtcctgtaagaccctgagtccttgtctctgacctgccagagtggcttcagtctcccacccccagccctcaactgaccttctatgccccaatacatctctattttaaggaaaaagtccagtcacctcctctaggaagctttccctgatatacccaaccaaattggtcagtcatcctacagaacctttactctcattcacccagtacattggtgttactggcctttaaattttggactctctttttggtggtgtctgaaagactacaagatttagggagagtgattcttggagtctttcgataatgttcctgtgaaccctggtgattttaacatgcttgtggccactcttgcctcctacttgtaagctactcatggcaaggacgaagcatgtggaccaatttccacccctccctgaaagtcagttggttcagaaacttaggttgctaaaaaggccagggcaaccaacctgatctctctataagtagggatatcttaaaacaaaacaaaatctctctcatagataaaacactgtctctgataagcttacttgcaaatgaaaaaatacaaaataaatggaatgtacagagttctataaaattcattcaaccaatagagcaataattgagcctacagagacaacttatcagaaaattcattcaatataccttacgagatcatccaatagataagagacaactctagaacagcattcagaacatagtggcactcaataaatttcccctgaatgaatgaattaatgaattagtgcatattttaatcagcctcctttgccctcacccaggaagtcagaggcaccagtgtgagtatccatctgctgtccagtacattcatggattcctcactctcactagacaatgtttgaccaggaagaacagggaatgagaaggagctgctggatggtgatgagccttggaaagggaggctgggcgagcagagacagaagagaaacacctacctgctgtgacctcacaaacacccaggctgagttttgataagacaggttgaatcacactggggtgacagcctcatccctccaggtacaaacaagaacaggccatggttaaccaaagctccacaccgggcttcctccttctgggcttctctgaacacccagggctggaaaggactctcttcgtggttgtcttcacttcctacctcctaaccctagtgggcaacacactcatcatcctgctgtctgcgctggaccccaagctccactctccaatgtactttttcctctccaacctctccttcttggacctctgtttcaccacgagttgtgttccccaaatgctggtcaacctctggggcccaaagaagaccatcagcttcctggactgctctgtccagatcttcatcttcctgtccctggggacaactgagtgcatcctcttgacagtgatggcttttgatcgctacgtggctgtctgccagcccctccactatgccaccatcatccacccccgcctgtgctggcagctggcatctgtggcctgggtcattgggctagtggagtcagtggtccagacaccatccaccctgcacctgcccttctgccccgatcggcaggtggatgattttgtctgtgaggtcccagctctaattcgactctcctgtgaagacacctcctacaatgagatccaggtggctgttgccagtgtcttcatcttggttgtgcctctcagcctcatccttgtctcttacggagccattacctgggcagtgctgaggattaactctgcaaaagggcggaggaaagcttttgggacctgctcctcccatctcactgtggtcaccctcttctacagctcagtcattgctgtctacctccagcccaaaaatccctatgcccaagagaggggcaagttctttggtctcttctatgcagtgggcactccttcacttaaccctctcatatacaccctgaggaacaaggaggtaaccagggcattcaggagattgctggggaaggaaatggggctcacacaaagctgagggagagctgcttaatgtgctttaaaagagaggagattctatgtgcttttatcagaaagtttgagttccctgcccctctgccttcttcacacccattacattgtgggaatggatgaaagccacatgtctgtgtgtgtgcatgtatgtgtgcaagagacagcgactgaaatgtagtaaagggaggtatctttatgcgaaaaattataggcatcaagtatattttatatttttttctactttaagtcttcgcctccatagtcatgttcctacctttatcacttccatttttaattcccctcccttgccatatccccactattccttcacctccaattctaattcctaccatatcttctttgcttctccctcatgtttttcccacttcactatatgtctgttttgtattctcattctattttattcctcaaataacagcaaaagagaaggggaagctgaagcccagctaagttcggaaactcacccaagaacacacagtgtccacagcatcagaactaaaatccaggccccataattttcagtcaggcaactctcaaatacacactgttgctttcacaccataatcaaatatcccagtatttcaggcttgagccttacaaaggaaacttagcttcttcagtcctatttcttctcttacaatgcccacaaatcgcaggtaaaggagcagccaaaaagacacaaaaatatcttcatgtttaggctggcacattgtggaccttggtgtcatctaccggccaaatatggtattgcatgtgacatcccagacttctgctccagggtcatccgaactgtactttgctcaaagacatagatatggttatgatactataagcatttatgtaattgttatgttaacccaagtaacacttaaagtacagatgctccttgacttataatgatgttacctcccaaaaaacctatcatatactgaaaatattgtaagttgaatatgcatttcatacacctaacctaccaaacatcatagcttagcctagcctaccttaaacatactcagaacacttacattagcctacagttcagcaaaatcctcaatacaaagtctattttataataaagttttgaatatctcatgtaatttactgaatactgtactaaaagtgaaaaaacagaatggttatattggtactcaaagtacggtttctactgaatgtatctcttttgcattattataaagtcaaaaaatggtcaaagtcaggaaccccctgcaatttacacatattgacttatttaacccttataacaacactatgaagcagataatattattatcctttttcagaggtaaaaactaaaacacagaatttatgttaccacttgcaaatgtgcaagacaggatttgaacccaggaaaactggctccagactccttgctcttaaccttgccttttggtaaaaataatgcctcccaggcccaggtgaaaagcttcaacttctcaacaagctttgaggaaatcatttcaatctaaaactatatctaaatgatcccccagccgaaggggtttcacttccttaaaataagagtttttcaaatacttcaaagcataagaaacaacagaacaataaaacttttggaaaaagttgtgttacagttcattgtgtgtgtgtttctggcttagttcacccactagatttcaggctctcagaaggcaaggaccagaattttgcataaaattggcacccagttttataaatgtataagtgaatgaatgaatgaatgaatgaatcttactctccaaagagaatatataaaaggttctggggttccaatcccacatacgctgtctcccagcttttccctggcaagggcagcaataccaaattcccttttgagtacacgccgataaaataagaaaaaggaaaatcttagttttatttctagttccaacataaaatgattttgattcaacatttatcctggcatcagcacagaacagcaacattaattctattataatcctaatctttatcctagccatccttgtgttaatcttattgtctccttgacctcgttattagagcatattctaatcttaatgtagagcccccattttatatttaataatcctaatcagtcaggcgcagtggctcacacctataatcccagcactttaggaggccaaggcgggcggatcacgaggtcaggagttcgagaccagcctgaccaacatggtgaaaccctgtctctactaaaaatacaaaaaaaaaactagcctggcgtggtggcgtgctcctgtaatcccagctacttaggaggctaaggcaggagaacctgggaggcggaggttgcagtgagccgagatcatgccactgcactccagccagggcgacacagtgagactctatctcaaataatcataatcataatcataatctcagccctacaggtaaggctaagcttaattccacttttcaaatcactgtagtaagacctttttttcatgaccccctctatctgctttctcttactggcacctagaaatgtctacacttttctcctgtttatcatctccctacagccagaggctataatgtttgtatacagtaaaatcgtttctagactgactctaggggaaatgcaacagagaattaaataaagcagtctaaaagaatctgctttgttgaataaatggtttaacataggacttaggactaacatctcttatcctaaattcattgtttccatgtgacagtcatctattggatactctgtgagaaaatccaatataaagttactcagtcacaacccccacaatgtccagtgaaaatagggatggtcaggcacatagtgccagcatacatgacagttacacaactgaattggagcaaataagagtctacaggaatacagaattaaagaataatgtgtgtgagtgcttggagcggcagtgatcatggaagcctcttagaggtttgaaccacagaagagtaaacaaaataagaagtatttgctgactgtgtagaaatgagatgatgcaaagaccccctttttaggggcttggggactcctaagcatggaaataaagcaaaatcctgtgtttcttcaaggaaaattccaggcacctagctggctctgagaaataagtagcaacttgaaaagcaacaaggtaatagcagcctaagacaatagccaaggaagttaagcgttctgaataggtttgctttcctcatagaaactaaagataacctcttaacatatgtctctgcgttgtctctcagaaactcggaaccccaccaaatgaatctgctggcatagacctcagaggacaggaaaatgactgaactttataaccatcatcctttgttctaagtttcttcctgaggagcttggagaaagtaacaccttctaggcagttaacatttttctactggaccccaaatttttaaacaaaggttctcttccttaactaattgcaaatttggggtttttttgtttttgtttgagacaggcttttgctctgttacttaggccagaatgcagttgcagtcgtagctcactgcagcttaaccacccaggctcaagcaattctcctgcctcagcctctaattaaaaaaaattttgtgtgtgtagatacagagtcttgttatgtttcgcaggctggtctcaaactcttggccttaagggatcctctctccttggcctcccaaagtgctgggattacaagcatgacccacacctggccagaaaaatctttgaatctacctataacctgtaagtccctgattcaagatatcccacccttttagatcaaaaccaatgtggaggccgggcacggtggctcacggctgtaatcccagccctttgggaagcaatgtgggcggatcatgaggtcagatcaagaccatcctggctaacacggtgaaaccccatctctacaaaaaatacaaaaaaaaaaattagccaggcgtggtggtgggtgcctatagtcctagctactcgggaggctgaggcaggagaatggcatgatcctgggaggcagagcttgcagtgagccaagatcacacagctgcactccagcctgggcaaccgagcaagactccatctcaaaaaaaaatgtggaacctctatgcactgatttccaatgttccttgtagcttctgcttttctgaaatttacccctgcctttttttgtttcctgttttttgagacagggtcttgccgtgttgtccaggctggagtgcagtggcataatcatggctcagtgcagcctcaacctcctggattcaagggatcctctcacctcagccttctgagtggctgggagtacaggcatatgccaccatatttggctaatttttttatttcttgtagagttggggtctcactttgttgcccaggctgttcttgaactcctaggttcaagtgatcttcctgcctcagcctctcaaagtgctgggattacaggtgtgagccactgcacactgccttacccctgcctttaaaaacccatgttacaatagttagtcagacacgagcagggcaggaaagggcctccttccccaccaggaatgtcaggcaaccatcaggtgataggcggttgttaagctgtctctctaaaataatcattggtcacagcctgtgccagggaaaaacagtctcccaataaatagaaaaacctgaaactaagatctcaggagttgggcaagtgggctcatgcatgggcactaagggagaaatgacagcatttaactggtttataaccttataggaacactccctggtaagggaagaatgcctcaagtcagcatgcatactactccagtaaacataccgtgcatgcagcccctcccaagcactagcaggccactgtacatgcagacagcccaccccaagggaagattcaggggagaagggaccctggaaccctgccaacatataaaaccctaagtcaaggtcaaaaccacgcacttgatctctcaagttgcctgcttggcccccttccaagttggctttactttattttgttcctgctgtaaagctttttaataaacttttactcctgttctaaaatttgcttcggtctcttactctgctttatgcccctcagtcagattctttcttctgaggaggcaaaaattgaggttgctgcagacctgtacagattcgcagctgctaacatattttcatgccatgtaactctgatacattctgccgctaatacccttgcctgcaagacatcagggaggccaggacttgagtgtttagctgcctggtcctccctgcgtagtgtcctgcaacaaatgcctttctttctattggtgcaatccttggtgtaagtatctggttttattgcaccaggcaagcagaccccagtttggttctataacagaaaaggctaaagacaaaaataagcatgttgtgcattaagatagggagatgtgggggaaggagttacaccgaggagcaaaatgattaagcaggaaggtagagattatttcagaaagatacagaagctactgaattgaatacaaccagaaaaaaaaaaaaaaaaaaggatcccttacagatgtttcaaacctacatgatttaggtctcctgagggcaggcacttaactattcattctaacatgacatgtgagttggaagccttaaaggaacattattcaagaacctcgtctctactaaaaatatgaagtctctaataaaaattaaaaagtctctactaaaaatacaaataataataataataataatagccagggctggtggcaggtgcctgtaaaccccttgcttgggaagctgaggtaggagaaccacttgaacccaggaggcggaggtttcggtgaaccgagatcacgccactgcattccagcctgggagttagagtgagactccatctcaaaaaaataataataaaataaaataaacctcaaacgtctgaagggctcaccgaatcatgaatagatgcttatgtgtagggcccagccctgtcttatccttctatctcccagggaaggggaaaccttctggctcctcctatgcagaattaatcgctcacccttgaagggtaccagtatatgccacctcaaactatctttagcatgtggattattttgagctaacaattgaaaatcatcagactagtgaatgctgtaaaacaggatacaagttttccttttgtaaataaattcacatctgtaaaggtacaactcttactaatggagaagacatcagtttaaatctacataacaaaccttttctatctgtaaaggtacaactctactaatggagaagacagtttaaatccacataacaaaccttactaaaccactttgttccatattttcctggtcactttcccataacttgcctgcccatctaccactcacccagaagccccaaactccttttcctttacctagccaagatgttatacagttgctaagaacaacacgatttgaactccatggattcactcacacatgatttttttcagtaagtatattgaaaatttttggagatttgtgacaatttgaaaaaactcacaaaccacatagcttagaagcactggaaaaattaatgggccaggtgctgtggcacatgcctgtaatctcagaactttgggaggccaagatggatgcattgcttgagctcaggagttggagaccagcctgggtaacatggggaaaccccatctctgcaaaaaaaaaaaaaattaactgggcatggtggcacgcacctgtagtcccagttactagggaggctgaggtgggaggatctcttgagcccaggtggttgaggctgcagtgagctgtgattgcaccacctcactccagcctcaattaaaaaaataaatagggctgggcacggtggctcacgcctgtaatcccagcactttgggaggccgaggcaggtgaatcacgaggtcaggcaatcgagaccatcctggctaacacggtgaaaccccgtctctacttaaaaaatacaaaaaattagccaggcgtggtggcacacacctgtgatctcagctacttgggaggctgaggcaggagaaacgcttaaactcaggaggcggaggttgcagtgagccgagatggtgccactgcactccaacctgggcgacaaagactccatctcaaataaataaataaataaataagagaaaagtatgtcatgtgtaaaccaaaaataaaattctaagccccctaactgacaggaagaaaggtaagacatgccaatgataccctccttcctctggagtttagggacaactgaccagcattaacattacaatagagatcataagactgacaaaagattctctgtagcaataaaatagtcaactccaacctgactctgatacagcatcacaccacagatagcaggccctgaaggaaatcaaagtattttaccccaaaatatacttatttgacattttgaaatgactctgcaaagccatttcttgtcatggggatttgcattttgtagagaatccccttccccttccaggtctttttctgatccaggagggattttactaatgagtctgacatcttttaaggtgcgataagaaacatttaccatctattctttctgaggcctggaagcttcatctacgtaacaagaatctttgcttccacaaacatctcccccaacgccacctccacgcccccttaactcaagcatttctttctgctgacttcaactctttaggcagggcttaactttttcaaccaattggcaatcagaaaatctgaatccccctatgacctgtgagctcccttgcttcgagatgtcccgcctttctgagctgaaccaatatataccttacatgtattgatttatgtctttgtcagcaacttctggctccctaaaatgtatgaaaccaagctgtaacccaaccaccttgggcacatgttctcaggaactcctcagaatggctcagaataaacctcttcaaatattttacaaattttacttttttcatcaacaaataaatgtataaaatatatgtagatactaccaaaaaatatacacaaatctactataaaaaccaaaaatttggccaggcacttagggaggctaggtgggcagattgcttgaatccaggagttcatgaccaatccgagcaatatggtaaaaccccatctctactaaaaatacaaaaaatttgtccggcatggtggcatgtatctgcagtcccagctacccaggaggctgaggtaggaggatcacctgagcctaggaggttgaggctgaagtgagccaagatcacgccactgcactccagcctgggcaacagagtgagaccatgtctcaaaaaataaataaaatttatcaaaacttacgcacacacttacagaccatacataagccactcaaagtcaagagaaagcttaacaaaagatgcagaattaaatcataacggcataaaattaactgtagtgtatactgttctactgtaatttgatagccacctcctcttactattgcaaagagctcaactgttgcaagtatctgcctaaaatgccaagtgacactaatcatctctgcatgagcagttcatctatccagtaaattgtgtatagcagtaaagagtggtctctcaagattcttgcatatatttcatcatgtctagagcaatactgtgaaccttaaataacaccatagggcccatatgaagtgccaacagtgatgctggaagttctcccaagaagcaaagtcatgactctataaaaagttgaattgcttgatatacaccatagatcaaggtctgttgctggggttgctgccatttcagacagacgattcatcatgtaaatgatgtaaacttaaggcatcaataaatacagtatagtaccctatatgtattttccttacaattttcttgataacatttccttttctctagcttactttattataagaatacatatataagatgtatagcatacaaaatatgtgttgatcaactgtttacactactagtaaggctttcagtcaacagtaagctattagtagctaagtttggagagagtcaacagttatgtgcagattttcgtttgtgtgtggggtcagtaaccctaaaccccaagttgttcaaggggcaactatatgagctccaaattcttttttttttttttttgagtcagagtctcgctctgtcaaccaggatggagtgcaatggcgcgatctctgctcactgcaacctccgcctcccaggttcaagcaattctcctgccttaccctaccgagtagctggaattacaggtgcctgccaccacacccggctaatttttgtatttttagtagagacagggtttcaccatgttgcccaggctggtgtcaaactcttgacctgaagtgatcccccagcttcagcctcccaaagtgctggcattacaggcatgagccaccacacccagccatgagcccaaattctaactgcccctttgcattgttcaccactgggtactcccatgtgtacatgcatgaagcaaatgttaataaacttctatttgtttttctctcattaatctgtcttatgccactctaatttacacagccacggctggagaacctaagacaggaagaggaaaaggattttctttcctacactccctacacacacctggggaatgcactctgcaggccacatgacgttgcttctgcatctgtctccctagctttgctgcatcagtcccagtgtccagcccacacaggcctcagtacgtgtccctatcacagctgctgctggtgctgaactcaccttccaggagagtctccagcatatccttccacactccagggagccatgtaagtggatgccatactggttaaatattttgagtagcatcccatttgagggaagctgtcacttaacatgaacccaccataaggtggctaatgaatagcacctttctgcctgccttcaagtgacagcctcccttaacatgaagcctaccttttggtaagcttcatgtcaagtgatagcttccctcaagggcaaagtcacagaattatctgtttcaaaagcctgagtggataaacaaactgttgcctatccagggtgtcctaaaactaccaaggactgtgggaggagcaattggcaggaccatcttcaacacttcccattttctgctggggtgagatcacagctggcccccaagcatccagaggaatccagggcctggtaagaggctgtatgacagcaaatatacaaggctagggtgctcagctcagagggcggacaaagaacatgttaaagtgaagtgaacactggctttgcagcaggcagaccagatgcagcagactgcttttaccaaagcagcctgcaacacacatttgtcccattccacatgttctctttacagtgtgacttacgctcatcccaccaacaggtgaagtgtttcctctcctgaacctaggcatggccttgtgactgcttggaccagtggaatatctcagaagtgatgctacgtgactttcaaggctttgtcagggaaaaaaaaaatacagcttaaacctggctgactctctacaactgcctccacttgcctttggaactgtcattaggtcatgaggaataccaggccacatggaaaggtcatgtgtaggggtctcagctgacagccaatacctcctttagatgctgagtgaaggatcttttggacaacaaccctcagacttcagatcttccagatgctgtggagcagggtgaaccctccccactgtaccctatctgaatttctagcccacaaaaaccatgatggataataaatgattattgttgtctgaagccatttagggtaacaggttttgtggcaatagataataatatatgcagtttgaatactggctttgctccttagttttgtgaccccagaaaatgaacacacagtccccttgcttttagatttgtccttcacaccagagctaatggctgtgagatgcccaacactcctggttgctctcttaagtgatctcgtttgtttttctgcttactggtcatcttcccacgtcgagaaggtacaacgcttgaaagccatcttactcaccattttgcctcagtgccaaaaaaagcacctgccacagcaactcaccatcaacacttgttgaagatcacctaactaatgtagcagccaagtgcacacaaagtgctctctactggtagacaaccaacaggagggcagggaggcaacaggctaagtcagggaaaagcaggggacatggaagcctgcaggcagtctacattctaggacattccagagttagaaagtgatctgaaccctacccaaaggcaggtctgaaaggcaaagcctgcctcacagtgcacagggagcaagtcctcccagaactgccaagcggtagcctctccacctggcaacacatctcctttgcaccccttggggtacaattatatattaattatatatcattgtgtgtgtgtatatgtatatatgtgtgtgtgtatgtgtgtgtatatctcattgtaattatatataatgtactaataattagtattagtgctaatcaatagcaccattcaccctgaaaagacactttcagaaatgaatacatgaagtctcattgtagataagcattgacagatgaacatttgcaactgatcttaatcatcaggaacattaactgtgaactcaaataagtagttatctcaaaattgtttttcttattagtaggaggcctgtatgaaaaatagtgctcagtcatgttttaaatttggccagtaaaaatcttacaagttctcttctaagtacctttttaatattctcaatctcactccttcccacccctttgcactgggcactctgctagccgcaccgtttggctctcgactcctgcactcctgctagcagagtgtctggcttacctttggccacagtagaacttttcaccctttgtttataatttacagcccacttaagtgcaatgcaagtttgagatgataatttgggtcttttaggttctacccagggctgttctatagctcctgctactgttgtttcttttttttttttctttttttttttttttgagacagtctcactctgtcgcccaggctggagtgcagtggcacaaactcactgcaaccttcatctcctgggttcaagcaattatctgcctcagcctcccgagtagctgagattacaggcacccaccatcacgcccagctaatttttgtatttttagtagagacagggtttcgccatcttggccaggctggtcttgaactcctgacctcgtgatccacccacctcagcctcccaaagtgctgggattacaggcgtgagccaccacacccagcctcctgctgctgttctgatgccaactattcattttccaaactgcaggcttatctactccatagacttcttctcttttcctagcggatatttcactgtgggaagaagagagactcaaattaagtccaactggtccaaggtggataatcacagtggaaagtttttcaagtactggtctaagattcaaccagcccatgctttagtggaagttcagaaattggctcttaacaggtcagtgaatgacagggcccatccaacccttgcagctgtcttacaaaaatctgagaatcactttaaaaatcagtgccaaaataaaagaaaatttgagcttcaaaaaagcactctccaagatgacacaaaaaatgtttaaagtctcaggcaaatgtttttgcccttgtccattcaagattttttttcagtttgatagcaaattatttccaagatgctcagagttcctaaacaaagatgtttaaggttggaagcactcagcagccatctcatccattaccttctagcagtcatcattcttttactcttcttagttcctgggaaggagcgtccctagaggggatgcttaggcacttgctccaggctcccaatacatgcccactactgtcaaggaactcattaaacagcagggacagaggctaacattcacgcaacatataccatggcccaagggccaacctaggcacctgaatgcacaatttataatagtctttgtacccaacctatggaggaatgtattactgttattctcattttcataaatgaggacatggggaatagagactaagaaaatgtttgcatgtggttggatctgataccctggcagtctgactccagagcccacacttttaaccagtagtgtcctcactcactaatctcagacttaatcatgtcctgcttcattctgctaagccctcaatggatcaataaaacacctcttttcaccctccgctttaatgccttttcatgaacttggagtcctctgagcctcccttcttggattgaagcccattctgttcacaggaagactgcaaggtgccgagtcacactgttcactggtttattgagattcggggagatccttccccaagagacaccacagtgtgaaagggacaccacctcccaccccataggtccatctgtctatcccaacagtcaagggtgccttcctttggtcaggattctcatcaactatccactggaagcagctctccaaacctgcccccacttatttttccttaattcccctcaaaaaaacacaaaacaaaagggagcagtcttgggagaagatgattgtgagtgtagactgagggtagtacatgaatgcaatggagatggggggaatctgagcagaaatggagattctgtgacaaggagagggtgtggatggccccaccaaacatgaattggggaaaagtgcataacaatgtgcagggtagggtacatatggctctgtcagaagaataccatgatttaagggaagaaagtacacaaggtacatggagggtacacagggaaagtacatggataaacatggacgtgtgcaaataggaaagacatgactcagcatgctagacaaattgcacatgcctacccaaacacgctcaagggcagacccatgaccatgagaggggcacacgtagctgtgaatgcagggcacccgagagcacatgtgactgaacatgaagaaagcatacgggaaaagcgtgtgtacacatgagcatgttcagtgggcacacgcaggagaggggaggatgcatgtgtgctgagcgtgagtgcacagagcagaggcaaggagcatgtgagccttggcgaaaagaatgagctcccaaaggaagcaaaattcagggggagccacatgtgagaaagtatagaagggcaagtaagatggaaagagattatgacagtggagaaaaggagaggcccctttggggtggaaagagcacttgttgggagacccctgctggacaggaacagagcacaaaggcagaggagctgcaggggttgccgtggtaactagaagagggtgttgcatgggaagagaaagatgcagtgaggctgctgaggaggcagcgtgtgagcagtgagcagcttcaagccaggtacgaactaaattgtgaagaggtgatacaaaattacatgaagcagtaagagagaaaaaggtctgtttcccagaggtatgagagacccaaatcagcccagaactcacagggggacatgtatttacaagagatgagattggatagcatgttcttcccagctggggatggggaccccctgcttcctgagtcccctgcccttcccctctccctttccctccccctactggcctgtcctccctcaccctaccctcacttataaagcaaatgcactcgactcccatcacagctaagccggtcggggggctcagggggtcccctgggcaggcccccagagggttctgggggtgtcggtgggtggcgccgggagcggagctgctgccgagactggagttgatggcgcagttcagagacacgctcctctttctggaggaagaagcacaattgggatagtaggagaagaggaggtgatgaaggagtggggaggagggaaagagaggaagggcacagggaaagagaggaagggcacagaaaaatgtagggggaggacgtagggtaagtggacagaataaattaaaaggagaaatcaaaacagaacaagaaaagccagagaacataaggataccgatagaaaaaatgcgatcagggaaataagagagaatttaaaaacaaaaggaaaaagtggggaaggagagaaaagtcagtgcacagagcttccaataaatcagagagatgtgtcaacccagttggaacatccctctctttggcattgcaccagcccctaatgacagcctggggcacagtgaacgcctgcccaggtcctttatgctggggctgcatgctacacccagctgctgtgagtgttgactactagaggctcacagctgcctctctccagttgtcacctacagccaacagccatcctcttgccttaaggaggctgagtcaaccacatagctcccactccagagcccttccacctgccaggccaacactggattttgcctgagatagaatcttgctcagccctttcccctcccctatgctgctccattcactccttacaggttgtctcctaggaccctccctccatgagccaagaacatctgaccctgtatctcaggcttggcttcagacaacccaagctaagacgcaagcctcctggaccactccaacaccctaccctgacacccacccccgcacctcagcaatgatcttttccagttcacggttctccttctccaacagccgggacttctcctcctcgttgttgttggtcgatgaccctgtcttcatggtgtcctgcgcctccgactgccattcccctcgggtgatcagcctgcgcatctgggggcaaatgtttgggcgtggggtggcccagcaaggactgtactagtgactggctgatggaaggttggaggtggaaggaatgctgataagagttgggcccaaaacaaggggaggagtgagaggagggtgaacggaagggcagaggaactcagtaatataggaaggagggatggagggaacatgggaacaaagagggtgggagaaaagccagatccttaccttgggcacaaagagcacaacaagagtgatataggaggagaaaactatggcaagagaggcaaaggcaaaggctgcatcctgctggctggacagaatcatggtgacaggagcagtgatgaggcacaggacctagagggaaagacacattgagggagtctcaggtctgcaggctcagacaagatccagagtttacttcccatgggagggagtctatgcagacagtttcctggtgaactttccctttgaaaaggatccaaattcaggatcatcctcaaatatagattgagaaaaatctcaaactgtcccaaaccagttttcactcttggttaacccctcccctcaaggcaggaactcccaggatctctatgcacagattccgggtcctccagagtcggtccctggcaggaaatgtcaatagagtccagcccattaaccacagacaagcaatttaacgtctctgtgtttctgtttcctcacctataaagtggggatactaatatctacttcactgggtagttgcaagattaatgatacaatgtctgtagtgagctttgtaaactgtaaagtgctttatagacctgaagaattaacaaactttttaagacttctaagcaaccgatcccagatctagcattgattcttcctagtcctctatatctgggctgctgtggtcagcctacagggtcaatgccatggggtcagtgctcactgccacattgtagatagccatgcccacagcccggtgatcattgatcttctcagtggacacactcttggtctcataagcaaggaagattcccagcagcagcagcagccccttgtaaccatagaaaatgcctaggatggcaggagagagtcacttgagcaacaaggaccacaatgctcctcactcaatccccatcccctctctgcccttcacctactctgaaatggaaagggggccctcctctccaatccaacccctctgacctagcaaacctcaccctgtgtcccctatcccttatgtccacccaacttgcccagaccacatcactttttcctgggattcacacaggaaagcaatggtggcaagctgctgtcagtcaggcaagggcttgttgaatatctagaaataggccagtctgggccacacatgcctcacccttaccctacaggtgggaaggtggctttccaggcagagggtaggtttgcaatttgtgaccatgaatcgaacaatgctaataaggccaagggggatctaaaagataatgtcaagtctggaggtggggttacccccacttgttcctctgctgaacacaagttcttcatctgtgctttctgtgctttgggccctaagctcctcatagcaaaagagcaactctcccctattctcagaaaagattagtgcaataacaaagagtagggtgttcaaactgggttgacaagctctctacctcctcttccaaagacccctctccctccaagccctctacccctgccttccctcctgcctttgtgcatccctgccctcctttgcccacatcccacacaccaagccatgtattcatcttcctggagctgcaatgctccagctggggcagaatagagacgtcaatatcttccttaggttcctccttggcaaatgtctagggcagaaacaaggtcacaagaaagatggttgccagcctcccctcctctcctcaacgcttctcagtctctggcttccaactgttttcctatgagaccctcaatgctgatgccaaatctcattctaggcctaagaatgttttcctgaacccttggaggtgcttgttccccactttccctgatgcctggaagttctacacacccttcccagattcccaccccttcctttcttcagctgaatctggaggcctatgaggggctccttctaggaaggaaaggaagagcttccaatacgaggaaggcactctctccaagtagcttcatccctcaagacacacacagccccagggccctgatggccactgagccctgctcattctcctgaccatagcacctcctctccagtggtacctcaatggtccggtgcagagggtccacgatctgccagatggcgagagtgaggacatccatgcccaccagcaggcccactgtggcatacagcttccagggttccagagtctggataaatatgtggggagaacaggcacgtcaggggaaaatgctctgtgccccaggagccaaggatctgggggctgaggattgggcagcagctcaccttcctccactccttcttttcttccttctttgtgaagaccgtgtggacccaccaaatcttggtgaacatggaaccgtagcccagactaaagcccaggcccaggagccagaggcgggcctagaaaggaagagagggcacaggcagaacagggtagagtagtagccgggactgcagtaaggatgggcagaaccctaagggagagtgggcagggagcacgggcagggagctcatggtggcacagggaggatgcgaaaatgtgagcaggacggggagcggcaggaggagagcagtctccccaccttgaacaattcctcccatccaccctctacttccacaccaccagggtgatcttgctaaaacctcctggctttagtggccaaaaacctccaaccactccccaatatctataagttatagcctgaacacttctggatatgacacagacccttcacaacatgctcccatccacctgtccagctaggctcatctcccagccccacacctaccccacgctccagccatgctgaactactcactttctcttcatctactctctttcatgtattttctagccacacgatgctccctatgcccctgaagtagccttcctctatttctctagctgataaaatcctatttgtccttcagtattcaaatgccacctcttcagtgaggtccacccaatcacgccagcagtgaactgtgttcccttctttgcccccaaagcactttgtgcagatccctactctggaacctctcctattgcactacagctaattgtctgcttctccagctgcactctggcctcactgggaacagaggattcctgatgaactgcatgtgcatgtgcatggaaatgccatgtgcacagatgtatgatcaggacagcacagagcagaggaaaaagagagagcaaggacaggcaggcagatcaggagaaagagtgggtgtttccaccagtggaaaagagaaccactcaactatcactgttgaagctggcctctccccacagcactagaaccttccatgtaccaacagtcccagagcccctcctccctgtgtggcagtggtcccttccccccaactctctgctgtgtttccatctctgcttctatccttccaaacccaacaaaggctcccaaaaaaagtccacagttctgattctcagcccccataccacagacaagccaccattgttcaggagacctttgagcagatccccttcctttgccttcaatggctccctcctcttctctgcaaggcctgccatggcaaccttggaactgacaagtaaactacagaatgaaaatggcctgcagacacagaaagaagggacagagccaaacagagaacagaggggtgatgctagaaggaaagaacagggacaagagtcagggaaagctgaggaggaagggcagagaatcataaatcatggaaggtgctcctgagacgggtgggagagtcacatcctgtaaggaatttgcccaccacctcctcacctggcagacgaaaggaaactggttcctcccaatgtggtaaccatcgagccccagggggaagacagcagctaaagccagtgagcagcccacagcagtcaggttgttcaggttgggctgtgagttctggatataactagggcagaggtggagagggtgagagggagagagaattacccctcttctccagggaggctgagctctccaaataccacgcaatggcatgaccctaatttcagggccaggggctaaaggaagacaggattggagaagacagtggagccttgagaggcagagcaatgcagtcatggggctgaagatggagttgcagagggcttcccaagcacaggcccccactagaatacaggctatttatgtagagtccaagactgtgagacctggccccaaaggttgtttttttctcttcttttcttttttcctcccgttagctactttggagtaggagtgggggttatatctggtttccctgttttcattctcaacaagtcagaatgaaaaactccatgatacatggccatgggagttacacaggttttattctcatcctgtccaggaacatgatcagtatctcagagaggcagacaaggaaaacgtcagaagagaaacttaccggacatgtgagttgtagatgttaaaggacagacagacaacagctaggacaatgcccaggctggagagaactgagacggagataaagagtttctgtgacaggaagcggaatgtcttgatgaccagggtctggtcagctgggggggaccctcctgcatggcacaggggaggaagaggggaagggaaaagagaagggaaggaggacaaaggaatgaagacgggataggagaaaagggcaaagaactagattgctgatggacattcagtcattggctggggacatgaggccctaactgcactggacagaggttactgcaggcagaatgctcagtgccactggggccgttaggaagcaaccagaaatgagatgagaagatggagtgaatggtctatccataggttgggaaatgctgaggcatgtccccaaagttgtagtctttgtttttgtttgttctttaagtttttctgtctttcttacagcaaaggaaaatgggaggagaaagaaggggatcattaaaaaatgttataaggtttcttataacccaaatcaaagttttaaatgacaattatggaatcataaagctaaaaaggccttgaagtatctagtgtggacacctattcttaagacaaacaaaaaaagaaggaaagctaatctgaaattttaatcctggcagggtaatattcccaaatatgttttccagttattattagggggaagttcaaatttgtcagagttcaccaaaaaaaactaatttcaatttgcttagttttttttttaaagaataatttaggccatgcagcatttatagcaatccagaacattgtcctaaattcgaattgtaaaaaaaaaaaaaaaagggcaaaactccagcagtgctgggaatgactggatatctgctgggcagggcagacggcagccatcttcaatggttgagcctccccttcattctcaaggaggctttcttttatcagtaggtccttccttttgtccaccttcagtttctctcctatgtcctatcatttagaccaagtacacaaagaataactgcttgctttctctctttaaaaagtatattttgagggatgtaatactacctattaggtacaaggtgcactgttcgggtgacaggcacactaaacgcccggacttcaccactatgcaatatattcatgtaacacaactgcacgtctacctctaaattacataaaaataggaaaatttttaaaaatacatataaaaataaaaagcacattttggcagatgacaattacatgaggttttccctcctcctccatagtttaagcaaccgttttcctgacagagacagacaaagagacagctctgggcttgaagtagctggttcaaatatatcaagacaccaggacatctgggaaacccaaatggagtttccatttcccgccctctgcccaccccctgcctctaatccccagttaccccagcaatgcaccattaaaaatagtactaaccaccgcctattccctctccaaatacaccagtctcccctacccacgccttaggggttgtattcactctcacttaaccctttctcctggcccagctgccagccacattccaacctaacagtctctaccattccatcctcactcaaaggcatgactttttcccttgactgtcgagaggggctgaaggaaaatacaaacaagatccactcaccaatccatttatctgttttggaccaggaaagatcatccttggtgctgtcatagtagccaatcttcttgtagctgccacctgggcagacgacaataaaaggagtgaccacaggtagccaaagagctgatcctaggcattttcaacttcccacttccctagagctttgcatggttgtatctgattttattttcacctgaggccctaaggatgcttggaaggacctacgagactcttgaatcagcaacatgacttaaaagcaatataaggtggttcccaagacaactcaaataaataagaatatctatgtttaaaagtcttcagtgaggaggctccacaacatgtctgccacctattccattcctcacacctctctcggcgagatgtctctcactttgattttggcttctaaagctttacacatatttctgcttattcttcctctcatgatgggcaggctctattttcccagtggctttcattttaattttagaacattctcttctgttggcttgggttttaattccttggataagttatatctgcctcttaaagcgccattgagtaaaatttggtcatttctaagatttctgttctagaactgtttccgttaccataacttttccttcaaaagccaactcacactcctttcaccatggctgaagtccatttcctcttgtcctggatacaaagaggagctgaaaggatgtggaggtggggagaaaggaagaaagaaacttttcacaggaggccaagaaatagctctcttggccatgccgtaaaagactgagagccgagtggagcagaaaaattaactcctagaagttctgcaaatacctgtgtgctaagtttcaagaaaatacaatctacaaaagccaagctatacacattgaagctttacacagcaaggaaatttggcagattcccttaaaaaaaaaatagcggttctcctagattcagctttcttgagtctaactgacaggtcatcaacctctcaacccaagccactcaaggggaaattcctgaaattaatggaagccactgggaaagagagtagctgtttttaatttgcatgtctcttttcttttcttttttctttgagacagagtcttactctatcacccaggctggagtgcagtggcgtgatctcagctcactgcaacctctgcctcctgggttcaagtgattctcctgcctcagcctcccaagtagctgggactacaggcacctgccaccacacccagctaatttttttttttttttttgtatttttggtagagacaggtttcaccatgttggtctggctggtctcaaactcctgaccatgatcatgatctgcctgccttggcctcccaaaagtgctgggattacaggggtgagccaccacacccagcctgcacacctcttttcaagagcaaaaccagtgcaactcaaagacatcaatcttcttgtagttaagcttattattattattatttacaagcttgatgaacagagttaaaagagaagggcagaagttgggaggtgccagggcaatcttgtgatgtctctggcattcttccccagggggcatcccagcccagccccagcctagcccccatgtccggtcccctcctgcccctgtactaaccctgaagctgctcgataagcgtccatgccatccgagagccgctggcatcaaacaccacatggccctgagggaaggaacatgtggagcaaggcaaaggagacaaaagcaagagtgaaagagaacatcagggactctttaaatccttctgtttttgatgtaattgagcctctgaatgaatgctatttatggcatttgcctgcatataggacataccccagatgcccataccctagattttagaaacattattctttggagaaggagcttcacttatgagatttgaatgggaaaaaatccccagacagaacaccagcaggcttctggttgtgtggcctaagcaagtcagcaaatctctctggaaactaatcttttcattttaaaaggaataagaagatgacctttcagactgttttgtctttcaaaatcctatagttctcatctgactcatgaatacttggtctagtttgaaaagaaatgaggggaggggtttaaaaaaatggaatacatcattttttttcctctagtctttgatgggttcttctaatttgaaggtccctacttctctggtcggagactgattctgcaaagaagtaactgagaaaaacagagaatgcatgtttgtagaaggtgcctcttgggagtctctctcaagattgggaagacaggggagtatgaaggaagttttaactcacagagacaccctcaaaggacgaagagttcattgcccggtagatttggtcggtaatggtctggttgttgtagttgaagtcctccaggcgcacaccagaacggccgcctcctccagatgtcttgttcagggccagtgccaaggcccagatggcatcataggccagcggtgcctcctggaagcctcctgtctcctcagggtgtcttttcagtcgcttggttagtttctccacaaattcctgggatgtcttgggaggaaaaaatcatgaggaaagaactgaaatgtgtgtgggtgtgggggaaggggtgcaatccaattctgactcaatcacttctacttgaatggatggtttgtgttactgttgtcagattggacacatgtacattcaaaatctttaactatacccatgtgtctgccttagatcggaagctactagactagagtaggtattagctgtgtctgatggtgttagtgtgtacagttgctagctcagaactgcaaacagagaattttgacaaacactctggataattagtggcaaaggatggaaggtagagcagagtaaaggaggagacatggatattccaatgaagagctgtgacactgatgttctctgatccttctgactttcttcatagagttaacccaggatctaacagctcctacaattccaaaagattctagaaaaggtgatagcagtcttctcactctgcttgccagccaggaggatatttcttcagcatgctaacttcttgccattcttgtgtgcttttggttcactgcctcttagaaggctttcagaagaatgaaaactacagaaatacccttcacatttttgaagtccattatcaatcctacccacacccctcccaacactcaaccttctttttccatgaaagctaaaaagaatgatagttcctttaactctctcatgaactgggtcaagagacctgacttcatataccttgcagtaaccttgtttggctaaataactgtaagtaaattacttaacctcttggaactgcattctacatactggagaaaatcacatcattccttccttacctcacagaaaccatacaaggaaaagcttagcaactacttcttgggaaaccacaagtaatacacaggggaccatacaaataattgtttgggtttggaatgttttaacacaaacggtaatgaaagaataaatagatgaatgaagaataaataaataactttgttcctcatgccttgctcacttttctctccaactttctagagagatagaggagtgagatacgcaaagggcacaggcaaggtacagcagttgctactacactgggctttgaaggagcctgggctttgaagatgcaatgggcctaggttctacccttgaggacaagaccaaatcccatgccctctcttaatcatcagcatctagcactgtgcccaaccataatgaagtaacaataaatgtccattggattaggccagtgaaaatactctgtaaagtatttaatagtagatacgtctcattatacatttgtccaaacccatagaatatataacaccaagggtgaactctaatgtaaactatggactttgggtgattatgatgtatcaatgtaggttcatcagttgtaacaaatgtaccactctggcggaggatgtcgataatgtagaaggctatgcatgtgggaagcatatgggaagtttctgtaccttcatctcaattctgctgggaaactaaaactgctcaaaaaaaaaaaaaaaaaaaaaaaggccaggcacagtggctcacacctttaatcctagcactttgggaggccaaggtaagcagactgcctgagctcaggagttaaagaccagctgggcaacatggtgaaaccccatctctactaaaatacaaaaaattagctgggcatggtggtgtgcacttgcagtcccaactactcaggaggctgagggctgaggtgagaaaatcacttcaacccaggaggtggaggttacagtgagctgagatgacgccactacactccagcctgggcgacagagcaagactccgtctcaaaaaaaaaaaaaaaaggcattataaaaaacaagtcaggctgggcacagtggctcacacttgtaatcccagctctttgggaggccaaggagggtggatcacctgaggtcaggaattccagacagcctggccaacctggtgaaacccgtctctactaaaaatacaaaaattagctgggtgtgttggtgggctcccgtaatcccagctacttgggaagctgaggtagaagaatcgcttgaactcaagaggcagaggttgcagtgagcagagatcacgccactgcacttcagcctgggcgatggagtgagactctgcctttaaaaaaaaaaaaaaaaaaaggcagccaggcacagggggctcacgcctgtaatcccaacattttcattttcagaggccaacgcaggaggattccttgagcccaggagtttgagacaagactgggcaaaacagagaggacccaactctacaaaatttttttaaaaattagccagacttggcctgggcacggaggctcacatctgtaatctcaggactttgggaggtcaaggcgggcagatcatgaggtcaggagttcaagaccagcctggccaacatggtgaaaccctgtctctatgaaaaatacaaaaattagctgggcacggtggctcacgcctgtaatcccagcactttgggaggctgaggcgggtggatcacctgaggtccggagttcgagaccagcctgagcaacatggagaaaccctgtctctactaaaaatacaaaattagccgggtgtggtggcgcatgcctgtaatcccagctactccggaggctgaggcaggagaatggcttgaacctgggaggcggaggttgctgtgagccaagatcgcgccattgcactcaagcctgggcaataagaatgaaactctgtctcaaaaaaaaaaatacaaaaattagctgggtgtgatggtgggctcccgtaatcccagctactcaggaggctgaggcaggagaatcggagaatcgcttgaacccaggaggcggaggttgcagtgagccaagatcatgccattgcactccagcctgggcaacagagcaagactccatctcagaaaaaaaaaaaattagccggacttggcttggagcagtggctcacgcctgtaatcccagcacttcaggaggctgaggagggtgaatcatgaggttaggtgttcgagaccaacctgaccaacatggtgaaaccccatgtccactaaaaatacaaaaacttatctgggcatggtggcacgcacctgtaatcccagctattcagaaggctgaggcaggagaatcactggaacccaggaggcagaggttgcagtgagccgagatcacaccattgtgctccagcctaggcaacagagcaagactctatctcgagaaaaaaaaaaaaagttagccagacttggtggcatatgtctgtgatcccagcttacttgggaggggctgaggtgggtggatgacttgagcccaggaggtcaaggctgcagcgattgtaccactgcactcctgcctgggcagcagagggatactctacctcaaaaaaaaaaaaaaaaaaaggctgggcgcggtggctcacgcctgtaatcccagcattttgggaggccgaggcgggcggatcacgaggtcaggagatcgagaccatcctggctaacacggtgaaaccccgtctctactaaaaaaaaaaaaaaaaaaaaaaaagtctgttggatagataaatggatgaattcatattctaatcattttacctgctatgaaatctcaaacaagttattaaacctcactagttggttattcagctttaaaatgagaataatactatctaaaatagtatgaaatgaaattagaacatgtataaaaatgctgggtatgaagtaagttacattttctctacgtgaatttccttgactctcaacctcatctttgttattgatactcagatctataatttcagcccaatatttcaagtccatatttcttttctttctttctttctttttttttttttttttttgagatggagtcttgctctgttgccaggctggagtgcagtagtgcgatcttggctcactgcaacctctgcctcctgggttcaagcgattcttgtgtctcagcctcccaagtagctgggattacaggcacacgacaccacacccagctgatttgtgtatttttagcagagacggggtttcaccatgttagccaggctggtcttgaactcctggccttgtgatccacctgcctcagcctcccaaagtgctgggattataggcgtgagccaccgcgcccagcctcaagtccatatttctaactgactctgaggcatttttaatgtatgatgaataatctcaaaatcaaaatatccaagatgaagctcaattttttcttactcccaaacagctcccagtaaatgagactgaagccttggaattacatcagaccctttcaaatcactgagtcctcttaactcttttgttgaaatgtttcattgatatcgatccctccttacacaggatgatgatgataatgataacgatgatggtggctaacatgtatacagtccttaggacgtatcgagcattttcctgaggaaactatattaccttatttaatcctcaaacaatccaatgaggtgttattatccccattttagagataagaaaactgaggcacagaaaagttatataacttgcctataaaaaagttatactattaatgagtagcagagctaatccatactcttaccagccaccctacacagtctctgtacatgagactgcctctctctaagagcacctgcacaaatagcagctaggctaatactttgagtagtcttttggcttcaaattgaaagattggtctatccaatcttcagttcaaggtaaatatggcatcaaaaaaatcacccagaaagaaagggattaatctgctcagcacgatgcggtcccctgctcaggtggtcagaccctgtgctcacgccaggtcactaccactaacacgcctaaccactgggggcaccactgctcctgccaccccaagagtaaagaagagtagaatgcttcccccttgagtcagtaaagatacagttatagattgtcaaagagacactctactctgcagcttaaggaaatctgaacaataaagacccctcaacccacagcaattagttaatcaaccaagtgcaaatttatacctaatttttttaacagccttgtctggctctcaagaatggatgcttgacagtgggctaaaatgtatatcttgaggtagctttttagtttgtactggtcctaggtctgatgggatctctaccccaatcaagatttcctcacaatcttatctccaggatgccacctcccacattcccctctagcccacagctacatttctctaaaaccactctaacccactctccatttccacatattgcccctaaagatgttttctctaaactagggtttctcattctctgcactattaacattttgagcaagataattctttgttgccaggggctgtgctttgtaggatatttagaatcatctttggcttctacacattagatatcaggagcatgtatccctccccatcccctacccccaactgtaacaaccaaaaatgcctccagatagtatagcgtctgagtctagggtagtagttgaaaaccactaccctaactaatagttctcgaggtgtgatccccagaccagtacatctgcatccccagggacttgctagaaatgtcagttctcaggccctagcccagatctactgaatcagaatttccaggggaagggcctgataacctgtgaactaactacctttccaggtggttctgacggatgttaaagtttgagaactattgatctaaacataaggccatccttagggaataaaagcaactctgcttcttttctaagtctccatggctccggccccctaggtccaacccttgctttgatccacttctatttgtgctgtttgattaatctataatctcttttgcccctaacctattgttaagactgctctatcctcttcagaaaacattggcttccccactggcattttaggctggtcccactggaagccctatggcctcaaaagcaggaaccatctttctctagacacaaagtcagaaagggaccttccaagtcttcccaccccaatgctcaggtgtccctctatgtccctaaccatctctctgttctctctctctctctttttgtttagagctgggggtctcactatattgcccaggctggtcttgaactcctgggctccagtgatcctctgccttggcctcccaaggtgctggggactacaggtgtgagccactagatccagccaaatccctgttttctgtcagcctcctctagctccctgctataagacagaagcaacgattggcaagtcctgggctcagggcaccaacaagtctttctggctttggtagccagttccaatactttcccaggttttatggatgactcacctcttgggtactctacaggaaagtgatcttccaaaattttttcattgtatttttcaactaacataccttaaaacatagagtccatttagaatgtcccaaaacagtgtgtatcatcagagtccatgtggcagcagatctttcatcacaacacaccaccagagtcaacttcctaaatcttatttctcctttgctcagcaattgccagtagctaaacagtgttagcagataaaagtacaaactttttagtcaggcttcatggttttccatgggaagtgatgagcagagcagtttggagccagatttaactaggattcaattccagctggactgctgagtagctgcatgacctgagacaagtcattaaaccactctgagtctcattttcctggtctacaaaatgtagataagtccacatcagagttttgctgttagaatccctgaaatcatgaatctaagtaccacacaaatgccactgttagtaaaactttttaaatcaagctattttggggctttacaaccattaactcacccctaacatgctctccaaagcaggtacacacttggtgtaataagcagacacataggtggccgtatcgagcttacccaaaattcctgtactctttacaatgtagtgctgagcaacaaagaagcctcttcccctgtgcccacacccacactcacttctgcccctcagctgcagggctgccccagccctctcaaatcagagaatgcgcctcctcgctccaagtctgtcattaaccagctgtctggggctaaatgatttcaaaagccccttctccacataaaattctaaaaaaagaatcattaaaaaaagcaacaggatccaagctaattgcatatcaatcatgagtgaatattaagcaactctaaaacactaacataaatcaccaagaaaatgaaatgcaattctgcccagacacagtgctcctgtaaaggtgtgcttgagtatacaagcatccatattatcattaatgccggttcctcctgacttctcaccaactgctcctcgtctccatggtaacagcccttccactcatcaggaacctactgaacatacaactccatcgtttttttttttttctctctctacccaaggaagtcagagcaaaggtaggatccacaggaaacataatgcagacaagttcagggtgggcacagccccctcttctcctttatatccaaattccgcaccctctccctgccaccctttcccctgcaaggccccctcagtcctctccaccctcccaggtgccagactgcaagtccccacactctcaccatgttggaaatgctgcgggtattggcaggattcagcatgacaatctcagttgtgatgtggccctccaccgcctcagtcatctcatccactgtgcagttgatagaagggtcgtagatcttgaaccaattgtcagcataccacccaatgaggaaccagacgtacttcttcccaaagagacgctccttgtacacctgaatacagaggagaatggctgagtttttgtttgctcatttgtttgtttttgtcttatctcacttgatactatttagcctcttgggaatcagggaagagcagtagaactaaaaagagaaatctacaagtcttggggatagtaggaaaggctgacaattcttccttctaagtttctccccagcccctgtatttctgagtggccttttccagccagtcaggacagatggaattcatgggcttctcaggaaacacaaagcagtagaaaaatgagatctgaagaaagtatcatgtgtgtgcagacaagggatgcagtcagagccaacagacagagacatcctatgaatcgtcacctcagatcatatgctatcaactcaggcacagatgccaagaggaggccccacaagaaaaccaagggaaactcccacccagtgcccctccctcttcagatccaactccacctcacaaaaaactttccgggcttcagtctcatagaaaagtcccacgatgattcgggcatcctggcgctacaacagagaaagaaacagctcctgagggatgcccgggaatgcctgaggggctaagccagatgtcttcacagctttgatttcccatcccaaagtgcttagtgcagggtaacgctcaacgtatagtgaataaacgtcaactggaagatggagctaaacttccccaggagatgctattgcctcagagaatcaaaacctgcccccgcctggctttcctctccaaccagtcactgtcccccagcttggtccctccgtaaacagagcccaccactcccagccatctgaccttcaggtttttgacgggcacagctggatctgagaagaaactctggcggaaagtaatctcaattccagcctccttcactcgttcctccaggtcgtccagagtcttgggtgggaataaaaaacaagttggaaaaacacggggtgcatgagggaataaagaccagagaggttaactggggatttcagagcaatactcagatagagcaaagaagcagccattctgaaccttccttcaacagcttctgtccctgaagtgaggagttcgggaaggcatctggtcttaggatgtggattccaagtgggaaggtgaatggtgagcccctgctgaggctctgtgtgggggaagccactccattcacccactcctaccactgaaggcaaagatggggtaaagaaacataaaggaaccaggaaaagacaaggcaaggactgggacagacagcatgatgtcaacctcaagaggcaaatgggcagacagacaaaggatcagagaagaatggtctgaatcagagtgaaagtgggggaggattaaagggccactgaacacagtggatagaagacccaaagaatagaataaaagggagggagcagactgccttcttcagatgtagagcctgtatttcctctctacctccccaaatctccctcttccccctcaacctctccttgtctgtcggcttctctctcttagtaccaactaccagatccatgcagctgcctttctgcccctctctctcctctccctcattcctctctctctctctctttcctctccctctctcctctgtaatccactggctccatcccctctgttcccattcacacccacccaccaccccccttgaaagcctctggaatctgctgccttcctggattcctatctcatcttcgctcccatctcttgcccccactttggattgaacctactttaacagaactgagtcattctgggtctatatgtctggggaacagggcatcaaacaggggaaaaaaatcataaaatcataaagacagagaggatcccaaaaactcaactcattctttcccctggctacagaaagaactgcacttaatccacatggaatgcgttctctttcaatgaagaatcaagttcttgcccctaaaagtgactctcacgtcacatctcctggtgctggaatttgagcttatgtccctttaccccttgcccaacccctcctcaccgaagtgaagacctcagtggtctgctggatggtagcaatcttcttccagccccacttttcaaagagtttcacgcgggtagggttgtggagtgtggctgatgggtgcgttcggaagaaagtggggaaacgctgccggtttgacagggctggtgagctggagccataggaaagctgtggggcagggagagtgagtgcaacagggtctgttcactgaggacaccaagagtggccaagagttcctttaaccctcttcctgcctttgggtttctcttccttactctctccaaacctccccacctctggtctgcctaaggaaaagagattctcaaaggcccacacacccctcacaaccgggatgctctttcactgatctaatttcaattccttctgaagaaggaggtcagctgcagcactgtcaggccactgttgctaggaggctgcctagctcaggtctgcagaggactctgaatcttagtagcaggtcctccacactccttttcaatacaaacccacaatcgccatcgtcccttcagtagagctcaaaagggaatgaccccatcttctgacccccatagccctgcttaccacaatgaggttccacatcctagcagcctcagccaccagcgtggagacagagctgcagccaggcataaggatgatcttgatagggtcgttgtagagcagctcatataggtacttggtggcttggcctggatcacactgaaagacaagaggagatgagggcaagctctcctggggcccctcccctgtctgcaattcctgctcttatctttctcgaacaaattagttcctttctcaattactcactttcatcattaattaccgttttcttctcctttctggcatctcttcctgtcaagtgccttttttctcctctttcattaaacttccttctctgtcttccatctggagccttacccatcacctctcctgcacacccctcctttggtattaatgaacataccaccttacctcctttcagctcaccctcagacatcccccttccctctgtcaccaagccctttaccccatgtttctatgcttcaaacaccagtgggtggaagaagtcagtaggaatacggtaaactctttccacatccccagatagcttgctcaaagccatattatgaaaattccttcctcacctctgcaaaccccttctccccaccttccatttgtttcctccctcttctcttttcagagctagtgataagtaaagagagaacaggaacaagaccagtagggggtcccgctcagtgatccatccctcctgctgggcgctgacatttgacaggtccattagaaaaaaagacactggggggtggaagtagggaagaatgtaggatgaggaaagaacagagagaatgaatagaatggaactctcaagaaaccagacaatttgagaggtgccttaaagagaggcttggagctagggaaagtaaacaagcagaaagctggagaagaaaggaagcttgggaggaggggaaatgggggaggaagagccagccttgggtctcccactgcctgttcccctcccactgatatatgacatttcagaagctgctggaaccccaatgcatgtgaagacgaaatggcagccagtggggagccagggcagaggggacacagacagggggctcaggggactaaggagggtgaaatgttgccaggaggggaggataagtagaaaggaaataaagaaagcactctggagcctgcttacctcccactgaggcctgacatttgggacacggtgggaagttggagaagggggagccaggggaagctgttggaatctgaagaaccagcagtcactgagaattctctgttgcccaccctaccctcactctggccaagggcagtgctcaacaacattggaaggttttctctttatgcctcccactagggcaactttgtaaatctttaccattctcaggacccaccttcctgcactctccccacatctattactccagatcctgctcccagcttctcccacagcccctcagtgcccctccacttctctaaagacagggttaataggaacaatgaggacatacaagaacatataagatacatatcaacagggcaaggcatgccccccattttgtttcctgatttcttatctaccttttcttgcaaccgtttccctcttccacacactattcatcactgcagattctctccaccacgtgattctctccccctccccaatagatttccttagttctcctccctctctttgctcttgcaaggatctggatttgcaggcaggaaaccgactcattccaattgacacattctggttcttctgccttcccatcccaccccgcttgatgcctctgatgttctccagttcccttctcccaggtcccacgtctgctccccgccacctccagggaatcacctgtcatggtggatgagtttgagctcacagccaggcctcccctatctcctgtgatcccctatcataaagcctgcacccatctctccctgtcattttcttcacactccactccccaaaaccaatgatctctctgactgtcccaagtctgaccctctaccagatctgatcctctacttctcttcctgcctcccgtaccctaatacctaattattttcctgtaccctgctgctcttcccataggcattctggggttagcttacagctcaggaatccaccaagataggatgtctattagtaaaaatacagataaatacttgggattcatccctgaccaaggagctagaatctgtatttttaacaaactcctctggtgattcttatgtacactgaaggctgagaaccacgagaaagtaacagtcaaaaaggattttaagttctcttgccaagctcctgataatccttgtgctctcttctcttcaagcaccctaccttcaacctcacttctgtcccctcacacacctatcccagacacacacctatttctaggtgtatagtgatgttctaaaaatgaatataaatccttggatcaccccaaggttgatatttggtaagatcaccaaattctcaccttgtgtactctatttcaccctaacccaattccttaagtctctggggccacatgtcagtgaagataaatttgagatcttaaatctccttccctgtgtcacatccttccctgcacccccaattattcatgtaggggagaggggtgggaaaaaaaacctcattataagctatcccctaatacccctggacccaaatttgcttaccttctctctctccctcaactcacctccctaatccctacatcccatttcccttctcacatcctagaggccacaatgctataagggaagggaaggtcaggacccaagttccataaggtgccccaagatctctcattatccccacgctacctccttgcccctctcccccactgccattcttttctgttctcttctccttgtatgttgactcttcttcatccccatgctattgtgggggttcccatgtggatccccaatccaattcattttcccagtgcctctgcccacctcttgatcattagccttccccaatcaccatatgccatctatcccacagtctgggaatgctcaacagggttgggaatagaaggatgagaaggagtcaggtagggctcaccactaccttgctgttttgttaagataaataaactagagctctcaagtctctcaaaattttcctcattctgtccctattccttccagctccaacctacgccaagattttaccttgttaccatggtaaatgtaaacccccaatccagctccccacctctgacattccctccacccccaacccattccagggttagtttactccctcagaggatcagtgtctcctaataccttaaatccaccaccagtttctccaaaccccgacacttctgcgagactcccgcagcggggcagaagggtctgccttgcagcatgcttaaccatcttgagcccctagaccctcatcttggacctccagcccctgcgactctccccaagctcctgcacccccagcccatctcctgccagtcacacaagggaggggtctgcctcgcaatcccagagacgactcagacagatgggggcgcgtgcagctggctggccccctgccccgcaagcccccacctcccacccacccccatgtccagggctaccttgctgtcgtggtggatgagcttgagctcatagtccggcaggatgtccctgcggctattcacgtcctccagcgccatctccaccgcgggctggcaggcctggccccctggccagcccccgctcatgggaaacagtgccccgatgtacactgcgcgccgttctgaggaggggtgcggggggacccgcgagtgaggccgcgggagatggggggagtgggaggcccacaccggagccacccctgccgccatcacaaccagaagcggcagtggccaccccacccgggcaaaaggggccccgggccccatggcgtggggggcaggggtagctgttggggagcgttaggagctcaggggggacacttttcctggggagggctgctaagagggtgccggggaggcgcctccatccctgattttgtggggaggagggggcgagggccccggagaagcagggaaggttggcttcctacggcccccgcggctctcgccaccgtcgccgccaccgcggactctcctcgcggactgactgaccgacggaggggaggaggaggagcaggagggagatgtggggctgggagggggctctgacgtcacgggcggcgcgcggcagcggggggtgggggggcgggcgggagctggggaggcaggaagggggcggggagggaagcgagcgccgaggtgggagcgacagtcggaggggcggggaggggaggggggatgcaacctcgaggaggaaaggaacgaaagaggaagggagggatctcacttaaggggacccgaggggaggagaaatggggacggggcgtgccaggagggcggggtgggcggagggagccgcgggaggctgaagcacggaggaaccagggtaggaagggaaggatgcgagtgggacgggagagaaacggggctggcgcctgaggtctgaagtgggagtatgagtcgatacagtgaagcactgaggatgtgggggagaggaaacggttttggagggaacgagttgggtacggaagggaggctggtttgagggagtggtggggtcgtggaagggagcctggggctgggtagacagaagcctaagaaagggagacaggacatggaattgagaaaagacgagggaaggggtacacggaaggaaaagatgtggggaagagcgcgagaggcctggccagggttgggatgggtgggacaggctgagaaagtccattaggtgaaatcctaggaggcagcaggctggaaaaggttccagcgaaggtcgcaaggaaccccacaggggaaaacgtggtgggagctcagggtctcccagcaccctgccgccctctgctgggctctgcctgacaccggcgaggctcagtctgggaggaggtggagcccagggaagtgtagccaagcagggacaaggagagaccgcagcctcgtggaaaaccgggactggaggcaggaaacaggtagggagggaagggggtggccgcaaactggggtgggttggggaaggtgcgaaaggacgacgccccgtagcctaagggcagaatttcaggggggtggagggtgcagagtgaaggggagggcattgcagtgcgcgcggtaagggtttctcatctcacctgagtgtggcgttcgattcactggcagcaggaaagacggggatcagagaagagttaccactggcgcccagcttccctggcctgatccccagccccctcccacacctgtccatgctgaagaccggggagagcagaagcctgcgtttctgaggggagggtgcctggggataagaacaaggtgggtctgggggtaagggggtcaggacttattttcttcttcgatttttcataggacaacagaatttgagacgggaatgccaatagctaagtttggggcagatcttggttctgtggtgcctgaatattacaaaattgggagtctttaagaaaaaaaattacacatacaattggctttaagcaattgctgttaaaatcttatttctgcaatttttacaaaagcctgttaccatatgaacacatatccatcgagccctctatattattagagcacaggaagagggccctgtaggtgaggaaccttgaagtctaagtttcagtagtgtcataagtccacccctggatgggactctcaatttccagaataaaatggtaaactagaagcagaataactgagttatgtgaggaaagtaaagcccaaggatcttgaaagaatctaccagggtagaggaagtatgaggcatacaaatgggatgactgcatcccaggagagaagatggcagagagttcgggtgcctagaaaagggagagtttgtaaaattacgtggcaaaaaaaaaaaaaaaaaagtagacagacacaacactgattcccttagggaataatggaggttgtctaggaagtacagaaaaggacctgtcttcttcccaccccatccctgagttgttcttcatcttctgataatgctgcctccaattttaagtcttttaccctaatatgtttccacccccagagctccccttctcaatttttcttagtagaatgtttgatttatttctgagtctttacaataaatcaattatataaggaatggtgagggatgaattctagaagagggtgatgcatggaaatttctaagtttagagaaagggaaaattggagtatttaaacctgaagaaggtgagagaggtgagattcataaaggaaaagagaaaacgtgaggtctaagaatcgggagcaggaagatttttttaaaaggtaaaggaaggaagcccccaacctacagaggataccggggactgcaagaggaagtttgaggcaggtgatggaggaaaaagggactttcatctcccctttccagtgtcctcccccacatttttatagctctccattctttcccattatccattcccaccccactcccatcctcacacaagcgtcctcatcagctgcatgcaggcagctgttcccctcaccctggcagtggggcttgggggtgctccactggccctgactacagatgctccgggagctgcccaccagatggaagtcggggtcacaccggaaatccacccgggctccgtccagagctgggaggtccccacccgtcaggaaaaccttcccattttccagggtcaaataagacttggagcagattcggactgtggagagataggaaaataagaagagaggcgagttgaagaaggctctttccctttaaagagcaggggactcaggtgcaggtttgggtccacaagcatcctgctctaaagaaaatcacatgtgaaaaggatttgcctacctatcttccaatcctcccttacctgtgcaagcatccacacattcccaaaagaaaaaaaaaattaccattttaggaacccaagatggggctataagcacacaaaatgggatctcttcaaagtcagctacagtgggcggttctctggctttgaaatatgtagatgtatataactttggatgcacaatcagatttgcttttcttattatagttggcttctattaatattaaactggcttttgtttcttgggcatatggtctctgggttggtgacagaggtattcaaaaatgtgatgaaatcattttagaatttttttgtcatcatctgccactaatgatcctcaaagagaataactgacaagatgaattatcaatgttataggccaatgatcagtggcctaatgaagggaggatgaaatgaactgtgcaggctgctagctctactacctccaaccgcacagagcaaaattgctcttatgtagtagtcattcaataaatgtatttgtgaattttggtatactggatttaaagtgctgacttgcaagcagtaatgctaagtttgcggcaggaaaaggaatagtcttgaagaggggaggggcttccgaggctactcaccacagcggctgggtgtgtccatatctgtccaggagccgttggccaggcacttgcggaccttgggccccaccacctcgcgctccccccggcacacatactcaatctcatagtccactggcaggaagttgatagccttcacctggtcccgagtcaggccccggtacctgatgcccccttcccagggcgggtgtatgatctggcaacctaaggggtgagtcggggaggcatacagagaggaatggtgggaaagaggaaaaggcaggctccccagtgggaggaaggggagagtagggcgtggtctgtgggcaggctggggacagaggaagagggatggggcactagagggtgggagtggggacaggtacagatcccctggctaaaggacagagagtaaagggccagggttaaagctgatgagagaacccacaagtggggagggaagggtgctgggtggaggtaagaaagaaaagtaattaagaaatcatgaagggtatgatatgtgggtggagcttttctttaaaaaaaaaggctaaatgaggatattcgagttgaattaggataggaggataaagggaggctaataagatcatctggacagcaaagtgggaccaagaaaagggagtaattgaggtagtaatgtggggctgggaaaggggattgaggcggagaaaatgcacaggaaggtggtatagtgtagcaatgtgggcagagaaaagaggtgctggatagtaacgtggggtgacagaaggaggtcagcagtagtaaagtcgggccgagcagaaggggttgccagaccgggatgatatgtgggactgatgggatagtgatgaggaccagaaatgaggagatgcagggaaagggaagtggagcgaaggagggccggaggtcgtcgaagaaggatgcaccttctgaggtggcgttgggggtctgcgccccgcccgcgcccggggggcggaggaagagtggcgccagtagcagcagcagcaacatctaagtgagaggcggccatgaggactggaccgagccccgccggcgcggcccgcacccggagactactcgacctcttgccggttgcctcgcaggctccgaccgggctcagcctggggaccaagagagcgccccgcggaggaggcgggggcggagccccgcgcggggtggggggagaggaggagagaaagcctgtccccaccctcctcctgcctccctcggcccccaaccctcccgggactccacctctcaccacctcctctcccccggcccccgcggctcgcagaagcctggcttacccacgctcccggcatcggccgcctcagcgctccccgattccatccccgcggttcctcctctcccccagccccgcttcccccagctgggccctgcgcccactgccccctcccccaccacgccgcgcgccccctctccgagccctgctaacccggggccctggctcttacctcggcgcgcgggcccggctccccggctctccccgggcctcaaggccccaggcccggccgctcctccccgctcccccctcccttctcctccacctttctcctcctcccgtccctcctcccctcgaatccaggctccagcctggccagggtctctcccctcctctctcgcttcccccaaaccccacccctgtctcttcttccccggggcggcggcagccacgggagcggggagcggggagccgggagggaaggaggcggcgccggggaccagggagagctcccgggcggagggaagaaggagggtgcaagggaaggcagggcggggggaagagaggggaagaccggggagagggcgcctcccacaacccgagccccgggagccgccccggatcccagccccgccctggaccgcccacagcgcggtggggcgggcggtggagaggcgcggggctgagaggtgggggagagggaggtgccctggtgcacacgcactcgtcggggggcgccggtcactgccgagggacctgcgggccaaacaactggaagctggggtgggggagagggaacccgagccaaaggcagaggagctggcgctgagacagggagtctgggatgaaggtggagaaagacggctgcacaaagagaaggcagccctagatccgggtgagaggagagaggcagaggcagatgcccaggagaactgcgaccggagggcgagaaagaagcctgggtcagaaggaggtgggggagggggactgaggaccacctaagcgcaagaagggttgggtgtagaagagatttctgggagactagagcagctccatggtccagcagcattgctactcgcctgctctgcagggaacgcgcagaacggattggaggcaaaaaacaaaacagggagggggacatcaaggagagaaattgaagtacgaagggagtaaaaggacaagagaaaagaacctcagggtggtttagaagccagtattacctgatgtactccagcagagcctagcaaacagtatttcttgaccaagggcaaactggaagctctaaagacagcaggtacagacctttttgacggctccagaagctcttggctataccttgaagtggaggggtgtgtgtgtgtgtgtgtgtgtgtgtgtgtgtgtgtgtgtgttgtgctgttgttgttcgtaggcctgagtttgggctgggagaggaaacagtgggctccttgttgggggggacaaaaaaaaagctgctttctggctggtcctagggggaaaaatggtaggaagaaaccaaacactgagagactgactagaattgagattctcaacctccaacccttttttacaataaatattttgtaatgacacttttactgtcctaaattgagattcatagatgaggctcacgcctgaaatcccagaactttgggaggccgaggcggactgatcacttgagctcaggagtttgagaccagcctggcctggccagcatggcgaaaccccatctctactaaaaatagaaaaattagcgtggtgtgatggtgtgcgcctgtaatcccagctgagacaccagaatcgcttgaacccgggaggcagaggttgcagtgagccaagatcgcaccactgcactccagcctgggtgacagagcaagactccatctcaaacaaaaagaaagggaaggagggagagaaagtcatagatgatataacctacctacatacacaactttaaacagaaagcaaaatgcttccctttctgtaacgtaaaggggaaatgaaagaaaagtaacttgcaataaaataacataaacagtattttaatgtgtgagtgccaaggcccgactaccctagaagtcctgatggagtaagcagatgcttccacctattcacagaaccacggggatgaaactgctaccaacacaggctgatccaggtgctgagttggtgactcaactacctccagcatgttgccatcaatgaagtgatttaacaaaatgttgaacaactcttggtagcaaagttaattttccctaattttacacacaactataattgcattcctagaaagttcactgtatatttaaaaaaaaattttaaaactgtattaagttataggctcagataattaaacacaggttttcactacgtgaatgtcctgggggacttttgagaatctgggtgaggaacaattcttcaacatgtaggtagtgctttgaagaatatcttacacctctgccccaaccataaatgtcaatagtgccccttcccttatcacctgaggttgggagttcgagaccagcctgaccagtgtggagaagccccaactctactaaaaatacaaaattagccaggcatggtggtgcatgcccgtaatcctagctactcaggaggctgaggcaggagaatcacttgaacccgggaggcggaggttgcagtgagccaagatcatgccatgccattgcacttcagcctgggtgacaagagtcaaactcagtcaaaaaaaaaaaaaaaaaaaaaaaacagctaaaagatgcatcaaaatgttaacaaggattgcctctgggccattaattgttgcataacttttcttttttacttttttttttttttaaacaagaagtttatttaaacaacaagacgcttgacttgaagggaaaactatctaggattcttttttgttttagagtaatttatccctacttaaagacagattgctctgcatgtaacagctaagtacaaaaaagttataaaattgtccttggttttacaatgataaatgaaaaacattaaaattctccaattgaacaaggtatgcaaggatttttatgttgttgtttttttgttgttgttgttaaaacagtgagagcaaaataacttactggaatataaagataagagctgaatgagcatgccactaatggagaaagggggtattttcacagaatcagtatttttccgccccgtctccacttgatgtcaatcaaaacataccattggctgtttagttttaaaaaaaaaaagtaatatgcttgtgcacatataccagttactttatgtacagtaaaggaatggggaagggggaaatgaaagaatagagaaaactatacggtagtagtcaggatgtggtggaagcaaattgcagttttctaattgagaatgtaatcttggtctttaaagaacagagttctggagtaaagaagcaggttcccttttcagtagacacctcccgtctgctgttggaacacatcaattgtatcttcatcctccatttccaactgtgcaggtgtgtctgtttcattggttgcccgtcgaatcggaatctgatctgcctcattgacaatccctgtcgttcacaataggctttcattagtttactaagtggtgtatgcctcttaatcttaaactgcaccacagaaccatcctgccccgccaccttcaaattaatatgatcgttgttctcagtcttgactccttccttgggcttttcttcggccatggcgagcgccggagtctcctcagctgccgcttcacaaaagaggtaccaggtccgctccaaacgagcacacaagcagcaccaggagcggcagaagaaggaggcggcagcagtggacaaggggagagggtgcgcgcacgtcgtgctctccctccctccaccctcacttttctttttttttctttcttttttttggtggggggacggagtttcactcttgtcacccaggctggagtgcaatggcgtgatctcgactgacggcgacttccgcctcccggattcaagcgattctcctgtctcagcctcccgagtagctgagactacaggtgcacaccaccatggctggctaaattttgtatttttagtagagacagggtttcacaatattggtcaggctggtctcgaactcctgacctcaggtgatccacctgcctcagcctcccaaagtgctgggattacaggcataagccactgtgcggggcctgcacacttttctttcgtcatatttgttgttcaacttttattcaaatgttttacaagtgtctcctctataaatcatttttaattgatttataaaggtttaaagaaaaccttcctagcaagttgcatcagtatagctaaaatctgttacttgtttgggaggcagaggcatttgagggtacagacaagggctccaattatgttcattatacaaaccactcacctttttccaccagtagctacaacttccccctttcacatcttttcatattccaatgtcactgccaggattcctggccatatttttcaggatatttgtagaggtccttccagaaccactacttgagtatcctaatttcatcctccccacaatcaatctacttccttcttttccttttacatcaagcacaaaacttctttcctctggaaggatccccaggcttgatcccatccttctctcacttctgtacaatttgtgcctttggcaatgccatctccttttgtagtttttgacggtttttcatagagatagtggagttcctactcagattactggaaaatgacaaatcttattcattttagttcccatactttctttttttttaataatttttattttttattcttatttatttatttttattttatttatttatttattttttgagacagtctcacactgtcgcccgggctggagtgcagtggcgcgatctcgctcactgcaacctctgcctcctgggttcaagcaattctcttgcctcagcctcctgagtagctgggaattaccggcgccccaccaccacgcccagctaattttttgtatttttagtagagacggggtttcaccatgttggccaggctggtctcaaactcctgacctcatgatctgcccgcctcagcctcccaaagtgctgggattacaggcatgagccacggggcctggcctcccatactttctttctacttccttttctctcttctgcctcatcttccatccatccctgagagcatatagcccagaatttaacactctgggagccctgaaaacatattaaccaacgtagttcacttgattgatgatc

SEQ ID NO: 1103 - DNA, 582 bp, Homo sapiens
  Genbank Accession No. AL036582
  unsure (1)..(582): n = a or c or g or t
ttttttttttttttttttttgaatttgataatcctccttttattcaatattaaactttaaaatttgngaccacattattaaagtattacttttactcacagtagtattatacatagacttaacacaatttttaaaaatgtgtttacttaaaacaatataattctcctttacaaaagcaactttatataaaatgtttggcttaagactgtcattgctattatgcctttgaatgaaattccactctttcgcctccattgtccggaaacaggcacatatcagcttgttttctttaatgaatattctgtaacaagttcctgaagttttctaattctttcacacttgtagaaattctgtaaccaaaaaatatttcactcagaaaccatctcagataaattttatctgtaaaagttattcactttgcattttaaaacatttttaaagtaatttatttcagtaaatttaaggtgcataaaccatttaatggattcttaatatattttagntntctntaattcgacaagggtaaaaacctaaggatatttaaatggtcctagnaaattaggtttattttntanaaaaggt

SEQ ID NO: 1104 - DNA, 804 bp, Homo sapiens
  Genbank Accession No. AL037412
tcccaggaagcccaaggcggggggagtggggaagagagggaagggagagcccccgcagaagtacatgaatgagtgggttactgctgcgggcaactgggactccatcctgctgggcatcctctgagagtttatgtagaatacacttcagaattgtcctgctcaaggataatgaagctgaggtcctgctccttattgactcagggttgctgctcctggggacattaaccccccaacacttctagcttgcccagtgcactgactgagcacacagctgtggccaccagagaacctctttgggctgtgatacaggaaaccatcggtgtgcatggtaactctctagcagtgtccttcatgccgggacatggggacacgggcaggcactgctggcatctgctaaccccggaggcccatacttcagaaccggtcagctgggccaaggcctctctaaggcccagcggctctcatgggcaaatgtcaggtgacacagagtcagagaccctggccaaggactccccatccggagaggtcccagagggaggggcgaggtggcctctggggggagctgggcggtggggcaggacttgactcaggacaccaccctctcctgcagacactgggccaggtgcctgtgccgaagacccggggcatcgcaggggggaagggggaggaggggcaggcagcgagggctgcccggagtgctcggaaggctccctgccccaccaggtggactctggcagggcccacgctgccccaaaccgcaggaacttgtagcggggagaggcttcctgaaggcagtggtccact

SEQ ID NO: 1105 - DNA, 717 bp, Homo sapiens
  Genbank Accession No. AL040892
agacgggctcaagacaggggtgggctgcacacatggaccctcctttggacacaggtgttgggggtgagcttggtgggtaaaggcagatgcatcacgatgttcctgctctgcagcttagcggtgccaaggggccctcccatgtacacaggacacgagtacacagtcaggtcggctggggctggcaggtcactggtgcccggggcctgtgtgctgatgctgacgggaggcagagggctgggttggctggaaggactgtcctgcaaggctccagctattgggtcccactccgcatgtaggacctgtagcccgatcagcagcagccctctctctggaaccgtgggatttggaccattctccaccctgaagtgcagagggttgctgttcatctccagacgtttatactggagctgactggagaccgagcctcggctaccagggaaattcgagctgggcacattctggtccagggcagcttccccacgcaatgccagcagcaggcggcgcgggtggcgaaaggctgacaggtggaagacgcgctctggtacatcactgctcgcgtccgcgcccacgcccaagtaacgaaccaacagttgcccacggcgcgacaactgtcgcagccagtgccagggcggctgcggaccggccggcgcatgaagtcgccaaggcaagggtaggcggccagtccagagagcgtgggccaccgcagcacagcggcgg

SEQ ID NO: 1106 - DNA, 742 bp, Homo sapiens
  Genbank Accession No. AL040936
aatgataacagaagcctcattgggagttaccactgtacaaatcaatgcctggaggccctgaactagcattagacattcacagggaagtcagctgaggttaaggaaacatccacgcagcatctctgaggatacagaagtgggaggaggaaggtgacagccgcaatgcacacgctgtgtatctgtagcttggactcttcttcaggcagttcttgttttccttccacattggatggtaggggctgggggaggtttgcaaatgatcatgtggaagagaggccttgtgtatcagcctcgcagaagagccaatactgtagacagatatcacccagatgctccatgggccatgcccatgaagcgatgtgacattggtcctctgaacaatggttcagggagctcgtacaacagaagaacagtgggtccttcacaatctagggtctggcacaacttcctgaaggcatgctaggaaataggtttatcaacaaaacttggctgtccccaagggtaaaagtcattctcctagtttttactgcatgtatctaggtttcaaattaaagaacgagaagaaaggccgcaactgaaaagttatctggaatactgtggcactttaccaatctgttttgcttataatatatggcagagccaacgaaaccctgttgatataaactttcattataataatcctgtactgtacactctcagaatacagaaagaatccatcctatcatacatgtttcatctttaa

SEQ ID NO: 1107 - DNA, 768 bp, Homo sapiens
  Genbank Accession No. AL040944
actagcaaaaccctgcagaggaggaaaccagcttactgccagcaccaactgcctctcacaggctggggtgatcatgggactgggaaggaggggtgtgggcggtagagcttgctgcccggcaggatatggcaaggatgttcctgcagtcaggctgttgggcctttgcccgggagggtgcgataaggatgtttctatagtcaggtgatcaggaaggatgcttctcacggcccgagttcccaaggaatgtttcattctgaccagggtgtgcaaaacggcattcaatgtcttcagaattgctgtccctcagaactcttgcaccacgaggtggcagcactcccagtgtctgggtgtcttctgaggggtaccaggatccagtagaggccactggctgtgctgtcatatcctaagtggcagcaaggcaggcttgggtctcttggcttgctcagcacaaacgcatcactgaagtcgaaaatcttgaacgtggccttggcattgaggaagtcatcaacaccctggctagtgagggtgcagtgccgctccaggatgatggtgtctaaagttgtgcaccaggtcgcaggccctgcagaagcatctcccctcaggagtgaggtagtacaggaagtctgtgcacaggcagatctgctggtgctgttacactatgagggcactgagctccaagatggtggcaatatattcactgggattcctgcaccgtgaggttggagagaggaagcatctccataacacatatgaaaccctggaagcact

SEQ ID NO: 1108 - DNA, 775 bp, Homo sapiens
  Genbank Accession No. AL041162
tttttttttttttttttttttttttttttttttttttcaggatttgaaaaggaatttttatttcatttggttgtgtctttctctgtcaaggatttgtgaaattgctggctgggcctgtgagcctgttagagaaccttgttagccatagctccttccacctgaggcagtggagccatcctctccatgtgcttttagggttctggtcggggaaccctaaaaacaatagggtcaaggagccagaattggtctcagaccagcctccccatcttactagtctgaccaaccctaagccagatacagtattttactagactttttcctgatgggaaaggaagacaccagggcttggcccctgagccagagggaaccgcgaaggggcccaccactggaatgggggcaggtcagctcgcctcccctgctgccatctcagtccccagcaagtcaggtcactcctcttcacccgcttcacactgagtgttttctggggaagtgagtaaaccaaacacgatggcaaataagatgagaagcaggacagcggtgatgaataagataatcactgccaggcccccctggtcccaggggttctgccagaacgcatcattccagattgtctctttgaataccagttggcccatgagaatctgattctgctggtagctgttctgggtcctacaagggcaattcagggtggtccttcaggctcacactttgtggagggctgagctgaagaggccgccaggtgaccagagctgcaccctgactcaaagaagcactg

SEQ ID NO: 1109 - DNA, 715 bp, Homo sapiens
  Genbank Accession No. AL041566
tttattgagcgcctactgtgtgctaggcaccgtgctaggcgcagaaatacagagatgcataagatacagtccatgcccttaaggattcacagtctagaaggggagacaaacatgtaaacaagtaaaatacagtgtgataagtgccacaagagaagcattgacaaagtgcagaggtagcctggaggggaggggcacaggggttgccttcctggaggagggggcctttgaggggatcgtgagagatgaacttgccaggcagacaaggcaggaggagcaggggaaggcattccagtcggaagaaacagcatgagcgaaggcacagaggcatgaaactgcatgtcttgcttggtgagtggggaactctaactagtctggtggtattgctaaagtgtactagaggctgtggctagagaagggggcagaggccagatcatgaggggaaactgagggcaggggcatcttggagggtcaccagaggtgagcagagcccgagggcaggctttgacacaggaaaagagggctcctggctgactcaaggtacacctgcctgaggaccacagggttcctcgctgtggctccaaagggatctcgacccaagagtagaggagcagcagagctggaggtgaagcagaggggtcgggccaggtctgggacccagagctgccatgcactcccgcgctctcacagacttctgatttccaacctgtacgtcaga

SEQ ID NO: 1110 - DNA, 540 bp, Homo sapiens
  Genbank Accession No. AL043669
tttttttttttttttggcaaatgaattttaatatataaaacaacaaatatagattcacagcatttaaaaaaatcattcaaataacattgtaaataatttttttttacaaaaaacttcaacaaaaatacatatcaagttacatcaatcttgtacactatactttggctgtcaacagcaaattcctcagttcagaagtcccattctttgacctatacagatgacacatcatcttgaagttaatgagctaaaatgttgcccaaagccttgcaaagtaggttagcgagtcatacagaatggacactaatatttacaaaaaaagattagaaagattaaaagtattttctaaatataaaatgtcagtgcctgtgagataactaaaggcaacaatgtaaagtatgttgtagctaagtaaacttgtatcaaatatttaagcttttgctttttttttcaagatcagtcatgttccacttatttttccaaagccttttgaaatccactttcattgcatcctgaaaacaatgagactttaatagaacaatt

SEQ ID NO: 1111 - DNA, 656 bp, Homo sapiens
  Genbank Accession No. AL043931
cactcgttgcccaggctggagtgcaatggtgcgatctcagctcactgcagtctccacctcagcaggagagcaggaatcttcagtgatccacgggcaaatatgcagccattgtgggcacctgttcctcccgcgacctttgtgcccacgtctctccctccagtacctattgcacggccccccacgtccgcctcctgccattgccagcaggtgccttgcgccggtacctggctgtgcttattcatccattatggtcgctctgtcactggtgccattatgtgctcacatgcccactccctcaggtttagaagtcgtgttgcccggcaacagaacaatctgctggcttagcctttggccaagttggcagctggacgaggacgctcagagcccagctcttgagagttcaagtatccgacagttccccactgctcccaggagcggttacccgggcactctgtgcccctcattcctgtttgggccaaggccgaggacctgcgagtagggctcagttgcctggagccccttcagcccatcccccagttcactttgcttgtgggatctccccgttgctcctgcccctggactgagtggcaggccatcctacaaacacccgcacactcgacatcagtggtgtcaagacaactctaagaaggtttttc

SEQ ID NO: 1112 - DNA, 574 bp, Homo sapiens
  Genbank Accession No. AL044106
ctctttaattttggtttctctcaagcttccaaatggtgctcagtgctccaaggaaaggaaggaaggaaggaaaaggaggggagaggaggaagaaaaataacttaaataaacacacacacaaagaaaagagaaggcaacatgacgtgagctggtgatccatgaaggcagggagggaggggaaccgttttacctgtgctgaaccaagggaagaatgcggagagggagggagggaaaggggaaaaaaaaatcagaagaaacactgggggcagagggagaaaacactgagacagcattagtggagtgaaaggcggacacagatgagcctgcagaccatgcccccaagctggtcatggagctctgtgcacggcaccccacatcctcgtctgctcctgtgactcctaccctggctcagcctctccctgaagttggcttgacccacactagattccagaatgagtctccaaacctccaggctgacagtccctccctagctccaaactatgctgtgaccatgacctcacacggagggccacctggccaggctctcaaggcctccatgctgtgaccatgacct

SEQ ID NO: 1113 - DNA, 873 bp, Homo sapiens
  Genbank Accession No. AL044128
  unsure (1)..(873): n = a or c or g or t
cngnttggatttccgaanaccagggtcttgctctgttgcccaggctagagtgcaatggcacgatctcagctcactgcagtcctcgcacctcaacctcctgagtagcacaggtgtgctccaccacaccaggctaatttttgtatttttagtagagacagggatttgccatgtttcccaggctggtctccaactcctgggctgacgcaatccacccgctgtggcctcccaaagtgctgggattacaggtgtgagccaccacctggcccattggtaagttttaatgtctccaggagcccttatagagccacttcattctgaacttccccacagctggtgaaataaactcaaaggagtgaatgggacagaggcctgtcaagaaggtggcctggcctctttattgccttaggctctcatagtacacttcacaggcaagagaacaagagctgggaacacttctctggacccgtggtagcccagtttcaacctctgctttacaaatctagcacaaagaaagcttcctgtttgcttacaggaggagtggtactaagcagttatttctattttctgtaggtaatatgaatatagaaacttgggtctatagggatattaaaagaaacactgaaagacaggctcactaagctgttacaatattacatgtgctgaggtcttctattaaccttgtcaaagcacttcaaaanggtatatttatataattccttttgagactggtcttgctcttgttgcccaagctggaagggcagtggggggaaatcacancttcatttgnaaccctttcattttnccaggcttcaagtggatttttttggccttaagccctttccaaagcactggggaaccatnanacttcangcc

SEQ ID NO: 1114 - DNA, 554 bp, Homo sapiens
  Genbank Accession No. AL044632
ctctgcccggcactgcttagaaaaggtgcagtttccgggggctccaggacccactccgactcccagagaactgagacacacggctcctgggagacttaactggtttaattgcttagccctggtgcctcagccacctctcatctgtagggtgagactcaagtccaggcaccaagacacaccagcaaacaccatgcggggatcattggcctgaaacttggccagagaaagctccagtcctgggcctgtaagagtgggcgctgggagtgtctgaagccggcacggtgtcccctgcgttgtcggcccttgcaggtgaagtgtgtgtcgttcccccactttcccccgaatggcacccacagcctcctgctggagcccctcccgggcccccctcagggagcagaactctgcgtgtgtgcgaggttcagcctggccagcctggagctccagctcaccctggggtgtggatggatgtagaaatgggtggggatgggggagcatcgcagggggccaggaccccccaggtgcacaggggaggccagagaaagaggccccagccc

SEQ ID NO: 1115 - DNA, 704 bp, Homo sapiens
  Genbank Accession No. AL046941
cggacgcgtggggctttgtacaaatcacaatggtgcacttccaacaaaatatatcaataggtgttttcctctcttattttgtaaatagtattattttagctattaagctggataccttctttcaaattcagccattcagttgtaaagttgggaagaagtttcttgacaagactctgcaattaaatgcttaaaatttggaggggatccttccttgattacatcaagtatgttggtacatgggtttatacaagttcctcttgagaaggcaaaaagaccaccatgtgtgagagctctttgacttggccaataggggcctatcttaatgcacttgtttggacacatttctgatcttatttgtaaaggctgcaaaaggagaggatgaaatgctgtaaaagtaggaaatgaagtggaagctggaagaaaatgtaattggtggtacagctatgggccagatggtggaggggagggtggggacccctgccggcaagcagagtgtcacagctggctttcctcacttgggaaaagggtactgccggtctagcagcctcctctgtactcagccaggacacccagcgcgtgggacctgtttgtgtctgttttgcttccttgggaacggcacagtcactcaccctgccatttgcggaaatgacctggtgcactttgactgttaagcaatgcgttattgctgtagtcaaggttagtgc

SEQ ID NO: 1116 - DNA, 566 bp, Homo sapiens
  Genbank Accession No. AL046950
  unsure (1)..(566): n = a or c or g or t
aaggaaactntattnnttataatcaaaatatccactatttaccacaacccgtctttggaaagaagttcatagcgtattctgaacaaaccaaagcatttactcggaagttacattcccatgcctggnagtcacttgggnatgtttaatacaggtacacatgatgtaattacagaatggcggcgctggaagggaccttgtanatcatttanttggcaccctaattttacagagggggaactaaggccanagttgagagatgncctcaggatacctgagtcccattccagtgntcgttcagtaatncataaggaagtcatcataanggtttaaaaagaaaacgttaatgactcgntccctttattcttctgtgctgagagtatcattctgggttattcagattaagaaagaantacactactgaaatggnatgaaactcactgtcaaagggcacttaggtccgttggctccgtttcccacagttccccaaatgaacaggtggtncaagactcaggctttcccctaattacttacttgggtaaagtgacttgggtaaaatgaacggncgc

SEQ ID NO: 1117 - DNA, 645 bp, Homo sapiens
  Genbank Accession No. AL047117
aagaaaaagaagaaagcaagtcataaagcctcagggaggccatttttgcctaaatttgaaatgagggtgggccagatgagtatgtttaagtggagagtgcttccagctgagatgatttgagtctgtcctaactgctccattgagttctcgtgccctcatcagctgagggcagggaatggaactttaatggaagaaccacttttatctattctttttattcattgtttcagttctgatttcagcaaacatgagcaaaccactttgactgaaagcagaaagagtgaaaattctattttgttacgctactggtgttcaattattagtttgtaccatttttaatttatgtcagttgatgcatctgaaaataagtgcttggagtgttcgtacccttatttttttttaagattcctagaaggaatctttggttaattcagattgagcagttaaagtttttgctatttacctttgtgcaggctggcatatgctaatttgggggtggtaaccaaccgattttatctcatgtaagcattacattttgaagactgaatatacttcacagcagatcaaacacatttatggcatgcactgacctcttcttggagcccagactttatagagttgcctaccaggggttactgtaatgga

SEQ ID NO: 1118 - DNA, 805 bp, Homo sapiens
  Genbank Accession No. AL048338
  unsure (1)..(805): n = a or c or g or t
gcggccgccctttttttttttttttttccttttactgcccatttattaccgtgcgggttaaaaaacgggaaaagaggccgggcgtggtggctcacccctgtaatcctaacacttcaggaggctgaggcaggcggatcatgaggtacacgcccagggaagagaagggacttgtccaaatgtcactcaagtacttggtccataacattaagctttgtaattcaccaggttaaatgtgacatcactgttccatccaccctaccaacactccaaagaaactcaacttcctgttccctcttgaggaagtaaaacttaccagataaaaaggggaacgaggtggtggggggggctggcgtcgaggccgggggccaccaaacgaggtagcagtggagggagggctggggggaccagagcgcaatgtcagtgtgtcaggctcatccttgggaaacaggcagccgggataccatggtgacaggcaagggagcggcaccagatgccgaaaccacaagggaagatgcctgggaagctggggactgtgtggaggctggggccagcgccaaggtctgagctgcggccgggcccaaggtaggaactggggcaaggctcaangtcagtgtctgcactgaagctggggccaaggagtgaagcagatgacgatgctggagccaaagtcagcgtgtgaactggggctgggcccactgggagaanctggagccanaagggggtgctggganccagagacaacgtctgaattgggaccaatggtgggtccctggtggcaaaagacaatgtccggggctgganttng

SEQ ID NO: 1119 - DNA, 840 bp, Homo sapiens
  Genbank Accession No. AL048651
ttttttttttttttttttttgagatggagtttcgctcttgttgcccaggctggagtgcaatggtgcaatctctgctcactgcaacctctgcttcctggactcaagcagttctcctacctcgggtttccaagtagctacgactacatggcacacacagccatgcctggcaatttttaatttttttttgtagagaccaggtctccctgtgttgtccaggctgttctccaattcctggcctcaagtagttctcccgtcttggcctcaaaaaatactgggattacaggagtgaatcactgcacctggcatatgtatttaaatacttttaaaataactaatctctagacattaatatcttagttttaccttgtcgaattaagaactaaaatatattaaaatacattaaatggtttatgcaccttaaatttattgaaataaattactttaaaaatgttttaaaatgcaaagtgaataacttttacagataaaatttatctgagatggtttctgagtgaaatattttttggttacagaatttctacaagtgtgaaagaattagaaaacttcaggaacttgttacagaatattcattaaagaaaacaagctgatatgtgcctgtttctggacaatggaggcgaaagagtggaatttcattcaaaggcataatagcaatgacagtcttaagccaaacattttatataaagttgcttttgtaaaggagaattatattgttttaagtaaacacatttttaaaaattgtgttaagtctatgtataatactactgtgagtaaaagtaatactttaataatgtggtacaaattttaaagtttaatattgaataa

SEQ ID NO: 1120 - DNA, 634 bp, Homo sapiens
  Genbank Accession No. AL048814
cctttttttttttttttttttttttttttttggcaatatagtaaattttaaagattttatttcaacttcactcacttatatttcttggaatggggatatatacattattcaccaataaatgctaatgctttaaatttacaattaccctatttgtagaaacctgaagatcattccaattaaatgaaaaaaaattgtacaaaaacgttcttttgctcttacaattcaaaatacattcaaattcacattcttacagcagccaaaacctttaacccaaaattcagaactgcagtcctacaagtgaacaaactagtgttttaatttaattatcatgattgttgttaacactgaaaaaaaaacatggtggctcctgaaacaagacaggttagcaactggtacagctttcccttctgggcactcaaagctttgcccttgattattatttttatttcatcttttcaaacacagaccattgctccaacttgaaagtttcaatggaattttggcatttaaaattgctaatgcttgctaagaattaagatctcccaatgatgagaatcagaaaatgacgcacgactaaattaaaatcatcctaaaagacttactactagtgggaactggtattcaatatcaatag

SEQ ID NO: 1121 - DNA, 74822 bp, Homo sapiens
  Genbank Accession No. AL049798
gatccctttaccattatgtaatgcccttcgttgtcttttttgatctttgctggtttaaagtctgttttgtcagaaactaggattgcaacccctgctctttttttgctttccatttgcttggtaaattttcctccatccttttattgtgaacttatgtgtgtctttgcatctgagatgggtctcctgaatacagcacaccagcgggtcttgactctttatccagtttgccagtctgtgtttttaattgaggcatttagtccatttacatttaaggttaattttattatgtgtgaatttgatcctgtcatcatgatgctatctggttattttgcacagtagttgatgcagtttcttcatagtgtctttggtctttacagtttggtgtatttttacagtggctggcaccagtttttttttttgtttgttttgttttttttttccatatttagtgcttctttcaggagctgttgccaggcaggcctggtggtgatgaaatccctcaatatttgcttgtctgagaaggattttatttctccttcacttatgaagctttgtttagctggatatgaaagtctgggttgaagattcttgtctttaagaatgttgaatatcagacccaagtctcttctggcatgtagggtttctgctgagggatccattgttagtctgatgggcttcactttatagatgacctggcctttctctctggatgccttgatattttttccttcatttcgaccttggagaatctgatgattatgtttcttgaggttgatcttctcatggagtatcttagtggtgtcctctgttatttcctgaatttgaatgttgacctgtcttgctatgttggagaagttttcctgcataatatcctgaagtgtgtttttcagcttggttccattctccccgtctctttcaggtactcaaatcaatcataggtttggtcgttttacatagtcccatgtttctgagaagttttgttttttctttttcaatcttttttctctaatcttgtctgcctgccttatctcagcaagatggtcttcaaactctgatattctttcttctgcttgattgatttggctattgatacttgtgtatgcttcacaaagttcagctccatctggtcacttatgtccctctctaaactggttattctacttagcagctcctctaaccttttatcaaggttcttagcttctttgcattgggttagaacatgctcctttagttcagcagaatttgttgttacccaccttctgaaacctgcttctgtcaatccttccatctcatcctccatccagttctgcacccttgctggagaactgttgttaacatttggagaagatggactctggccttttgagttttcagcattttttcattgattctttctcatcttcatgagtttgtccagttttgatctttgaggctgctgaccattggatgaggttttgtgaagacttttttgtttttctttcaatgctcgggttcctcttctgcagggctgctgtggtttgctgggggttcacttcaggccctattcacgtggtttgctcctgcgcccggagctgtcactcaaggaggctggagaacagcaaagatggatgcctgctccttccttttgcatctctgacctcgaggggtaccaacctgataccagtagaaacgctcctgtatagggtgtctgacaacgcctgttggagggtctcacccagttgggtggtatagggagtaggacccatttaaggaagcactttggctattccttggtggggtggatgtgccgtgctgggggaatcccacttgtctgggctgcccagattcctcagaactaacaggaggaaaggctatgtctgctggtctgtagagactatggccacccctccccctatgggttcaagcccagggagatcagagcccctggctggagttgttggagttcctgcagagaggccccacccagtgagggatgggtcagagtcagcacactctggctgcagtctgccacagccagtgtgttgggctttggggattagtcttgggccaagccctctagccaccctggctccagcaggggaaaagcgcagcctggagctatagagatggctgttgcccttccttttccttgggagcttagtgtgttaggcagctagcagtcccagtgttggctgccacctctcccctaagagttcagacagcttagacaacaggcagctgcccctccccctgggaactctgtaggcttaagcagattctagctgagtggctgttgagaatctacatggctccctggttagtaccctaggccccagtggtgtgggctcacaagtggggacttcctatccgatctatggattgcacagttccatggaaaaagcacagtttcccaggctgggtagcatgctcactcactgtctcctttggctgggggttgggggctcccatgccccatgtggctctcaggtgagccattgtaccatattgttcttcctttctctctgtgggtcatgccagctgcctagtcagtcctgatgatggaacttggatacctggattgctggtgctagattcacacactgttttggttattttcgatgggagcctccaatcaccactgcttctagttggtcatcttcgccccacatccccggaagattctctttgaatagtgattcagattaatagttcaagacacatttatggtctcataggaaagtggagaattctgtagacatttaatgtatgtgatgcttaaataatagcagtgacaatgcattcagtaacttaataaaaattaaaaaaagtaaactatagggtattatgtaagagtacagagatatgaaggaagccagaagagtctaataaatgtttgtcatcaaaataaattttattaaaaactctaatagccaaaatgcaatttttatgaggggatagagccatttacaaacagggattcagtgtgttaaatataacactgaaggaatgaggtaatattaagcttggctaagactgttttttttttccactcttgagcagtttaaccattgtgcttaagttgttcagttaaataagtcagatatattgtttgtttcttcattgccctgattggttgcctgatgaaacagttcagtcacaatggctgagttatggctgaattgaaggtgcccataaatacagactagagaggattatgtacttttcaaattggaagacacattatagattgcctagtccaatacatgtaaccaaatctgcctaacagagctagtctataaaatctcattttggcgggaacttggaaggacgaaggatacttttttggaaaatctgacatttgcctcttgcatggtactgaaaagagcttggattgaggagtcagaagacttgagtttaagtcttagttctatttcatatagcaatgtaaacttgggcaggtcacaaggtttggatgcctaccccctcaatggtaagatgggggcagtagtaccaccacacaggcctgtagaagaactgtacagttgttcattgtgtttgtgtttattagtaataatcatgtgtagaacacatttgactggaggcagtttgtatttataggctatctcttattgctcatgggtgtccctttattttcactaaataagttgtgaaatgcctaagtgttagaaatctgttattttattattccctattgcaacaaatatggtgctgtccccacaagatgattttacttcgtactgttgaccaattgactgaatctttgcctaatcataggagacatcgagtggtggctaccaatgagagagaacatgtaatggaatgtcattagctgctgtgtattctaccagtaaatgcactcatgttaatgttatgtatcattagttttgaaaatgtgtactagaagctttttgctttatgaaattagctgaatttatgaagataatttgcatttttattttaaacataccttttatgataagattttgatttgaaccaaagtatattcacaaaatattgttctcagttgaagaactttaatgagaaatgtacgtcctgtatcattctgtcatacatttagcttattgtctgctggaagacctgatctttgtccaaaagtttgctttcctttgcaacacattgtgctatttttcatgccaactcattattctgcctatcattagatactattaattcaatacccataaatgagcacctactatgggtcagaaactgtgctgtctaccaaggatttagagagaaatataatacaatccttgtcctcaaggaatttactgtctggccatgggaacataattttcataaagtcaccataaagcattatggcaaaggcagtgatggtgttctgtacacagtattttaagattcctgtatttcctccctgtctcctaaccagccagagagggatcaaggaaggcagggagtgaggagatgagagacagaggacactactccatggaggacattaatgcctttttaagaagttgagtttaaacccatctactatgaggaacatggcaagtgtaagcattggagtcaaagatttccatgttagatcactctggcatttgtgtgtaagtggaatttgaaggggacagcaagaacaaagacagctacattaggtagaaagccattgcagtagtctggaatagagatgatgagttctacttgtggttattttccatggaactgtagactgcctagtgtcagaagactctcctttcattctttaaatatttatatagttaatagttaatgaacacctaccatatgctgggcactgggtatgaagagacaatgagaacatttagttactgtgaaaatagaaaaaaatgcagaaatgtgacaagtgctatgacgtaggtataatcaggtatatggcagcaccagtgaggaactattaactcaccttggaaaccaggaaacacaccactgaaagtcctccagggaaagaaggtacaggtacagaggcatccaagcatgggaaattgtatgtgaacaggcacagaggcatagggacacatggtctcttcagggaaacgtgactaattctgcatatctggagcacaggaacctggcggtgtgtgtgaagggtgctatgccactgaaagactatgtggtttgcttggaaagtgtttaggaaaaattttaagtggggatacaacctattggatttatgttttggaaaaatctccctccagcaattaaatggacttcctaaagaaaagcatagaccaaaggagacaggaaagcaaggataaggatctgaataaaggagacagttggagaatagatgaaagggctcaaattcaagaattacttaggaggtgaaaattattctagagattccacaggactcagagcctatgtgaatgcatgaccaagaggactgcagggaaagccagggttcagttaaggtgaggaggtcaggcatgagtctatgaaaaaatggaatatgtgtggtcatactttttcatttttttagagccatggggtataagttctaaggtcacagatagtgtaaatgtttggggatatgggaatgaaagcaacagtgaaagaatatggattgaaagactacgaatgaagagtctgggggaagaacaggtgaatgaagggactgccacttagagcatctaccaagaataatcaactaagtcattcattcactccaaaaatgttcacttagtgagtttattccattcatatgttgtatatatatttatattttatttatttattatttattgggtttatttatttataacaaacatatatttgtgactgagcatcaacaatgtactaggtactctgtgaggtactggggatacagtcatgaaccatgtgtaccaggaaaggacctactagactcaatgtttgaagttagctttcatgttaagttgacgtggtgttcatgctggctgagccctaggtggtgagagaaaacacgccaggagcggctgttactcctataggaggcagcatggcacagtctatattggagtctcaggagagcacagaatatcctggaatgcacaggctctggactcatccaggcctgagtctgagttctgcttcagtgtgtactgttatgtccctgagaaaggaattcaatccctctgtgtcagtcttatcctttgtaaaataaggataatgatagccactttggaaatctacttgagtattcatatgaggtgcatataaaggttaagtaaagagcgtggctcagagtatgcacaaaaataattaattgtagtcatcattattatttggtatatatatttagagccataggagaatcaaagacctggatcttcaggagatagagacctgctctgaaggcactgaagccagtgtggactgaagttgcacgtaacatcaaagacagctctgttggtggccatagagattggcttcctgtggaaggaccttaaggttgcagctactggaaatttgcttacctttctacactttttattttttaataagtgagagctttacattgtctaatagagctgaaccacattatttcacttccttagattaagtgtccaaattcctttacaggcaattaaagctaatgaaaaataatttatgtgtctagaatctgttataactatcagatctcagtgattaatttggtttatgatgcagaaaacctgcacagtctaagataaaattgaaaaagagcaacatgaggtgaggtgagctagaactgtgatatcagcccaacacattttgctaacagaccgagtatgctggagtttaatcaactgaagagaacagtgatgcttattgagtgtgctaattctctaggcagaaagcttcccagagcacacacagcaaagataaacaaggccatgactcggtgtggagagcctgcacaattgtggaggctgaaggatcaaacaaagacaattatgatctcggttgtcacagcaattctgtttatttgggttagattgagtttatggagggtttgttatttaggagtcattttagaaggcagactagagttattattactacaggagatgttgaacctgtgtctgattttattatagtgggtaatgtttacagtaatataaaacagtcgagtagcaacattattattttcagacaactcatctggtgttctaacttccaacaacgtcctcctgaccaccttacagtgccatctctccctccagaggcaatgtttaaaatactggaataaatctttgaatcattttttaaaattggacattattcaactatttcaaattgaacattatttaaaaagcagagtttaaagcagttatctctccttactcccagtggaaacccttgactccaagttgacatagctgagatgactgggctttgtaaacagctagacttcagttcaacatccatttccactagctgtgtgaccttgggcaagtcacctattattttggggacctttgaacctatctataaaatggcagtaactatgccagtctagggtatctgcgagtagcaaatgggaaagcctgtttgagcatagagtgcaagagcctgcaatgcatgttctctccctctctcttcgcctcactaaaccactcactggacagggacctgacagaggatataaccaagctcagatcccagaggcttgaattctaagtgtccccaacatttactcataggtgtccttgggcaattcatttgcctcactgggctccagcctgagaattgggttcaggagacccaaggtttttcttggcttcttgaggagcctcctcacttccataggtttgctcaggcagtctctgctgctggcataagtcttcttcatcttctacctgtcctaatgccttctgtttctccagctcatagtgatcctttgctctctgcaatagcataaggttttctttgtgtattactcactgggtgtgggattgtgagcagccttcttttattcattaacctttccagttttttgttcttttctccctctctagaataaaaaatctctctgaggaaaggcatgtgttttatgcttcttggctttcttcagtttgtaccaggagcaaggaagctgattaatggcaccttgttgaagtagcgatcaaccttatgtgtacaaaagcatagccatgtgacattatccatttagaacaagccaaagtgccgttctggaaagcactgagtgtcgccgccctgcccaacacaatccacttgtccacctctttccgttttttctcctcctctgcagggacctgggaattttctcgaggcttacctatgcatgaagagaactaagagcctgccttcactctgtgaatttctgtggactgaagtccttctccaagttgagctgtgcagttcataccatgacagattttccatttcttcctcccagaagcctattggcagaaccagtctgcatactacactgttgtggtaggcggcagacagatgtgactcagagcatgtttgatttcccagaacatatttccaagggggtaatggctaatgagttcacctttgagtctgccaacaaaagaggcccacagagacacccaggtcagctgaaatctaccagacacagagaagacagattccagacaccagcagggtctacgaatgcctgctagacagccatataaaaagaaagctacctaattctgaaaaaccagcttcactgcattggtccatctaatcatgaggtgatcccacaggtacactttcagtgggagtaacaagaaaaagaaaaggctataaggtctatgttaatgaagtcataatctgcattagggtctgtcttagggctctacttttattttttcattaaatatttgttgaatttctaccatgggtcagtccctattctaggtgcgggggatatatcagacaaaaatccccgcccaccccacccctagaactcatatgcttatatgagacttaaaaacagcatccaaattttcacaggtttacactattttaccaacctgagcccctttgcctcttggtcccccagtctcccaaggagttattcagtgagactttccctcatttctgccaagtgcctagtactgtgctagctgctcacgtgttgattttgatacagttcacagttcataaaaacaccaaaattgttatgttacccaggatggtaaaatacactttctgaatgtgtaagtgatcattgtgatcgtatgttatactttccaactcacttatcattagtgaatagctcttaaagggattaaatgaatgattacccaataatgatgaataaagagagtaagagtggtattaacctccatcagaaccacagtaccatcataataccttgcctgttaatagaatttcataattttcaaagtgttttttcagtttttggttgcttagagtgttgatcgatctattgaaaccaaccagaaatccagattagtttaaaaatacatgtcttggatgcccattatgtgtgaaacacttagctaggcatgggaaatttaccaatgaacaaacggaaatgagactcctgtcctcagggacatgaagataaagacacagaatgctgagggagtgaagagccccagtcttggaaggctaagggaagtttcctggggaagctgaatttatacttggccctgaagtaggacttccatgcgtggaagacgtggggagaagatttccagcttctgctgtaaatgttagtttcacattggccttatgacaggctgcacatctgttccattgtctctggggatggttagagaccttggaaagagcaggtaattctgcatattaaattataacccattaggcggccggttagatgaaagggcctggcttcataatctctttctttccatgaagtaaccatatggtcacctttcagctgaaacattgtcctaggactgaactgcctggaagccggtgactttttttgttttataagattaaaattacttttcttttttgattataaatacaatcaatgataattatttttataagttggggaaggcagaaaagtatatagaagaacaaaggaataaaaaatgctacaatgcaaattcataatttgcattttgcaatatttctattgagcatttttcactgatacagtcattcattcacatttataactgggcttcttatggataaataggcctgcattggtgtgagaggaagaagaaggtcacacaaaggtagattcaagtgcttagcaagacacagtggcatctaatgaataggttttaaaattaatagggatttttggttggttttgactttttagaaatatttcattctatgaaaaattgagatatgggtgggatatgaaaatctgagatatgcatgaatatgttattatttcttaccataaattttaaggtacgtgtgttttttaattcttgctttataaaggaatgcatttaataacagagattcaacaagttagtaggaaagggatgctatgcccaagtatgtctaggcaacattttgtcaagggttctgcctatccagtctcaccaattctggatctcaggatggtaaccaggttcagatagcactgcttaataatgtggttcgattaaacagaagtggtttaattaaaactgactgagactttaaaaggagagtggatgctattgactatgtgatctctgttctattggccaccgtgatgtgcacaactgtttggtcatggactatgttgagaaacattttctctgattaataagagaagaaccaagtaggcttggagctagctgggggaccagctagagagatggaaatccttgatttcccggtgaacaagaacatttataaagacagaaatatgcagaatctgttgttgttgttgtttttgagtttgtggggactaaatcccagatctgtttaagcatttgtgagcactaatgcttttgtgagaatgaatttttctgaaggaacttacaaaagtgttgagtttcatgtttgggttaaagcaatcaagcatgaagacatatatatggatgaagggccaggatggagagagaacttctccaggccatctgagttccagatagatagaataagttactactaacatgaccaaattgtggaatgccttatggtactgatgtgagaaaccaatctctctttagagcaatatgactgtatgttggacctcccaggcccccttggtaaggccagtatttcctggagaacctttctcaaatgcataccttattttttgccttccataatatcatttccattgccttaaattctaccatcccctttcctatcctgacctctcaccgccttctattgaaatgccgcctgcccttgacttatcaaactgtactgtcacggtttgtttgcttgactaactcctttagtttataattctccagaatgcaggaactgtgcctagtaaaatggttggtatataataaacacttgataatttattgattcagttactgagcaaatgtaagtgggacttaagtttgcttgataaatgtttcctattattgacgtttactaaaatccggcttacctaaggaattttatttccaatatatactgacactgttttccttctctgactacatttattgggtacttattatatgcaagacactatgtgatctcatttaattcttacagtaaccctgtgttgtaagtactatatttctacaggtaaggaaatagagtctcaggaaaggtaggtgacgtggccaaggtcataaagctgggaagtgacaggaccatgatttgtgtccaggaagtctgacgccagagcttacagtcttttctactcacctcagaagtcctacttgtccttcagggccaagcatagactcggcttcctcaggaaactttcttgcagttattgtcatcatctatcttctcatctcaccattaggctgaaggccttgtgaggcaggaatcatgtatctcctctttctattatctcattgtatgtggccagcatcttgtaaagttgtttagaaaggaattcctacctgtactgggcagatgaggggaagggggcttggggatttctctaatcttacacagccaccctctgtcagagccagcggtaggccctaggttatcatctttagttccaggctcctttcctggaagaaaatgccttagaaaatccctttataaacaattcaggaggtgatagagttcagagattcttagaattgcgagaaaccacaatggttacctagataaatgtcctcattttaaacagtaggcctagaaaggagaggtgacttatccaagactgtggagcaagttagtagaaagtttggagtaatgaaaaaacagagaacaaaacttgcagttaccagatctgggatttagtattcactctgacacttagttcttattgaaagacctataacataaagtataattattcagattcaaaccaagttgacaatgtcttttctgtcattgtccttggcctatctacgtgcaaataatagttttcttcttagtagaaactccttttattccacttggcacaggcactatttattgaattgctttaaagaagttttttttcttgacttatgtcctcttgcagtctcctggctactcccagctgcagcctctcctcccccagccatgctccctgcaccctcccagctccccatcctctcaccagccatttgctttcttcatggatgccaagtcagccaatcagcattgcttgtctcctttcctgctgtgctccacatacccaactaaggctatttcctggtttccatcctgaaccaggctgaaattgctaaaatattaatggctccctttgtgaaaaataacaccgaagcatcttattataaattaaaattgccagagagtcagaaacaatgacatggaggaaataaagcaaagctctaatatgaaaaagtgttttaggagttaaggcaggagaagatatccttagccctgccttccccatcacaatgctgggatcttgccgtgggaaataccatcaccactggctgagagtcaccttcttgaccacctagagggggtgtatggcaaggtacgcgatccctgtggttttgcctggctggctcttcttctgggtccactgggagagaggatgagggaagagcagcatggatcagaaaaaaaaaaaaaaggcaatctgctgtggataaagaaaagagggacttcctgtggttaaaaattcatgtgacatcttgggatgaggaaggttgaaggatgctgagaaaagattaggctgaactcaaaggccaagaaatgtgattccttcctttgtttaatcttaagtaaagcatttagcactttatgtcttaaatatctgattcccccaccacactctgtcattgtcatcattttattcctggggtctgcatggtgcttggcacaaaccacaatgctaaccaggattttcagaatgaatggataaataatcagcaagggaaagagtagagagcaaaaactgaccctgaatattttcagcatagtgaacgttaatatttttatttcttttgtaatgaagagtacaaatggttgggagcaggacatcacaggaggaggaaagatagcgccatctctgcagaagaactcctgagccacacacagaaggaaagttgatccccagggcagcctttcccaccaaaaaaatcaggcccaatccaggagagtttgccagtagctccccagggttccagggtgtctgccagccttcctaggaatcgtgggcaggcttctaggtgccagtgactcaaactcctttttccacttcccagttcaacctggtcactctcatccccacaagttcccaatctgaatcccattctctgaccattctctgcttccttgtttttaatctcatttgagagtgatcctcacgggttcccctggcccctgcactcattttccttactgggtatgctaacgtttgtcttctaattcaggaaatccttccaaccctgttttcagctctgcctccaaacccttccatttccccatttcacctcccagtctcctcactcctggagcaaagagctctgcacttggattgctaagcatgcatggctcatgtggagcaggggagtgggaagatgtccctcagggcagaaagcctgcttttggtggggaacctacgtatcattcaaacaggcttagctgtagagaaccttcactgcacctctcctccagttctgcctctcccctccactatgctgaacttgcagttcattctgcagtaaaaagcagtagccaggctgcagctggtgctccagaagcccggctgtaagcatgcgcactgtatatgtggtgtgcaaggaagccatcatcagtcatataaagcagttgctatgaaacatgtgaaaagtgagaaacatggtttaattgtggattttattagaagtgtgatactagtcagaaaggcccaggaagttggcattgcagttaccagctcagggagaaggaaagagagcagcagaaacttctataggagatccaactgatgttaacatatgtggacaccctcctgtccccggcccctttcctttcacccagatttggtatgtggcaaatctaaacatttgcaaattcacagtcgtattcagtcatccggcacattatgaacttccactggcgatccctgtgggagggagagtcagaaaatgaatgtcagtgagaaaggacatggcaggaagaatcgctgctggggaaacagcagcagagaacatttggaggatctgggaactgaagggacacttaatctcactttgctcttagaagacatctttatgcagtttcccaagaaccgacaaatctgtgagttcaggtcacccttgaaggtgactaattaggtcactggctgtgtggaggcctctgttcatcactggtggtcagctcacccctgctgcctccagaaagtacctcaaggacctgtgggttaacagcttggaataaaagcatttatttaacatcatctccatttcattgtaaagaatcttgttttaggctgggcttggtagctaacacctgcaatcctagcattttgggaggctgaggcaggtggattgcttgaggctaggagtttgagaccagtctggccaatatgtggaaaccctgactccacaaaaaaatacaaaaaattagctgggtgtggtggtgcatgcctgtagtcccagctacttgggaggctgaggtgggaggattgctggagtccgggaggttgaagctgcagtgaaccgagatggtgccactgcactccagcctgggtgacagagtgaaaccctgtctcaaaaaaaagaaaaaaatcttgttttaaaaagtccgtccattttcccactgactctttctgagcacttaacatatgctgagtgctcaccatgcactgggctctgtgctatacatgtgtttcccttcagaaaacactgctacagaggaatgaaaaagtcccttaaattaaaaaagaaaatggctgccattctggcatcacaagaattgttatgaattgcctatgtgtttaagtggttggggatgggaagagtgtacatagcattactaaattttgaaaaatgtggtgtggatacatttcaaggaatgttctttgctcagggtgaatttatgttctttattcatccatttaagagaaatgttttgagtgcctacattgcatgacactcctgtggtctaatactgttgaacagtgataatgataattgtagcctctaatatatctggcattgcaccagatgctttacgtgttttctcttttaatcctcacaacgattcattgtttaggtgaaaaaccaggctcagagaaataattaacttgctttaaggtaatacaagtaataggtgacaatttcagattcgcagtttattgtactcaaatcttggtctttctcttaaaccacacagtctgcctaactaggtaatcttaagcccagaagaacacgtggctgccatgccctttgcacagtcctgataaagggcaaaaacgaagagtttttccatatttaattatgcaaatcattccaaagcttggtggggtcctttacaaactcagaattatctatctcccttttcaatctgcaagccctcttttcaacaatttatcctaaacactatgactaacaaggcctccatccagcttctaaactgaaaagtggggctgattgctcttagtcctaggaagcagggctcactctgctcaaacagcctaaggcaggctttctaattctgagtctgttgctccgggtcgtttgtttagaacaattgggtatagagtccctcaacacaaatctgggtgatcaacttgagggtctgggtgataccagggcctgggtgatattttgattcctgcaattgtcaaaagaggtcatagattgttttagaaggaaattagaaaattggtggcctgtgggtttaccaaatgtctgtaattactgcagccaggtcttatttatctgtgtagcaacaaacacagataaacaagatcttatgatcaggcattcaaactactcttttagaaggctattaattgatgctgagcaaaacttagacttggtcttatgaagaccaaatgattccaccaggttcagtctctgatttcacaccaggacagtgggggcaaatttgctccccaagggaatacttggcaatgtctgcaacttcttttggttagggtggggtgctaatggcatctagtgggtagactaaacatctagaatgcaaaggacagaccctgaaacaaagaaatatctggccctagatgtcaatagcgcatagatggaacaacagcattctaagaggaaaccactatgatttgcatgtggagggaaagctcttgcacaaggagtcctgccctgacaatagttctccaagctggggacctcagcatctttcagcagaggagaagaaacccaagttgtggatcattaagctacttatttttgatgacagtagcaaagttgcatgagtatatttattttattttattttggggggaggatactcattttaaattaatgcaatgacataatatttcagtttttcatgattctgggtaatccacataaccgaaaaatttactaaaaagtgaatttactgaaaactgaattgagcattttaactactcagatatatttatttcatactaatcttggatggcactcttcctttactgtattaattcctgctttcttaaacagggaacatagaactaattttcttgttgagctgaagtcatcatttggagcattgagcacccctgttatttcgttttgcactttggggagcatggccctgctaaatgacaacccatgttctttgagttcttgagcctttcattttctttatttttcttaagcatatttgttatcatgtcatccagctatttattctcattggtggaatgagtttcattctaagtagtatatactcgtttccctttctaatttgctgcttctagaaaattggtaactaagctagtttaaagtgtatctaaagtaaaaataagtaatgtgtgcaaactgagtggtttgcctatgggtaaacataaaggtttttgctgatcagcctgcaacatatattgtgcctttccagagctacttaatgtctttttttttttttaaaaaaaaaaagaaattctaggtcatattaaataagttcactttatttaagatgtaattctgtttgaaaacacagacacacaccaaagatgtgtcacactcaaattcatcatagcatactatctaatgagttaatgtaagtgttatttggtttgcaaaatatttattggtaacttttcaggaattcatttctgtgtaaagtgattatcggctgactaaaagtaggccaaaccaatcattaacacctgaatttacccacacatttctctatattaatagggagtacaattcttgttttcttcttaccgttttgatgtatttgagataggattaaggagttgattgtgagagaaaggtgatgaaaaaagtgttagtgctgtttttatctttaggccatttaaattctcttctttcattaatttttgcaggtttactgagggattgttaactcctttcatttctaaatatggttggtagatgctatggtctgaatgttggtgtccccttaaaatttatatattggaacctaatactcaatgtgatagtattaggaggaggagcctttaggggggtgattaagccatgagggctctgctctcatgaatgggattagtgcccatataaaataagttgaagggagctggcttgccctttccaccatgcgtgaggacacagtaataaagcaacatctctgaagcagcgagcaacccctcaccagacactgaacctgctggcaccttgatcttggactttccagcttccagaactgtgaaaataaatttctattgttcgtaagttacccagtctaaggtaatgtggtatagcagcccagactaagacagtaggttctgtgtgtttcttatctccaatcccttttctttctcttctctcttctttcctaaaacccaaagtggggatgatatagaggcacggggtggaagggggtccattttgacaatgggcactcctctaagcatatttgccttctcctcttggtgtttcatgaggaaaagtgctctttgaaattgagtgaggggaaaagcttagaccatcaagggataccgagtttaggactctctgctcttgagcaggctggaatccaccctcacttgcaaggtgagcagctccatgaggtgagctcatgagaacagctcacttcccactgcctcccattttccagccaaaactgcagttaatccttgaccaggtaggaaactaagataagtaaaacctcaggtcaaagttcctgcagaaatatatgtgcatgtaagaaattttcacttgtattctacgtgtgtgtgtgtgtgtgggtgtgtgtgtgtgtgtgtgtttataaattcctgcaggtaaaatccttgcagggagttagtcccaactcctttaaccctagcccattgggaaggggctgtctttctcacctttccactgcagagaaagtggttgttgctcctcggatatagtaatcataattgtaggaaatcatgtccatttcctcaccatagtgacctggatattctgttgttagcctatgcaggaagaacaaaggttagaggaaaatgaaacacattattattgctgggagcaaacagaagacacactatgaagaagagatggagtttgagcatcctggcaaatccagactgaagttaaatgacatccaccaaacaactccaggctgtgaagaaacagacagctctcctcccacttctcatcttccttttctaggccattaaactgtgcactgaaaaagatgaagatacctccccaggctttggaattatcaaaataactttggaattcttgatattgattaatatcaatactattcctattctattcaagtcaactaagacaatgttttcaaattttagattatgattcattagttgataacaaaatcaatttaattggctttaaaagagacataaaatagaaaagaaaatataaaagcatgcatcacatgcagtaaggacgagtctatgtatgtaaacattttgtttcaaatatatatgtgtgtttgtttataagatgtacatattgcgatagtttaatgtttcttattgtgagttatagtcaacaaagtgttcaaaaattatttaattaaaatgtaagctccccaaaggtagagtttttgccttgtccaccattgttcatccagcacctaaaacacatacataataaatattagctgaataaatatatggcctggggaaagtcaatgaatctgttttctgatctgtagaagaataaagtctaccttataggtttgtcattggaactaataaaaatgagtgatgagtgtgctatactagtacatggtaggtgttgaatcactaagaactattttgtttcttcttcctcttcctcctttcctttccttctcttccaatattgagtaaatcctgagccttcatatgagtaggtccatggtagtccatcctggaataaagtctagaatcccccagttctcataagggctttgccactggaaccttcaggaccaaaacagtccttttaccatgaaatagctcctccaaagtctttatccacaccccagggacgcttggaaaacaactagtttgtgagtgtcaataatttcatctgatttgggtttaccagatcactgtttattaatgctagaaagatcttctcctctgcagactgatggtgatctttctccaagattgtcattaaatcatgaaaagattgatttataaactgtaagggctcctaggaggatctcagtgcacagatggagaaagatcaatggttagctcattctcttggttcataatcattccttttacccattattcactaacccttgttctctgatttgacttttcctaagacgtaattatgctctatcaggatgccaagtccaacccaaagtgaggtacctgtgtttttgcttaacgagttcatgaagggaaataaggtcctgcaaatccagaaacttattttgtgcttctaaagagatccagaagcaggactttacctttcaggtaaatgtctttttttttttttttttgagaccaagtctcactctgtcacccaggctgttgcacactggtgcaatctcggctcactgcaacttccgcctcctgggttcaagtgattctcctgcctcagtgtcccaggtagctgggattacaggtgtgtgccaccacacccagctaatttttgtatttttaatagggacggggtttcaccatgttggccaggctggtctggaactcctgaccttaagtgatccacccgcctcagcctcccaaagtgccgggattacatgtatgagccactgcgcccagcatggtaaatgtcttataagtagaactaatagggccttacttggatcccactgatttatgatccatgagaattctaacaaggactgtattaaagttaacccaaggaaagagaggtttgttgagaacatcaataatgcaaattagaataagaggttgcatgggggtgggagggggtgtgtgttttccttacttcagggaacaaaaaatattttctaaaacttttgaagcatctctggatacaatgtgtaaaaattaattaccaagttgtgtgttttttcttttttttgctaaggcagaatctacatacagcaacactgcattaagctaaatccaattgccaaaagtatttggaaattatgaagctagatttttattttttaagtttttactgaccactctgatctgtcttcagatacttggataaatatcacggaataaagtgggaaagaaaagcttacctttaaaaacatcaagaagttttaagcttcaaagaaggaaaatgttatttcatgctttctttaattaggattctctgttgcttcatttttggtagtgaccagacataagccccctgtctaactggacagtttgtccgagaagcctctccatgaggtactgatgtccagtgaatttctagaatgtcctagagaaggtgaggtgcatgaccattggtactttttcttcttggtcccagacaggttttgttttgtgtgacttttggttgttgttattttgtcttgtttttgttataacaccatgggattgagtttagactgtcctagagaaacctgggtaaaggaggagagggaaggaggttggatatcgatggaaatctctcctactttatgaaataaaaataccaagggagaaatgacccaaatcactggtagaaagtgaacctcccaaacaccatccataggaagaactattgagtcaatgtggcccaggatgctgtgttctgtattttcaaaccagatatatgtggctgcatttagcgcttgatgacactgcatgtgcacgcgcacacacacacacgcgcacaaagtgtcctaataagtgaaagcccagtaatagctccttagagagaaaaaagaatttaaacgttcagaactagacactgagacagggcatagggacttttcaggaaattaaaagaggctacaaggaagcagaatgatcagggtttcctaagctgtgacactgggctttgcgagtgtaggtcggggaagagttcggtgtggttgcagcttccttgtgaattccttgtgaattactaggtcactttaagcagttttttggaaaaacacacttcatactgagcattgccatacattcctagaccaattaaaacaatcaaacaaaccttcagcttggcaagatgaagaagagcgcaggtcaggaagatgcctttattgaaatgagtctacttttcaaacatttctatgggaagccttattttctcctttcccctaaagtaaagtgtttgaatagatttattcaattttagctattacttaatttttaataaaaactactgctgtgcaggagaatggcgtgaacccgggaggcggagcttgcagtgagctgagatcgcgccactgcactccagcccgggcgacagagcgagactccgtctcaaacaacaacaacaacaaaaaaagcaaaactactggtgtgtgtgtggggtgtgtgtgtgtgtgtgcatgcgcactttcagatgaatgactcttgtggtacagtttctcacttcacagcactttttctgctgtcaagatgaaagacagagagttgttccaaagctaagaaaaaacttgataacataaagccacttgcacaactcttgtgtcagctgaagctgatggtaaaaaaattaataatattttacttatgagctgagggaaatcagttcgaactgaagacaattttaagattgatataggatttttctcatctaagattcttgaagctctaaaattattaacagatccaactggactcaatgaatgtttgctatgatacaatatcatagactgagctgctgctgatagatgtctcggctccgttgccacaagaacagacatattgcagagctgagtccaggtatacgctctcacatccattttagaaagggaaatagagatacaatctagttatatacagtggccaattttattcattgtcagaggttgggttgagaacttattaggtttttaatagttaaagtaaagattttcaatctattccttgacataaagtgactcagcgtaaggttttgtgaaaacccacctctacgagaccttattcggagctagacacttttcttctatgaaagtcaaacttcatagcactgagatgtgtttgttacagctgtttcacttggggaaattagggcaactggattagtcggtgtcacctggaagctcctctttcaggactttccctccaattgatgtgcacatgaacagatacagcttcatctcatggtcaggaaacatcatatccccaaccttggcccactttgtggggacaccagaaaagcacacaccacagactccctaccataaaaactggaaaaaaaccccagcatttacatatgaacagatcagaacgggtacctgaggaagccatacttcagctttttaaaaaataagaataaaattagaatgtcttccaaatgatcttttatagcccagcttatgctcaaacaacattttagagaagcttctgttggtcattcaatattgaattctgtttttcttctatttctctaccactcaattagcacattactttaaatatcccattcaaatgtcctgtgacatgtcagctgatacagtttggctgtgtctcacccaaatctcattttgaattctcagatgttgtgagagggatccagtgggaggtaattgaacctttgggcaggtctttcctgtgttgttctcatactagtgaataagtcacatgagagctgatggttttaaaaatgagagtttccctgcacaagctctctttctgcctgctgccatccacataagatgtggcttgctcctccttgccttccaccatgattgtgaggcttcctcagccatggaactgtgagttctccattaaacctctttcttttgtaaattgcccagtctcgggtatgtctttatcagcaacatgaaaatggactaatacatcagcactatatatttagcaagataatagaatactgtataacatcatgatggccaatatagtgagctctttgagggatcactggtgcatggaatcaaatatgcttttatgatctggttcagaggtgggtttggaggagaaactcaacatttgcggatttggtgtgttgaggttggcttacgttttatatattcagctaaaaagatgtccctttctgacagtcaaatcattgagaagtttgttaaataaagccagtctgttcatgatcaatcctcttgcataatgcttttccaagtaagctataaggaatgaacatatttcagattaatttagtttgtctttattaggagctacatcagaccccctttgaattagttttgtaaagacagaaaaaataaaccccaaatggagttatgtgtaaaggaaaacagccacagagaacaatccccaggcttcttcccacaagagctggggattggccaagcgggacctctggtagtcacccaagtgcccttctctgcacagaaaatctgaacccaggggctctgaggtgtgtgaaataaaaacaaatgtccatgtctgtccttttatggcattttgggactttacatttcaaacatttcagacatgtatcacaacacgagggaataacagttccagggatatctgtagcttaaatgagtagaggaaagtccctgaacactttccaaattgctctcttggaactgagtttctaactcactgtccaagcccagggctagtcagtaagcacattcactttgactcgtgttgattttcattagccacattatgtggtggtcaccctgggcctgcatgtcagtgggggctacttgaccttcaacagctcccctccaattaaaatagttttattctctgttttctaccagatgcctactgtgctattatgtaatatttcacctgtagaagtcttattcctcatctagagacagctcagtactatgcaaagagcatgggatttggaggcagatagactggttgagtcaagtttggaactttgaagggagccacaacttctatagctcagttccctcatctgtatgatagtatcataatttttgtgtgtgaggattaaatgcagtaacacaggaacacgtggtaagtgtcaataaataaatattattattatcatcattatcattagtagggtctcacccaaagcctatgaattgttattatttcatatccattcacattcattgactgcttaagtgaattaataaatagaagtaagaatgattgcctctagaatctattatagtagagggaagcagactagatagaataaagcatcagatttggtttgtaactgagaggtttactttgttctaagtagctggccttgggttaaccaatacttagccagacacatctatgatatttctgcttttgaagtttgaacataaggagagaggtatcacctataatgcaggcaccaaatacagtcgatatggtttggctctgtgtccccaaccaaatgtcaccttgaattgtggtttccataatccccacatgtcatggaagagacccagtgggaagtaatttaatcaagaggacggtcactctcatgctgttctcatgatcgtgagtgagttctcacgagatctgatggttttataaggggcttttcccccttttgcttggcattttttcctgccatcatgtgaaggacatgtttgcttctccttctgccatggttgtaagtttcctgaggcctccccagccctgtggaactgtgagtcaattaaactgtttcctttgttaagttacccagtctcgggtatgtctttattagcagtgtgagaatggactaatacaacagtcatcagtggcatctgcaggggattgattccaggacccccatggataccaaaattttcagaaactcaagtccttgatctaaaatggtgtagcatttgcacataacctatgaatatcctcctgtttactttaaatcacctctagattacgtataatacctaagataatgcaaatgctatgtgagtagttattatactatatggttttgtatttgtatcattttttattgttgtattgttatttttatttttattgtttttttctgaatatttttgattcaaagttggttgaattcttggatagggaaccccagatatggagtgccaattgtacatgtctacattttaaatatggcacaataattatggaaaccattccagcagatgaaagggatgatagattttgctcaagttcagagaggctgctgtctgcacaatgagtgctatgtacatcatgcaatggaaggcaatggttttagtagggcgcagagcatctaaacccaatataagttcctttaaattgagacatctagtccaatttcctcaaaacttaagtatgtccatctctatagtaatagcttccagcttgcgcagaggaccagtatggaagctgctcttcatttttatttttttattttactttaagttctagggtacatgtgcacaatgtgcagtttgttacatatgtatacatgcgccaggttggtgtgctgcacctgttaactaacattaggagatatacctaatggaagctgctcttcttaccaggcctctgggagctgaattgcaggaggctgtctgggcacaggtggcatatgacaggcacagcaatgcagaggcctgtgagattgttcatgtccctaaaacagcattacaggagtgaacatgcaaacactccctatcttgtattaacatctgaacaaagaggctaagaattaaagattagctttgactgggtgctttggggtgggagagataagaatgttctaatcaactgatgttaactagagctatacaggaatttaaaaaaagcactctctggcttatgacttgcacacagagagtggggaagtaggcagtggagaatgcaaagtctgagagacagaatatcagggttgaagagaaaagtaaaggttacctaaatggatgcattattttacagtcaaaagatattatccaatgaacctaatgaaaggccatgggtctggagaagagccatttggaaaagaaaatgattcacaaccatcagatcctgggacacagagtctccgcctggacagtagacagtctggtgtgcagcctgcagctgctgagctgtttggagaagagagattatgacaaacaatgtctaaagggttgtggcaacttcagtgacatgtgtttgtggtttgcagaccactagactaagaattagaattttcatatctaaataaatatctataaaattcactattcatccaatccagtggagaccatttcctaatggcatgtccacatctctcaggaatttgctttcttgccagagtccagtgaggctgtaatatccaaagagaaaccgcacaagctgaaacgagagcagcaccttggttcccaccaaacaaataaatctcatactcatttgggagttggttggatgatttgttttttccagcccagagtgatgatatttctgaatccctaagtgctcacaaacgcaggcgctagatattcacttagctagttcatacggtgtcaggctgcgtgctgaagaatgcctttcaaagagggaaggggaaaaatgtcgttcccacccacatgggtccagttccctgggaggtaattcaagctaattaaagtcatgtaagggaaggtttcagataagagggttatcagcatttcactgtgggaaggtgcaggaaaaagagttctcacttcactctgtaaggctgttaaaaggatcaaataaaataatgtacatgaaagaagtctttgtcaactataaaacatcatcacatcaatgtcaggtttcaccattgttactgttcctaggggcttgcaacattcagttattcatctgacacatttattaagagtctattttgtgctgggtaatatcctggagatgttgaaaaaataagacctaatttatgccctggaggcatttagaaagacatataatacaacatcatgactcaggcaatttaaagatgccactaaaatgtctagacacaccagcgggatagtgagtcatacactgtgtaccatggtgcacacttgaatcttgttctgctgcttctccaatgttttctttgaaaaaataccattttatttggtgaccgtgatagctctcagctctaacaccatgccttcagaaatagaaccagcaggtggaaccacaccttagtgggacttgtttcaaagttgacttgtcatgccttttggattaattctctgtactttccccaccttttggctccacagaccaacagcaacatgtctggatggtaggatggggtaaggaagggtaaagggtatgggggttggggtgggttcagagtggcaaagtcattgcagatcaaggctttgggtaaactttgtgagcagagacatgaatatctctggcaactcaaaattgctcatctttatctatcaatctttaacattgagactttgttcctacatatatgtctatatgatcattacatttttagcatcttagctggtgaattgcatctaagggagcttgagaagcctttctaaagtatgtgagaggaacgatacctagcattcttggggaagcagaagtatcctggaaccagtctccaggtgaccactggaaatctggggcatcattaaaacaacggtggaactggaaacacaaagacctgtctttttcaggtctcagcattcaaataaacagacaggataagcttcaagaagcaatgctcagagtgttaacacagatcccacagatccacggaatatgggaattccaggaaaatttagatgtttatccctttctctcacacttaccttcatccaccccctatttcttctgtttgacaactttgcttttttttttcttcttcttctttttttttgagtcagagtcttgctctgtcgcccaggctggagtgcagtggcgtgatctcggctcactgcgagctccacctcctgggttcatgccattctcctgcctcagcctcctgagtagcagggactacaggtgcctgccaccaagcctggctaatttttttttttttttgtatttttagtagagaacggggtttcatcatgttagccagcatggtctcgatctcctgaccttgtgatctgcccacttcggcctcccaaagtgctgggattacaagtgtgagccaccatgcccggccttgacaaattttctaaaaccagtgagccttagctccttgcctgcctggtcacccaaagccttgaggcccaagcccactatctgttgttgttctgtttgggcaggggccagccaaccatgatggcatggccacagacacagcaggctctcccactcatctctgcagagacctcgagccttgctgtgatgaggaatgttgctgcctcagcttactcctctctgcctggggaagaatgagttagtacatctaacaacagactgtccaactggtcacatgtcttgttcctctgcataaccaaccccgctctcaagttctgcttcctgcaatgacctgacacctgctaggttgttcctgggcagagtttgcctttgaatgtcctgttagttggtgaggaggctgggtctctcctgcatctgggagggtgaaggggactctgtttcaagacaggtcagctctgtgtgatcatagacagtggcaaggccagaaatatattatcttatttaatgctcataacaaaaagtagcctgaagtcattccttcatccaaacaaatgttatgtgcctgtcattatttatagggcttggcatatgtcagcacaaagatctctgcttgtgtagagcttatattctgggcagaagtggagggatgggggagagaacaaaaaattttatgtaagagaattatattttctgggccacttcacattatatacaccctccacaattattaatgtggatatttgttcaacagttgttaagaagacactatgttccaagcactatactgggcattgaaaatacaaagatcagtgagtggccccatatcctccagacactggaagtccaggtagagaggagcaactgtacacaggtggtaaaatgcataaagtgctgtgacagaggcatctacgaagggcagagagacagagccaccaacatccaggcctccagctgcccctaggctgtccatgttccccttcctccccactgcagcccgtgcagggctacctcctcacctcctcactctttcccctgctcctgaacccactcctcctggccacccagcataccccagccctgatgtgttcctttggagtctgattcagggaaagttatactaatgtagtaaataaattcactgactgagtattaggttttgcttgctctttcaggtaatttacatacattttaactggcttttaatgctttgcaacaaagggaggctggtttccttgtgggaagtgccattctgttaatagaccaggaatgagagatttgtggaggccaagctcctacctactctcccctttcattagggcgcactcgtctttggaacttccttcatcctctcaaaacagttctggcatctggatcatcttttccaaaagtgtctttggaattaagacatttttagggttcaacacaacctgaaagatcttctagtccttggaatttcaacttatgatccaggggttcttggcagtgtgttcatgaatggccttcagggagtttaaggactcccgaaattctctgcaaactattgtattaacatgctaagtgcattttcccccctgaagacaaggtctatagttttcatcagagtcttaaagatcttggagactcaaaaaaggtggtcatcattttaggtgatgtgcttgagcctgcagagttatgagagggaggggagaaggggaaaggggaaagaagggagggaagtgaggaaaggccaacacagagactgaaactcaagtttctttttgcccaaactggtgctccttctacctcctccactgcaagagatctttaggtctttggttcaggacctatcccagtggcatcgtaatcctttgccaggcctgttcacccactgtagaggagtaaaagctgctttatggaagcgattttgaagaactagaggaggtttctgctccatcatacagtgacaggtgactttgagctctgaatttactatcggtccttactttaaaaagaaaaacgttaagcttttggggctttgtatccctagagatactgtgtgccactgggcatctgtggagtaagctgtctgattgcagagaataagcatgacctgtgaagctgtccttgcaagcatcaaactgtagagagatcaatcacttgagggagccaaccttcacatgttgacacttctggatccccttgcccaaggcagaaatgcctggctcattttcagattaaaaaaacctgggccggttgtgttatcaacacccagtgtaagtcatcagggcaaatgacaatatacacattctcctagtcaattggaaggctaggtcaggagatattcggcatgagcccagggatagggaaagaaacaaaacatcagaggctggaattccaaatggatccagaaaacagcacaatctttttttttaattttttaattttttaatattttattttttctgtctataactatgtactagactctgacccatgagaggattggtttctcccagagaaagactacaggaaactaggttcccaaataggccctgcagccttggatatgatgagaagttaccagaagttggggagaaggagaacagcactgggatgggagtcattaggcctaagcttaagacttggcattcccacagagtaggtgggtgactttgggccagtcagtgccggctctatggttctgtttccttttctgccaaaagaaggatgtggggggttggataacctgaaagatccctcttggcgggaacatcctcctaagtcattcattcattcttgtctatatgccagcgctgccttccaggcttgtgtgtgaccctcaagcttacctgaagctagagcacttcctaggtgcctctcccaccccaggagtcatgagggtttggtcggctgccagactcaccagcaggaatatgggcacctcttgctgtagcgacaacagtaaaactgccactcccgatccagcactgactcgaagtagcggctctggaatcctgccaccagcccattgttggagcacgtctggtacctgaagagaagacaaccccaggaacctaagaacagtgacacatacacagaccccttcccaagaccccactgccacagttacacactctttctctgacctagattcttaacaatttattccattttatgcaaataatagtctttattatatttgtagaaataacatagcccctccattaaaatttaagtgactcagaattttctaactgaacaaaatttagggaacactgcccctgtcatacctctttcaatatatattgttagatggaagcctgcataaatgggtggatctagaattttacatctagaattttacaaattcgagattgtattattcatgccatttaaaataaaaggtattataattcattttactggaatttaaaataaaaagaagacaaagagaagcacaacgtattgatgaatttcaaataaacatttcttctgcctaagagaagagccctggaaattgagcacaaggatgatcattcgttctgcccctgcacagcatgcaaagcccagatgggcatggtgaatgtgcccagggcagcccagtaggaaagctgggaccacaacccagattcttcctacttatccaggaatctttctaccacccacaagaccataagctctacacagccatggcatgtttttctcagaattctattcctggtggccaccaagaatcctggctgtggaggcagtccttacagagttgcaacaggccaactgaatgcctcaaaccccctctaaagatccctttcctgtcctagctgcttagtcctaattcttcaaatatataaccgctccactccagtccacagacaagaaataatttttgctctttcattctacctgtgctgctgctggtcttcacagcaccttttgaactaaacattgacttagaatagtacaatcatttcttcctttgttccatctctagtatgattttctcccattcccgggcccaattcctatggcgtcttcaggcttcccactttttgctgtgatgataacactattttctacctgaccacagtggatttccactgttcttgctacttatccaggaatctttccaccacccacaagaccataagctctacacagtcagggcatttccactgttcttgctacttatccaggatctagaattttacatctagaattttacaaattcaagattgtattatgcatgtcatttaaaataaaagatattataattcattttactggaatttaaaataaaaagaagacaaagagaagcacaatgtattgacgaatttcaaataaacatttcttctgcttaacagcagagccctggaaattgagcacaaggatgatcatttgttctgcccccacacagcatgcaaagcccagatgggtatggtgagccatggccctttgatgaaatccagtggatttccaccttatagcatgagctctttcacaaacccttccaaaatagttcttcagttacctctccttctttgcatttcccaccatcccagccattggtctatcccctcttatgagtgggcagagccagagcaggcagttgtctatgtgcatggccagacagctgctggaatgcaaccttgtatttcatgggaagataagttttcagaaaatataatgcataaagtaagtaccgtgtgctgactggtgagagaggccttgttgacacacaaattgtaacattatcaacaagtggatttcatttattcttttccattgctgaaaatgaacttgcagatctaacaaaattagatattaaatatattacttgtctgtcatcagaaatcatccgtccttttaaatttattatttattacttgttattcatttattcacctaatgtatataattcaaatatgcatttatttatttatttatttattcattcatttattaaacatctcatactctactactgttctgtatcaatcactttgctattatgttgtgagaagaattgagagatgggctcggtattcggtcaaccatgtaaattagcttgaattccctgttcccaggacttgtaagaagttctggcagactagaaaactcagctataggggctcagtaatgcaggttaaggtgtaaattgagacctatggctctttgatgatctagctttttttttttggtatgtgcaactgtgtagtttattatacatgtatctaggttttacaattttcttttattttactttaagttccgggatacaagtacagaatgtacaggtttattacataggtatatgtgtgccattgtggtttgctgcacctatcaacctgtcatctaggttttaaggcccgcatgcattagctatttgtcctaatgctctccctctcctcacactctacccccgactggtcccagtgtgtgttgttcccctccctgtgtcaatgtgttctcattgttcaacttccacttatgagtgagagcattcactgtttggttttctgttcctgtgttagtttgctgaggatgatggcttctagcttcatccatgtccctgcaaaggacatgatctcattcatttttatggctacatagtattccatggtgtatatgtaccacatttgctttatccagtctatcacggatgggcatttgggttggttccatgtctttgttattgcaaatagtgctgcagtaaacatacctgtgcatgtgtctttacagtagaataatttatagtcctttgggtatatacccattaatgggattgttgggtcaaatggtatttcttgttctagatccttgaggaatcaccacattgccttctacaatggttgaactaatttacattccgaccaacagtgtaaaagaattcctatttcttcacagcctcgccagcatctgttggttcttggctttttaataaacaccattttgactggcatgagatggtatcttattgtggttttgatttgcatttctctaatgatcagtgaggttgagctttttttcatatgtttgttggccacataaatgtcttcttttgagaagtgtctggtcatatactttgtccactttttgatgggattgtttcttcttttcttgtaaatttgtttaatttccttgtagattctggatgttagacctttgtcagatgggtagtttgcaaaaatattctcccattcagtaggttgcctgttcactctgatgatagttccttttggtatgcacatgctctttagttcaattagatcccatttgtcaattttagcttttgttgcaattgcttttggtgttttttattatgaagtctttgtccatgcctgtgtcctgaatggtgttgtctaggttttcttctggggtttttatggttttgggtttttacctttaagtctttaattaatcttgagttaatttttgtataaggtgtaaggaaggggtccagtttcagttttctgcatatgactgatgtagccttcttcattctaccattgctcgcatctcatcaggagtatactaatcactttgtaaatgcctggcatacttcagcaagctatatgagtggaatggactaggctcatgatatggtggaaaggtagctttaggggctgatctaccagggtgttctattctatcctaattcttagtaaagtaggtgagaggtaatttcaatatgaagctctaagaatcataagcaaaactcatatgtgtccaaaaagagaaggttgccataagctagtgctctctgtgacctgttctcctaccatcactaaaatgctgccttcctctaaaacaaagccctttcagaactgagctgggctgtggtttccacggagttgttgttccattgttttggcttgtcttctgtactcagacccctataggggacagagctcccatgggggtaagttcccctaagtaaaaataaatgtaggaagataagccgaactgtttcatggagtaccagttctgaaggcaatccaagttccacaaattccccgccagctgttggccaggctgctggccccagtgcctgtacgggaagtgtgtgtcactttctcacacaccacctcagataactctgccctgtgaagattatttggaccctacagactcagagcctaagaacatatagtgaaagttagataaccaaacataaccctcctcctccggctttggtttgattgccttcacattttggtagagtcagcctgttcaggagtttggtatgtgaaagcattccttccagagccggatctttgtgggggtaccttttcacactgtggggagcagatagtagagtggccaagagcattggctatgctgctggatggctccactgttcttagctgtatcatctgggcgggtttcgtgccctctaatagcctcagtttcctcatctgtaaaatgggcataataatagcacatatgtattaaagttatcgtgaagaccaaataagacaacgcatgtaaaattcctgggattaataaattgcttattagtgtcattatacttatgtttagtctacacagtaattatgagtctactttgtaaaagctgtcccttggctcccctgtctctaatcagtaaaacactggtggattcataggccctccctgagctgctgtttccctaaaacaaagctcaatgaggttggatgtcttagccacccactttggagcacaggtactttagtatgccttaccactctcaggaagtagtattccatgcagtgtctgacattgttgtccagcaaatgtttaatagaagaatgagggaccgaatgagtgacccgactatgtcccattattggaggcagaattgacttttaagagctcatcactcaattccattaagggccctgaaactccctccaagtagtttacatggatcttgggtgagcaatcccttttcttgcttccgttctctccctgcagctccatgatgagggggcaaaataaatatagctttgggcattcctctcctccattcctctcattttcacttttaacaaagctccttatttaacaagactcacctaaacactggccatagctgcaggattacaaacacagagctaggtgagaagagaggcaacttctaaatggaacaggactgggggaactgtcagggattgcattgctaaagttactcaaactcaatttcaaaagagatgggtagcggtcaaatgactaatgctctgactcacttcacagcacctggttgttgctcctgaatggcctggagaacagggcagtggctcaatgctctattccgcttggagggaaactacttggagggagtttcaggccccttcatggatgtgagtgaggagttcctaacagtcaccaatacgatggctaatatcctggtgaattgtataacatgaccgcagctctaaggaaataagactatttccttagagcaggagggcactggtaccttacttacaagactctccttcccatctgagaagacatactttttttttttcttaccacctctttgaaggctgaggttcaatttcagtttcagaaactggagtattgttagccctgctccatctgaaactggaagctttctagaaggaaagtcacaaggtaattactcctcctctgaaaacacatttgtgaacctattctgagaaagtggactttctgaaaatgatttatctcagggtcatcaccctgaaagctaaaacggaagactttctcctgtatctgcaatagtaaaacataacagcagtggggtgcaggggaaagagcccttgttgaggaatcagcagacatgagttctagtcctagccctgacctttacatgctttgtggagcctcacctaaggcactgtgtggagtcagtgataatgcctacaaaactctcggccaagagagtaactggaagagccaggacccaactcagattcatctgaggtcaaagctcatgttcatgagctctcaagaaatataataaatctcttcgagatggtcccacagctctgattggtatgctggacaggacttcttcttgttgtctgcattctttaccaagtccaaagctattggacaggcagaattacagagcatttgcaaggtgtgtgagtgtctggttttgttggtgaacccctctatacaattttagaagttggacttgctaagaagtttggactttaggtggtgtggtgtggggttgagtcaagtgatgaacaaggtaaaaggaagcagcaccatcttggtcaagaactctcaaaatttcattaaatagataatagatgggctggttgtgctggtcttttttttcccagcttcacagacacacaggtgtttcaagggctgttagccagtttccaaccccactgcagagatggactatgagaagttttgcccatgatctagacaagtggctcactccatgtggcacagcatccttaacactcccaaatttctttcccgccccaaaggtggatgaggtcttaaatagtaccaaaagagtttctttcttttagagtaaagctttgatttttgttaattctattttccccagaataattctttgagttgctatcaggcatttataaaaaggcccacagaattttagaatgttcattaagtcttttgacaaatattcactagaacttactctatacctgatgctgcacttggtctggaatctcttcagaagactggtactgataagtaaacactatgacattggacaggcagaattaccagacactgtaactgataagcagacactatgataatacagatactggaaataagtagactggtaccaaagacagaggagcagagaaataggagagtggttggggacagtggagcagtgaagtggcaagggacagagacaaacacagttgggggcaagtttgcccagtaaaagaagccttcaaagttctggatttctctgctaattccaaacagaattgttccatgacccatctctccccttctgctgatatttatacctacttctgtaaaactaggatgacagttcttaacctgacagtattacacaaaaactaaagagatgctatatatcaagtgtagcatagaacctggcacaacgtatataattgaaaggcaggggaagtcatagttattactaccatgatgataaaagtacctgtaatctgatagaaagacaggctacatcctagtcacgaaacatcactttcagtaaatattggagcctacattagaaattgtcaggattgaacttctccaattagacactgagaggagcctcagaaagcacatatcagagcacaaaaggcaataccaagcctctcctccttcaaagatccttcctttcttgacaattccaaatcatactaactttccttccttgtgacatgttgatatcaccattacacatttcacctaacacatactgtcactgagtagcctcatggggctacaatgcaaagtttttgaacactgcaccgtttactgctcatcctcctgccaccatggtggggatatgaacagtctctttaaatagtgttaagttgcacacattctgctctcttcctgcctgcatctgggtaagaattctgctgtcttctccatgtccaggttttaagtctgctagtctgtctacaaggttttaacagtgaagcagaaatgacctgcagaacagcatctctggatagaaagacctagcacaggacagagcgagaatgcctccaaaaatacaaattcctcaggtttttttggaaaaatacaggcaggagaggcttcccctaaggcctctgagaagatctagattatcttgtgagatgcatttatgtcctgagagcaattccaggtcacacaggaattgcatgagctacattagcatcacagtaaatttgacgtgagtttatgaatatcaattataatatttttaaacaagagatctaatgctatctccgtgtctattaaaatgtaataaatattcaagacacttataatgtacacataatatttatagactgtgattaaattatatgttccaaaagcaaaatgatatatttcagaggctctgtaatctagcaatttggttttcaactccagctttgtaatttaccaactgtgtgatacttgtctccatgagtctcagtttacacagagtagtcatgataaagtaataataaataacctttatcaaggacttgcaatgtgcaggcattgtgcttagcactatgcgtgcattaattattttaattatcaaaacaatcctataaaatgggttcaaataatgagcttctcaccacgatcaccattttacgtataaggaaacttaggtttagagaaggtaagtaattcccctaaggacacaagttaatgtacatatattatcttatttaattctcacaacaacagttctagggaggtgtgttttagttgtgaaagctgagtatttcggagttgagacgacttgagtaaaggtagtagtggggtcagtggggctgcattttgagaattgttctgactctaaacttcattaacttttcaatacttcaagatccctcaaagaaacacacacacacacacacacacacacacacacacgatatcttaactctgcagaaatctcttattgattgagaagattgtgtcctgcaggttcccagacagaagcaaatcccctcctgggaggagggagcttttgccatccttacaagagcagccaacaaccatttttgcagagctcaagttcccccagacaattgattcctagcacttaggagagtgacctagatggaaagttggcaagaatcctagatctgtcataaccctattctcccacactcagccttcttgccctcagaagtcatccttaggtggatttgatatcttttttaggtcagcactcactatggctttatccaggaacaaaaataacatcagcatttcatatcacccacagcactgtggaatcaggctggctggctcaggtcctccgtctgccatctgctagccatgcaagggcaacctcctcatgtgtgaaacacctggattccaatactgttgtgaagatcaaacaatattagcttttgaataactcatgggcatagactgtatgttattcatctccatcttcctggggcctgggaaagtttgtgctaataagcatttggtagtgaatgaataaacaaatgaacatataaatgaggaatactctataaatcataaatcaccacgtagatcagggttagggccatagaacctatacttatgtaaagttatggatttctctcctaattccaaacagaattgctccatgacccatctctccccttctactgatatttatatctacttttgtaaaaagaggatgacagttcctaacctgacagcaatgtttttattcagtttttaattgcttcagtctcatggcctttattcctattctgtgaggtaaggaggttgctctagattgtgcccaagaccccctccagtgctggaattccacgattctgttgtactatatttgtgctgcatccttatatttatttttttaaattttattttgaagtaatttcagatttacagaatgcttgtaaagacagcacacaaaattcatgtatactcttcacccaggttcctctaatgttaattttcataactctagagtgtctaggaatgctaagaaatgctaagaaattaaccttggtataacaccaaactgatttcatcagttcttccacaaatgtcaaaccaggataggttactgtgcagcatttagcccttatggcttttgaaataaagagtttactttcaatttttgaaattgatcgagaccttaagattattgagagaatgaaaacctgataaaaacttcattctgcggcggcaaagtgtgtcagccatcctctgtgcatgttttagcgatccttaagaaatcttgaaagaccatcctgcatgttggtaaatgcaataaatcaaaatgagatgtgaacaatacagttggaacccctactatagacactggaatattgggaatcaaagacataagcaaaatggttcccctgtgggaaaacctgcaggcctccttgcggagggccgtggggacactggctggggtttggactgctgatttggtctttcactgcatatgtattgagggcctgttatgtaccagcacttgtctaggcactggggatacagtggtgaatgagacaaagcccctgtgttcatgaagcttatattttagtgagggagacaaaacaagaaacaaatgccaatcaggtagtgacaagggcattgtaggaaacaaagcaggctgagggagtggagacagcgagatgtgtggggagaggaggtggtcttggaaagcatccccgaggaagtgggccctgtgagtactcaatactcagaaccatgactcaggacgactgccctgaactacactgaggcttggtcttgcttagattagggaaatagtccgaccatggaaaacggagttcccacccaacctctccaccttcaaatgcacctcgatgctgccatagccctgttgcatagattctttctcctcttctccagtctgtggcttgtcattgaattcataaactcagctctaacacaaactgccactccaaaacttctccttgagattctttgaagcccggggtaaaaagtagataccaataaatggaccacttttcctctgaactcagactccgtggaaagctggcttgcccaacatcagccacatcaatttcagattcactaaacttttactacctgcccatgatgtgctaggcatttgttttagacttcaatttgctttagagttttcttatactttatcctacaagtatcacagtaacacaagtagcagcttgtgaggtgggagtcacaccttcctttttcttcctttgcttttctttcctttccattcctttcctttcctttcctttcctttcctttcctttctctttcccttcctttcttccttccttctttccttccttccttcaatccttccttcctccctccctcccttccttctctctctctctttctttctttcttctctttcttttttgccagaatgagataccgaatgtcacagatacaagcaggagctgtgaatccaggtttcctgcatccaagcccagggctccttccgctacacagtagctcaatctcactagaaaatttcaccttcatcttattccacacaggacccagtgccctacagcctgtgctgacccaagttagagcagattccctgagaacaacctaggcatgccctgggatggtgaaataccactcatggggacccaggtaaggcctcctggtagttgttagtgccagagaccatcatccaaacttcagaagccggcacttgaagaggtgattttcaacagagaaactgtgatcaatggcagcaccacagaccactcagctatgatggcaacaccttttaaagatggcactttgattagaaagattttctttttagcagatcctatgtgctattgtcaagcctatattcgagactcctcccctcttttaaaataaacctgaaagctaatttggttatacaaggcagcccaactgcacaaaaccatcaacaactgttccctgagaacagactaagcctgtagccaacgtcagatgtaatagctccccagcccataagcaatttctttccttacagatttttcactgagactggaggctgaactcaaaggcataatcatttttaaaagtgcttccagggtaattcgtgtcagtcctggggcagctggatcttattgtaaagaagttgttttgcatgtttgtgagttttcaaccctgtgattagtagacggggagaaggaggcaacagagggtggaaggaggaaaggaaaccaaaattactagacactgcacacccaaaaatgccgagtaagaggaggtggaagaggtatctcgcctatcagcttttcccttgactcccatgggccaaataaaatcatgttatttcaccttcttcctcttttgcttttcttcaaatagtttgggagttcatgacaaaccagtcacagttggcaagtttaaaactaaacatcatttggcttctctctctagcagggatgaacacaaagatcaacagaatgcaagaaaaagccaagagtgttttcaggggtgagccacagctctgtggagccttcagagatcatgcagcctgactgctcactttccaaatgaggcgggagactggagggctgagcgtctgggccaaggtcacaccacaagtcattagaaccaggatccagacccaggcctcctgattcagagcctagggctcttcctctatggcttggggaaccatggctgagtgctgcttgactgtggcacaaaaaacggctgttagaaaggagtcgcacccatgcgatagtgctcctgagaggtgaggactggagggacagttgtaattaggtcattgccatgctccacattaggcagtgggcctggctgtgaggagtcatggagacaacaatcaaggtgagcctggtctctgaatcagcatctgtcagaaggggttttgaataactaaatctgctcaccagaggccatgggggtggatgagaatggcccacaaaggctgtccaagcagcctccacagccccggcaccctcacctgctgctgcctgtgtgagtcctctccccaccccttctacagtccggctgagcccctccacagtcctggtaaccaagtagggatcatccctctggggctgggcttctgctgtggtcttgcaggtccccaccctctccaggaggaagaactgccctgaatctggtcctgtggcactggctctgctgacagagtcagctgtcgggtgggagcccactctgggtggaggcagcagcctctcaggagcccgtcactgtggcaaagtacaaactctttgaagcaaagactctgtggatccaaaccccagctttctagccgaggaaatactggatctctagactgcagtttgtctacctataaatgggatatacccttgttttgagcattacacgagatgatccacataaagcacttagcatggagcctgctcagggtaagcactcaataaatggtagctgttgtcattacttaaaggcccgctctctttcctggctcccccacccatcggtgtttcttcctcttggatttcccatcatcacctctctactggttgtgtcccccagggttctatgctttttcttttttctattttcttttttttttttttttgaggcagagtcttgctctgccacccaggagggaatacagtggtgcgagcatggctcactgcagcctcgactccctgggctcaagtgatcctcctaccttagcctcctgagtagctgggaccacaggctgcatgcaactacaccgggctaatttttttttttctgtagagatagggtctggctgtgttccctaggctggtctcgaactcttgatctcaagtgatcctccctccccagcctcccaaagtgtttgggattacaggcgtgagccaccacacctggccagattttgtgcttgacccctccaatccccactacactaagtacttgttgccacacatctgggttgctctacagatagcacatgcagcagccctccaggtgggcttcctcctccctggactgcctcctccgttctctcctccaagcctcctagagtgctggctccatctaggctgttgtaaataatcagcctagcagtcagtgcctactaggatgagctcctgaccaagcacctgggctgagacccagctgagacaatcacaccccacaaaaaagtacaagctcgaaaaaattccatgccactgcttaaggcagaatgcagtcaggggaagacagcacctctctccaaaaccctttagtaaactattttccagcaataaaacccactttaaattcaggcagagagaaggacctcagtactcataattgagagagcacatttaatcaaggcagtagacagctatttaattccactttcttttgcctaaatgtccttgtcccctcttttccattcacttgctctaaatcaatagttctcaaaccctccgtgctgagagatcaattgtttatttttcttgttcccaaactactgtgggccagtacttttgtaaaatggtaaaaataaatttctaaaaaagaaaaatgccattccgatggcacagaaagttttaatttctataaagtttattactttcagtttctgtacatatcttttggtagtctggtaagcaagcttctcgccgacctacaccagcccctggcccaaactgagagtaggtagaacagcttctggaaggaacagagccacagaggagtctgtctcccacagacactccccatcccaggtttttgtcctgtcatgtagtccgctcagcagcagccctgctccacccagagcatgcagtggtgaggtttggggtgggatttgcccaggctttggttactgatattccttgagagtctagcagcccccaggaggagggatatgcagagatgttcccagccccagtgcagtgcagggactggcccttaccattccatgccagccctgttgatctcctcccaccagcactccgtgggttccccgaggctctgtggcgtgggcatgcaggcgtagttccattgtctgtcagaaccttccttcttgctgaagatgctcctcacggccactatcacctgcccctggggacactggtagctgaagccttgccggttcaaattcacccacccatcatcgctgtagtcatgatactgctggtatgggtatccataatcgccatactggccccaggccatggtgactaggggcagaagtacccagagaagactgaggtccatgctgcctgggattttggcaaacaatgtcactctaagattgctggtctgaccgttttatatagctgccgctgacatgtggcttccagatgtgggtgagaaggatccaactgcagtgtgtcattgcttaagcaaaacttttccatgctgagatgtcagccataaggacattcagcttgttttaaggtggaattctaggaatataccagcagcatgtaagtctaagaagctccctggagaaagaacaactttgtatctagattataaaagccaactgctgctctaccctgtagaaatattcacttgaaaaacactgattagtagcatatttgtccctcacctttcagcacctcacccctttctgtcctaccctacccgctactagcaaacccctgtatttgttctccaaactagccttccgggccacacaaatacccagacagtgatttcaaaataccgaaatcatagactgaagtaacagagccatctaggatttctgtaaggctgaatgcctgtttttttttttaagttgtcaatccaacactttttaacccttgagtataagcgcgggtataccagtttgcagggctactctgagaactcataagttgcataaggaagtactatgggcccatggggagataagttggatatgatttctacacttaagcattctaccatgctgctgaaattggacccagtcaagtctagaaagtgtgctctgctctcaaaatgtaatgggtttaatctaaataaaccccctatttatccttcagtatttttgccctcacattgaattttcttttcattgagttataatttacatataattaattcaccttttaaaatacataatgtacagtaacatagccagcaccctaatcaagacttagaacagttccatcaatccaaaacatccccttatatccctttgcagtcaaatcttcccaaacacccagccattggtaaccactgatttactttctgtctctatggttttgccttttccagaatgtcaagtaaatggaatcataccacacgtagcctttcatgtccatctttcacttagcataatgcttttaaggttcatccattttaaaattcaacatctcattgtatgtgttagtattttgtttcttgttattgttgagtaatattccatagcatggatgtaccacagattgtttatacatttactagttgaaagacatttgggttgtttccagtttttgaaaattcattactttttatgtaatgaattttatattcattatattttatataatgaattacataaatgtaattataaagttgatataaacatctatgtataggtttttgtgtgaacaaatttttatttcatttgggtcaatacctaggagtgagattgctggttcacaaggtaatgtatgtttaactttaaaagaaactactgaggccgggtgtggtggctcatgcttgtaatcccagcactttaggaggccgaggcgggcggatcacgaggtcaggagatcgagaccatcctggctaacatggtgaaaccccgcctctactaaaaatacaaaaaattagccaggcttagtggcgggcgcctgtagtcccagctactcgggaggctgagacaggagaatggcgtgaacccgagaagcggagcttgcagtgagccgagattgtgccactgcactccagcctgggctacagagcgagactccgtctcaaaaaaacaaaaaaaagaaagcaagaaactacctagctgatttccaaagtggtgataccattgcccaccactaccagaaaattgccattaaaaaattttagctattcaaataggtttgtagtgatatttcagtgtggttgtgattttcatttctctaatgatccatgattttgagcatcttttcatgtgctcattacccattccatgcatccgttgatgatttggcttttcaaattttttgaaacctttgggcatctcttaagcacatagtatttcccatttctcatcagtattgttcttaaagtttcttagaattgtgatcatagaccaattctatctacagcctctgtgaagtttgttaaaatgtagacagtggctcttctccaggcctgctaaatcataacctcacaaggggtgctcaggtatttatattttaaaaaattttccaggtgattcttattcacatcaattgctaagagtcaccttcctaaaggaatgtggagccagagaaaaatcacactattaatcccaccatctgcctagcctgtggcacatttaccagacggtattcagtctagatcaaacaccaagatagtcttgaaagggaaagacagtcatacatgagaataaagcaacaagtaactcgtgtgtgtgtgtgtgtgtgtgtgtgtttgtgtgtgtgttgggcatgcagttttctttgatgatcatggttactgaagcgagggggagaggatctgggctgaacagctatgtgaggcttagttttgtttttagcaccatcttctcccaccacttccatccgtaagtaactgcccagtgctggcatcggaattcttcctagcttagaaggatctctctgattcatgatatgctgaagcaatcattctccaccttatcagcatttaaggattacctggaaagcttttggaaacctccagagtctaagcaatttctggaccaatcagatcagaagcttctgagcagggtcctgacaatgacgtcctttgaaaccttccctataggcttctcaccggaagccagggttgagaacctctatgctagagggtttttttttttttttaattttttcagtttatcatcctgatgctcatgagttgtatcttgcattctggacatgatatgagctattttaaaccttaaagagctctaagagacaaagcagattatcataaacactcatctttattatacatttgttttccaacaatttccagggcctctgcctgatctccactctccgcagatttctttcaactacagctagaactacctcagctggattccctttaatgtgcaaaaataaatatcttcatgctatggtccagttttaatatagatttctgttacttaaagctgaaagcaacctaactcatccagtgtctcaggagattccagaaactgctgatgcctttgagagagattctggtggccgcatagagaatgatttccatacgcagacattgagaacataagattaatgcatttacagttgaccatgtgttttcaactaggttactatgttatcttcctcataactttatatgttagtgaggcattattggaattagtttctcacagatggggaaactgtggtgagagaacattttgggccaaatttctagaactggaaggatatgaccccatgtcttctgattcccattctgcaatgccttccatcatttcatcaaagttacagttactaattataacatttatgaataattgtcaaataatgcacttataaagtatgtatattaacatacacatataactaatttgcgctacgcatttctgctgttatttgaaaagtctactcaatagaccctggggactttaaagaactaaatgttcaataagtagtttttggggtgttgctctaaaaccaacagcatcagcgtcacctgggaacttgttagaaatgcaaatcctccggcccctctcagacctactgaatcagacactgtaggagtagagcccggcaatgtgtgtttgaacaagccctttaggtaacttgatactcactaaagtgagaattaccgtatagcagataatgcagaacactctacccaaattccaggtgtcacttctcgagaagttatgtagtgatactgaagcctagataactcagttcactaattttgattctggcgcccacacaattcaccactgggctatcttacctcctagtagataatggacttgagatattttggagattctgacaaagagcattcaaaagtctccatgattcttctttttcttctacctcttattcttcttttctctctccttatcctcctccttcttcggctgtattgagatataattaacataccatacaattcaccacttaaggtatataattcaatatatcccttaaattagtatgttcacagagtttatgcaaccaccaccgcaagcaattttagaatattttaaccacccaagaaaccctgaacacatcagtagtcgctctccatttcccttcatcctttagccctaggcaacaatcaatctactttgtgtctctatggatttgtctgttctggatatttcgtatgaatagaatcattcaatatgtggtctttcatgaataggttctttcatttagcataggttttatgttagcggttcataaggttcatccattttgcagcatgtatcactagttcatttctttataatgccagataatactctacagtatacatctaccatatattatttatccatttacaagttgatggacatttgagttgtttccactttttggctattatgaacagtgttgctacaaacatgtatgtagaagtatatgtgtggacatatgttttcatttctctcaggtatatactcaggagtggaattgctgggttatacggtaattttgtgtttaatcttttaatgacctgccaaactgttttccaaagcaatcgtgccattttacattcttaccagcagcgtatgagagctccaatttcttctccacatcctcaccaacgcttattaagtctgggttcttctgaaaggtgtaggaactcatagccactctggtgacactttttgcgacctggatccactcctgtctggcagctttctcaaacatataatccctttttgagagattctgaatataatactttgcccgattttaattgagagcacctagaatggccctagaatcaactcattcctaagttacttttacactttctggattggggtagctgctattgtatattgggagggaatgatgtagacttacagaggtcaccctggagcagacctgatccactggagaattccagatgtgacgtgctggccccgaggagggctgctcagacaggagaaggcaaggctcatgctagtgcctgggtgaagctggtagccccagatgaatggatgcttaacccaaaatattgactgtgagttattggaggattccattttgcctgctgtcttttttcccttttaactcctgtgtataatcaggacttggctgcagctctaggtggccagagtactatcacaaacttcccagcaagtgtatgctgagccatccgtggctttcctccaaaatgagtctgtgccagtttcacggtttagctgagagaggcattcaatagcctcagtacacccaggctgtcctcaccttcagcaaacttgccacccttgcatgacccattgctttttaagatcatttgtggaacccactgtcatatcatttggggttagccccgagggccaccaataaggttaaaaatgctcatactggaagcagcaggagaaagagtgacaatccaagttgaggaaatagagaagattgggaggagtagaataaggtgcacctactgtgtgctaaatactgtactatgtgctttacatatgatagaccaattgaccttccagcagttctaagaaaattaggttcagagatcactggtagctcaccccaattttcacagctagtacagaaaggtgacttgaatttgttagtaactatactaccccaagtgccaaatggtcacagcagggcctcagagcagtggcagatggttgtgagaagagcagagactcctaaaatccaaatatctaagttaaagttctggttctgcaagtaatcaaaatgaccttttgatttgggtcagatagttttttgttgtggaggctggctgccctgtgtattataggatgttggacagcatccctggcctctatccactagatgccagtagcatcttctcttccaccactgtgacaatcaaaaatgttccagacattgctaaatgtctcctggagggaaaaatcatctctggttgagaaccactgaatcagacaaaacccataacctttgttttatcatctgtaaaatggaggataatcacaacaccagccacttaccacgagattattgtgacagtcatatcaaatagtggtcttgcaaagactttgtcaagtgtaaagcttgaaacaaatgtacgttgttagtctgacctcagggtaacactagaagctggagttgagggaacaatcatgcatattagtgtaatgaacagccccaggactccgcagggcagaagagtgttcttgtgcagatgatgactggaggggtttgggaatgagtaaagctgggggaatatggctccaccactctctggagttccattaatatgtggatgaatgtcaatcgcagaggttcctgagagtgagtttgcagggagaggtgtcaggataacagggctgagcactaaaggcagagtgagggtagagaattcaggaggcttgggaacagtaggcagatggaggagctatcgtggtggagaagaagcttgggaacttgcgagcttgggaaccaggactgtgtcttggggtgagagtagggatggggatggggatggggtgctgctaagccaagttagctctgagacactcacagaaggaagcttcagggcccaagtgcctaattagtgttctggggtctgtgaggatgaatgaagcacagagatgtatgtgtaggtgctggaaatattgctttagtaaatgtattatatgctcataagtggaggaacagagttcaggatactggttacaacctctgagctcatgactcgctagagaccatggttaaaaaaaagcgcgggaggaggttcattggagagatttggttacaaacgggggaaaagaaagaaaacaatttaatcagaaagtgcttaagtgatgtcattttaagccaaattttctaatttgaaattgggtttttaagtgggtaaacctaaagtttataaaataaataacagcccctttcatttgtgtagcatttggcacgatgtatataaaccacacaatccagcactcaataaatatttattcttttccatgtgcagggatttaacagatctcagttcatctttgcattggtgatggtagtaaagttggctttcttatttccattttatcagtttggaaatagaggctttgagaggtacagtgatgtccaaagttacagaaatattgggtgacagggcttgggcataagccaaagttccctagtttgagccctgccagttctcttggaggacacggcattgagggatttggtgacacatcctttagggaagcaaggtggccaattctagagcactttgccagttcacacagtttgtccaagcctttccctcctacaatcctgaaggcaggtggtgggggcagggctttagcaggaggagcagcctccctgaaaataacatcctcccatacaggacatctctgctggtgccgtcctccagtgcgttttctgtgtgctgcttcctctgatcaagctcggcttgctctttaaccaagattcacgcattcttgctcccattcctgaagctacagattggcacctcttttcggcattgttcaatcacggtacatcaacttcagataatggacttggtcacctaagaagcatactgtctctcccagctctaaaaacacacacccaccccaaagtattgatacatgtgaggtccacagaccacctgcatcacagccatggaggcatgttagaggaagattcctgagtttttgacagccttgcttcagtggaatcctggaggtggggtcccggaagctgccatttttttttagacggagtcttgctctgtcaccaggctggagtgcagtggcgtgatctcggctcactgcaacctccgcctcccagttcaggcaattctcctgcctcagcctcccgagtagctgggactacaggcgcgccaccatgcccagctaattcttgcatttttagtagagatgaggtttcaccatgttggccaggatggtcttcatctcttgacctcatgatctgcctgccttggcctcccaaagtgctgggattacaggcatgagccactgcgcccaggcggaatctgcctttttaacgagctttcccacatgacttttatgcatcccgaagtgtaaaaccacaggctaaggtgcataaggatgtttatgattttgtaagcttcccaagtatgaggcagaaccaggcagggctcctctgccaactaccctgtcgttggttacagtagaaatactcccctggctctgtggcctgtgggctctgctaagggctttgcaccctaatcctgctctcagggagcccaccacttgcctcctgtcacacaccacccacacaggcagtgacagagcagaactgagaactgcaggaaaggcagcagctcagccttcttctcatgcctgtcaacagcctggagctgagcacgctgcacactaatgagtactattttctaccccagctttttaaaatgctgcaatattaacaactaccaaaataattcaactctctacagcagtgggttggcttagccgaaaaagacaccaacggggctatggcatctttgctgtgttgctaaagccctgcagagtatatgcacgtgcacatgcactcaaatagaaatgcacatactttaatttatcaggaaaactaaatgagacaatacatgtaaatgtaccgtgcttggaacagagcctggtactgctggtacaaaaaacaatcagatgtcattttgcaaggggatgtactgaatattccctatttacttttcagatctttctctttcctgcactgtgttctaggaggctttatgtgctaccttaaggtgctctcttgccctctggttcctgcttgggcttggccaatgagaggcaccagcagaatatggaaggatcaggagaggggtcaaaatatgaattcccctggctccctgccaccaaggcctggttggcagtggccaggtttctctccatgcagccttagcttttgctggctggccccctttccaagggaaatgcttctgctaggttccagcaacctcactccctcaccctgcagctttaagactataggggtgatcttaccgtggtttatagctgtagctggccctgggatgttcacaattaaccctgctcacatctctgtacatagttatttcattaattctctccagtcactactgttgaatatggacctgtttcctgccaggacctgactgatataaggaacaactgtctggatttgatccaaggaagatcctgaaacaatatgactgtctccagcactgggcatctgtctccagtttcttgtggtccttaggtgctcatggggagaagaaagtcctccccagctgtgtgatgttgggaagcatccatgtgcttccctcttcaatgcaaagccagcaccacttccaccatttttctacccttaactctaatatcattccatccaaacacctctgtaaccatttcccttcaggaagtcaaaggtaacccttctcctgaaaatcaactgggaatccctctgatttgtccttatgtgtgtgtcaggcttcccactaggccatgttgtccctgggcctggagatcctcctgagcaaaggaaagtgagatcttgccaacctgcatgcttacatcagtaggtctaactgtggtacaaacttttatatccactatattgaatgtcatctccatactctttgaaagacacatcctctcgattttacaagtgagggcgatgatgcttagagagaaaattgcccagggttatccagctggtagagaagatctgttttgaagcctgttataaaacaaagcttgtgctctcaaaatgaagaacctctcagggttgtatcagatcagaaaattccccacactctcacaggactgcataaaccccctcagagcccttattccaatcacaattttctatgtatttgtataattatttgataacatctgattccccatactagactataagttccaagagggccagtcctgtgcctgattttacatactgttgtttcttcagggtattagtactgtgtctgctgcattgcagacattcaataaatatttttcatatgtctgttcactgaaatcaggagactggaccaaatgacctgtgaggtcacatgcagtcttttgacctcataaggatctaccttaaggatcaagaggtgaattctgtttatccgatgcctcccaagatatgaaatttagatcaggaagtagctcagaaagtacagtttttggccaggcatggtggcttatgtttgtagtcccagcactttgggagactgaggcaggagtatctcttgaggtcaggagttcaagaggagactggataacagagcaagaacctgtctctacaaaatttttattaaaaattagctgggcggccgagcgtggtggctcacacctgtaatcccagcactttgggaggccaaggcgggcagatcatgaggtcaggagatcgagaccatcctggctaacacagtgaaaccccgtctctactaaaaatacaaaaaattagccaggcatggtggcagatggctgtagtcccagctactcaggaggctgaggcaggagaatggcatgaacctgggaggtggagcttgcagtgagccaagattgggccgctgtactccagcctgggtgacagagcaagactcggtctccaaaaaaaaaaaaaaaaaattagctgggcatggtgcatggcttttgtcctagctacttgggaggctgatggaggaggatctcttgggcccaagagtgcaagagtgcaaggctgcagtgagctatgattgcaccactgcattccaatctaggtgacagagcaagacccagtctctaaaaacaaaaacaacaaaaaagaaagtacagtttttctgacttttcattgattgacagatgaccccagtatatctgagcagctgctgtttggtaagccagacaacaagccatctgaaagcaggaaagacgcctttgcattcaccactgtgtccccagagcccaactcggcctggtgtattgattacggatattgaatcagtgttgtcttgcacggatgacttgaaatagacccacatcaatgaagtaaaggcactctccgctcctcttttctcaatttgtaccctttatcctaaaaaatgctttcaggagtcactgaagcaagacttgaaataatgtgaccttctgggtagtaatattacagaaaaaataataatgaaaagcacatcacgtggcaatatccaaaatgagatggctttagagaaaaaaatataattcaaaaaacgaagaggaaaaactgcaaaaatgtcatgttttgtataccaaaataacctatagcttcaactaaaagaaaagtctccaaatgcacaaaatgcaaagaaatttgtttttttcagatatatgaacataatagtatcataagtagtgtcgtgtaaaacttattctccctttttctctctatttacctatgtgtgtgtgtgtgtgtgtgtgtatagatgtgtccattcctacttagatggcttctgcatcaaggtaactattttttgtaacagtatggctagatcagacagctcatctcatttgaccatcccaaagaaaatgcattataacccacaatccttagtagctatcaagtaactttatcaatgatcagtacttcctgagatattctgattttaagaattttgacctgatgccttacaaaggcactaaatggtccttgttctctctcaggtaagggcgtactggctcagtctatcttaccacagccaacagcacataatctaagacctggtgtagtgggttacatagtgtcctcccaaaatgtctgcctatcccaaaactgagaatgtgactttgtttggagcaaagatctttgcagatgtaattagttaaaaactcaagatgaagtcatactgcagttagagggaggctatgggccaatgactggcgtccttataagatgagaggacatagagggacacagaggaagggatgataccaagatggaggcagagattggagagatgcatctacaagccaaggggctcaagggattgctgggagccaccaggagctaggatgagtcaaggaaggatacttgcttagagcctttggaaggaatgtggtcttgatgacatcttgagttttgacttctggcctccagaatggtgagagtaaatttctcttattttaaaccatcagattggtggtatttgtgatggtatctctaggaaattaaatcatctgggctcaagggggttccatcattggggtgtacagtcatccttctagttacacctgagtgaataccacgcaatcgtggcaggccttctcagcttctctaaaccaccttccttttctctctgacagacgccacttgcaccaggttgtccctccacattttaacttggatggaacatcagtgtctgcttcctgagcagctgctaagctgagggactgcatgacaaactctggcagtgaggggcagggagctcttggggaggagaggagggaatctcaagcgaaggggaatgagagacggagggaaatgtgtgaagaaacatctctccttcctttcttccttccacagtctgctctgaggcacactttctccttgcaaacattctagagaagtccaggtgcccaggggccacatctgctgaatatcacctcacacatcccctctttcctcacctcatcttcactgggatttgcagatcccaaataaagcttccttcacatttagtactcaccacagactccaacatttagtagaccccggcaagacaaggtggcataacctcagcaaattaattagtgtttctgtgcctctgtttttccctctgaaaaattagcagtttctgcctcatacaattgtgagaaattaaataaatcaacatatgtaaaacacttgaaaggtgtcaggcacctaataaatggtaaatgatatgcactgttatctggcttatggaggttttcattctgataccaaatgttaatgagaattcttcatcaaaccctaatcctctagaaacaatctgataatcatataatatcttcttttaatgaggtcagcagaagaaaaagaaatgcaaaagcaacatattaggggaaggattattaggtggaaaagggcctgagagagtaaatatttttttttccaggtctcagtttataagttaaaaaaaaatcctgagaaaacagaggaaaaaaaattcattcctttttacaaaggcaaagaagtacctggcttaactcagtaagcaagtgcagcagcagcaaccactctatgacataagagccaccatctgcacgggatgtgctgacaccatgctaagctctttatattcagtatcacaattaatcccacaactatcttttgagacaggattatacacatttagacatgagaaaactgtttgataagaaaaggttaattaattgccaaggtcacactgccaaatagtggagcacctgggatttgtacccaagaattctgactttaaaattcaccatctcatctttccctatagtgtgaggcagtctgagtctagctctaaagctagacccttattacaatgctggatgagtcctaaaagagtagagtataaaatgctaattttcccatcgaagcaatccttgtctctaactacttggacaccctacaagtgatattgcatagttctgaatggaggtgtcccagactctacaatttttgtctccttactgtcttgttagtaagagctaaacacacacatgtgtaaacacacacacacaaccattagcaactgaaatagactcatgaaacatcaaaaggtggcttataggcagctcgtgatttcaaatcatgatacttaaagtactctgcagcacgccagagacagcagcctggtgggtgaggctcctggaacacgcagcactgccatagcaccgatcgtcccagagtcaagagcctcctgaaacactgccatctgagcaacatgctaggtccctgacaaagtccctcccatgtttagctttcagcctcccctctgacataggcacttccctccgctggcctaagaatgatgatttagaaggtgtgtagtgccctaaattggaaagggcagtaattttcctgaacaacaagaactgacattttcccatggctgatcagagaggaaccaacactgtaatgctagtcaatcccttcttagagctccctggataaaagatattataggagcattaagtatcattgaagttggaaggaagaagaaaaacataggaagtgttttcacgggctggaatggaaggctctgagtcagggatagctgacagttgcctttgcaggtttcctttcattgtggtgtcaaagacttacctttacgttagcttgctggccaccggtcagactgatgaacagtattaaggacaagaatatttcctcagaaagtgtgttcttaaaatgtactcatactcatgagaagtgagttataacctatgaaagtaccttgtgtatgtggggaaatggctgatctctcttccattctactttctgtttagaatgcactgtgaaatagacagttaccctgaatgacttgaaaacttaagtgtcactgattcctggaatgattgggtgaattgtttataaataatccttgtgccactgtaattagagttatgtgaatcctatacctggatctaaaaaagcactcttttgacaatacacattcttcccatccaggaatgtaatacgtctatgcactgattcaagcaaaagcatttattaaaacttgctggggaccttggataagtcatcaaacctctctgagcttcagtctccacatttgttaaacgaagggattgggttaggtaagaggccttttccaactctaacattcacggattctatatttaaaatatattcttgaaaggatgaatacttttttttagcattgataatacttctgtctctgaaacctcaacatcactattaaattattagttatgggacagaatcggttactgagaaagatgaggagctgtcctctcacagtctgcccctgcttcttcccaggaacggtatgattcagtcacatgaattacatctaggtacctgaaaacaccatgatcattcttacttcctggcctttgtctggtcttcacatggcatggaacactctgtgtcctcttctccattcaccagactcaccccaattcaccctgcagacttcagcttcagtgcacctcccctgggaagcctcgcaaggccctaattcaccctgcagacttcagcttcagtgcacctcccctgggaagcctcgtgaggccctcccagctgcacagtgcccctcctggcattcctgtttcgagtgttataccacttcccaaactttactgtgcttaactgtttgctttctagaagctttttctttttttttttctttaagttttagggtacatgtgcacaacgtgcaggttagttacatatgtatacaggtgccatgtcggtgtgctgaaaccagtaactcgtcatttaacattaggtatatcgccaaatgctatacctcccccctccccccaccccacaacaggccccagtgtgtgatgttcccctttctgcgtccatgtgttctcattgttcaattctcacctatgagtgagaacatgcggtgtttggttttttgttattgcgatagtttgctgagaatgatggtttccagcttcatccatgtccctacaaaggacatgaactcatcattttttatggctgcatagtattccatggtgtatatgtgccacattttcttaatccagtctatcattgttggacatttgggttggttccgagtctttgctattgtgaatagtgccccaataaacatacgtgtgcatgtgtctttatagcagcatgatttataatcctttgggtatatacccagtaatgggatggctgggccatcatcgccacactgacttccacaatggttgaactagtttacagtcccaccaacagtgtaaaagtgttcctatttctccacatcctttccagcacctgttgtttcctgactttttaatgatcgccattctgactggtgtgaaatggtatctcattgtggttttgatttgcatttctctgatggccagtgatgataagcattttttcatgtgccttttggctgcatagatgtcttcttttgagaagtgtctgttcatatccttcacccactttttgatggggttttttgttttttttcttgtaaatttgtttgagttcattgtagattctggatattagccctttgtcagatgagtagattgcaaaaattttctcccgttttgtaggttgcctgttcacgctgatggtagtttcttttgctgtgcagaagttctttagtttaattagatcccatttgtcaattttggcttttgttgccattgcttttggtgttttagacatgaagtccttgcccatgcctgtgtcctgaatggtattgcctaggttttcttctagggtttttatggttttatgtctaacatttaagtctttaatccatcttgaattaatttttgtataaggtgtaaggaagggatccagtttcagctttctacatatggctagccagttttgccagcaccatttattaaatagggaatcctttcctcattgcttgtttttctcaggtttgtcaaagatcagatagttgtagatatgcagcattatttctgagggctctgttctgttcgattggtctagatctctgttttggtaccagtaccatgctgttttggttactgtagccttgtagcatagtttgaagtcaggtagtgtgatgcctccagttttgttcttttggcttaggattgacttggcaatgcgggctcttttttggttccatatgaactttaaagtagttttttccaattctgtgaagaaagtcattggtagcttgatggggatggcattgaatctataaatttctttgggcagtatggccattttcacgatattgattcttcctacccatgagcatggaatgttcttccatttgtttgtatcctcttttatttcattgagcagtggtttgtagttctccttgaagaagtccttcacgtcccttgtaagttggattcctaggtattttattctctttgaagcaattgtgaatgggagttcactcatgatttggctctctgtttgtctgctattggtgtgtaagaatgcttgtgatttttgcccactgattttgtgtcctgagactttgctgaagttgcctatcagcttaaggagattttgggctgagacgatggggttttctggatatacaatcatgtcatctgcaaacagggacaatttgacttcctcttttcctaattgaataccctttatttccttctcctgcctgattgccttggccagaacttccaacactatgttgaataggagtggtgagagagggcatccctgtcttgtgccagttttcaaagggaatgcttccagtttttgcccattcagtatgatattggctgtgggtttgttacagatagctcttattattttgagatacgtcccatcaatacctaatttattgagagtttttagcatgaagcgttgttgaattttgtcaaagaccttttctgcatctattgagataatcatatggtttttgtctttggttctgtttatatgctttatagcactaaatgcccacaagagaaagcaggaaagatctaaaattgacaccctaacatcacaattaaaagaactagagaagcaagagcaaacaaattcaaaagctagcagaaggcaagaaataactaagatcagagcagaactgaaggaaatagagacacaaaaaacccttcaaaaatttaatgaatccaggagctggttttttgaaaagatcaacaaaattgatagactgatagcaggactaacaaagaagaaaagagagaagaatcaaatagacacaagaaaaaatgataaaggggatatcaccaccgatcccacagaaatacaaactaccatcagagaatactataaacacctctacgcaaataaactagaaaatctagaagaaatggataaattcctcgacacatacaccctcccaagactaaagcaggaagaagttgaatccctgaatagaccaataataggctctgaaattgaggcaataatcaatagcctaccaatcaaaaaaagtccaggaccagatggattcacagccgaattctaccagaggtacaaggaggagctgataccattccttctgaaactattccagtcagtagaaaaagagggaatccttcctaactcattttatgaggccagcatcatcctgataccaaagcctggcagagacacaacaacaaaaaaagagaattttagaccaatatccctgatgaacatcgatgcaaaaatcctcaataaaatactggcaaactgaattcagcagcacatcaaaaagcttatccaccatgatcaagtgggcttcatccctgggatgcaaggctgattcaacatatgcaaatccagaagctttttctattaggttggtgaaaaagtcattgcggtttttgccgttgaaagtaatgacaaaaaccacaattacttttgcaccaacttaatagattttaagatccctggtggtggaaacgttatattattcaccgttaaatcccatttctagcagagtatctagcccattatagatgctcaataaatattcactgttgctattacagaattttaaaccatgagcagtgttaggacatccacatagtttagtgacagcacttcacctctaagcagtactttgacatgcatgactgtcagttggttcttctgagtgcatctgagtgttatggagtgcttctccatcaattactagcgcaattaagcgcccaacagatatttgggcatttatcctatggccagcggagaaacactctatttcacttttccgggatggagaaggaagtacatctcacaatttccccagggccctggaatctaccacatccttggtagagataatgcagatctgtgaaagtagcctctgatggggttgctccaaggatatttcatgaaagaatggcaaaggagtatttgttgccatttatggcaagcccaatacaaagctccaaaaacttcataaggaatagaaaaccccaaattgaaactgtaaggaaggagactcatctacaaattttgactggaactctagaaaaatagctctggaaaatagttttttgggtaaatatatgaatatagtgtgtcttatatattggtaagctccataaatattatccaatgatatattaatcacttctgcctctaaattactatctgatttttagctaaggttattcactttctttgtatgagctcctttgtttgcacaatgtggaaatgtagaaaggactactcatcttgaagggtcatggtgagaattagtctactcccatttcttccttattgccagtttaccctccagctgctaatattccagctgacaataggaaagcaatttgatggcagggatctagaaatcttttattgttattattattatttgttttgttttggccagtgtacagatttttattttatttatttatttattatttttatagtttttggaaaagaggtggtgtttggttacatggatgttttttaagtggtgatttctgagattttggtgcacacaacacccatcacccaatcagtgtacactgtactcagtgtgtagtcttttatccctcacctccctcccacccttccctcgactccccaaagctccaaagtttttgtttgtttgtttttgttttttgtttgtttgtttgttttgttttttgtttttgagatggagtctttctctgttgccgaggttggagtgcagtggcatgatcttggttcactgtaacctctgcctcccaggttcaagcgattctcctgcctcagcctcctgagcagcttggacaacaggctcgtgccaccacacctggctaatttttgcatttttagtagagacggggtttcactatgttggccaggctggccgttgtatcattcttatgcctttgcttcctcatagcttagctttcacttataaatgagaaaatatgatgtttggttttccattcctgagttacttcacttagaataatggtctccaactccatctagattgcggcaaatgtcattatttcattcctttttatgtctgagaggtattccatggtgtgtgtgtgtgtgtgtgtgtatatatgtgtgtgtgtatatatatgtgtatgtatatatgtgtgtatatatgtgtgtatatatatgtgtgtatatatatgtgtatgtgtgtgtgtgtgtgtatgtatatatatatatatatatatatatatatatatatatatatatatatcacattttctttatccactcattgactgatgggcatttgggctggttccatactttttgcaaatgcaaattgtgctgctgtaactacatgtgtgcaagtgtctttttcatgtaatgaattattttcctctgggtgatacccagtagtgggattgctggatcaaatggtagctctatttttagttctttaaggaatcttcacactgttttccatagtggttgtactagtttacatgcccaccagcagtgtaaaagtgttcctttgtcaccatactcatgccaacagctattttttttaaatttttttttattatgtccattcttgcaggagtaaggtggtattgcattgtggttttcacttgcatttccctgatcattagtgatgttgagcatgtttttcatgtttcttggccatttatatatcctcttttgaggattatctattcatgtccttaggggacatggattagtatttttttcttgctgatttgtttgagttctttttagattctggatattagtcctctgtcagatgcatagattgcaaaatttttctcccattctgtgggttgtctgtgtactctcctgattatttcttttgctgcacagaagctttttctttaatttccttaattaggtcccatttatttatttttgtttttgttgcatttgcttttgggttcttagtcatgaagtttttgcctaagtcactgtctagaaggtttttccactgttatcttctagaatttttatggtttcaggtcttagatgtaagtctttgatccaccttgagttgatatttttataagatgagacatgagactccagtttcattcctctacatatggcttgccaattatcccagcaccagttgttgaatagggtgtcctttccccactttacgtttttgtttgctttgtcaaatactagttgggtgtaagtatttggctttattgctggttctctattttgttccattattctgtgtgcctgtttttataccagtaccatgctgttttggtgactatagtctttgctagtatagtttgaagttgggtaatgtgatgcctctagatttgctctttttggttagtgttgcttcagctatgaaggtacttttttggttctatatgaattttaggattgttttttcaagttctgtgaagaatgatggtattttggtattttgatgggaaatgcattgaatttttaatttgctttctggtcctgggcttaagaaagaaaggaagtgaaggtatagtaataattaaagacaggaagttcttgatcagggttgtgaaagctcctttccctgtaatggattagagaggtcctaaagatcctagccagactacagatcaaatccctgctcttcaatattctttgatgtctcaagcaagtacagttaaactctgagtctccacaattgtaaaaattgagataataatatccagttctcaagattattataaggattaaatgataatcatgtctgtgaagtactcaggcactgcttggcacatagtaacctcttggtagttgagaatcattccaaggctatttttctagcctgccacaatcctgccaccagactccacattccctcctcattcagtaaacatagaagtgcagcctggaatgctttccatcttctgtctgtttaaaaaatctactcaaatgagtaggtgtgtggtggagtggcgaggggagagactgcggagtcagcaagaaatcctttggcagttaaagttatttgaactcaaagcctgtgttcgcccaactgtaaagtagggataataacattgtctgcctcacaggattcttgtataacataagaaaatgcatgtgaaagactgagcacaatgcttggtagcaagcagtcaataaaggatgcctattaactctgctaggcaataagagctcaactcagtagcatcctcctgtctgaaggtttttctgtaattgctccctgtgctgccataacacactgtctgtagtgcatttcttttcaacatgaaattgtcatattgccatgtgtaaaaattagtagcatatataaaacatctatacaagctcatgtgctccttaaggacaaagactgtttcagtgatgaggtcctcacaatcagtgggggttacatagtaaaggctcagaagacattgttgaactgaactgaaatgacaaattaaaacagaaagcttttctactaagatgataactaggaagacagttatcatgtcccctaaacaacagtaaaactagcaagaagtaaaccatgtttaacagtcactctaacatggatggtcaggaaattgattgcaagtgagaaaaagagatggaaataattgagaaaaatatttatgtgtcagaaagaaaagtgtgaatcaattactagagttatgaatattaagcaagttgcttgagaagcattgatgtacggatgaattgggcaatttttcccaagttttccacaaaaaggaatcaagatcactcagctgctgacagatgatttttacctttcagattcaacattatttactgtcacccagctaaagacaaaggagtttacacgttgtgtatgtaaatattaactgggtgatgactcacatttttatgggagctctataattcatagttatacgtgcagacaagcatcccactgagagactgggtgtggggagaagggcatggaaattaaaccactgcaagtttccacgcacaccacttcctccttatctgtgaaattttatcttctctgttattgtccaagacgctgttgtgcaaacccctcacatctgaaagtcctgggaagagaactgtggtatgagttttcaggaatcggggctagatatgggagtacttttccatgaaacaaaagcggataacaccccccgccctcaactccagggcttaatcaaaggagaccaaacccttgctataggcatcaagtttgtatgcaggatgaagtatggcagacaacgagggagggagtgtttattcaaacacatatgcagcccctgtcctaaatcagtgccaaattgggtgatggcaaacctaagaaatacagtgtctcactgatacaatcccagctcctcctcaatgttaaagggtaatttataagttaaagtgaaaagatttttttttccaagagtcttgctctcacacaggctggagtgcagtgacgctatctcggctcactgcaaactctgcctctcgggttcaagcaattctctgcctcaatctcccgagtagctgggattataggtgcccaccaccacacctggctaatttttgtgtttttagtagagatggggtttcaccatcttgaccaggctggtcttgaacccctgacttcatgatccacctgccttggtctcccaaagtgctgggattacaggcgtgaactaccatgccgagccaagaatattttcaaaaactaaatttagtatctattgtttgcctgaaaggtccaggggatattggtgttggtgggaatggttctaattcttatgttcctggaagtccacagatttctgttcatgcccaggatctgctgcgctcatggaggatgtcaggcaagttgcttagccatataagtttgggagcaggtgggcagtttcccaattggtacaatgagatgactggttagctcatctccaagacaattgggcttaacattttggagatcatagataacttggagaatctgatgaaaactgtgaaccttctttccagaagaaagtacatacatttgactttcaacatttcttttcagaaactttatggacaccttgaatttatccacggactgcaggtccgtgttctaaaggattgttgcatagtgttttggatagtttgaatactaagaatgaataccaagaggatgtaaaacacaagggcactgcttttccttcaaatataacaatttaaaattcaatattccagagatatcaagttaaaaatgaaagatctgatatcttccgacttttaatccatatagtgctataaagttttttttttttttttttttgagacggagtctcgctctgtcgcccaggccggactgcggactgcagtggcgcaatctcggctcactgcaagctccgcttcccgggttcacgccattctcctgcctcagcctcccgagtagctgggactacaggtgcccgccaccgcgcccggctaattttttgtatttttagtagacacggggtttcaccttgttagccaggatggtctctatctcctgacctcatgatccacccgcctcggcctcccaaagtgctggggttacaggcgtgagccaccgcgcccggcctagtgctacaaagttttaatcgaatgactaaattataagccttgggttccttttgtatatttttaaataaaactgaattttcctaatgaattaaactttctacttgcactatgatttcaaagatatttccccaggaaaaaatatttggctccaactgtgaatatacacaaaattatcacattttggtaagaactaatatctactaatgaaacctcattggcttaatttggcttaagaaacaccccctccaccacctccatgtgaccactgtttcagaatgttagaaaaacaaactaaagtattgatgacttaacagaagcactgtgttgatacagtcatagattcccttttaaaaatctgcttaatgaactggagcattttaaaaattgctccaacaggtcaaacaggagacatgtcaggtgggaagtgaaaggcggcaaacataggcaatttcgacatacgcagataatggcaagatcatgtcacaatcataacatggctaaaatctccatttggactgaaaagtattgggtatcttagtgctctccaaattgcctacttcttttttaacttaaaaatttacttagactgtcttatttatttatgtagttcccaagtccagttcagtatctggcacgctgttctcactgcacgatcttttacttcttcccatttttttggaaaatgtcagagtaggaggaagcagaaagatctgtatgcctctcatcttcctgttgtagagactgaaatcctattagattcagttccttgagccaaggtgttgagtccccagctacctccctttctggtgtaaatatttctggaatgtgtaacacttgaatgagatggtaactcatgaatgtaatataaaatatggtctcccagttcaatttcacacatatacctgaatctgggacattgaggaaaccaaagacatgatgggcaaggaaagataggatttgattgcatcgagaagaggggagagcctagaaaacaactaaggacatgagctgagatgggatgtggtgggaggtggcaggaggctggaggcacctggggcaggagaatgctagaagagcaagcagaaaatacaaaggctaaattggccttcttcagttttactccgaataattccaatccagttgacaagaaattatatgtaccacactactctgaatgtgtcagttattttattttgaaaacttttgcacatggtaggcagtaaaaatatttgtggaatgaatgaaattatcaccaacacccctatgccatatgataactaagttaagaatccttctcattaaaatgcagttctaaagctgaggcccccttagagcagactgacttttatcagaaacagtatggccatctgtcctgaataaatgcctttaaggtcatttttcaaaattcttcatcccatatttcttctatgtcatggaatctgtgcatttcattctactatatttcctttgcttttccttgtggccaggttgatcatacaactcttactaccaaaggactgactgcttgacagaaccactgcgttgtattagtgacattaattgaacattgaacaggtgtaaggaattagaatagcacctcacagtgccttagctcatttgcatctggtgtggattaacgttattcccattttaccgattgaaattctaggagttaaaggtcatacaattagtaagcagtggagcagatttctattcctcatcatgtgaactgaagtcagagctctcaagccctgtgctatgcagcttgtgctctgcagagagagggcacctagtcaaggttgctgacaagtgaaaaacagttcaccatattaattgaaaattaaagtagagctaaaggataccaaagaataataaatgccgaggccccagtgccaggtatgctccatttgttccagaatatgaagttcccactcttctaaatctctgcccacgagagcctgctgctcatcaggcaaaatacaaggaggtgatctcagagggtggtgctgccttcacactctgctcaaaggtgtgggtgacatacagcctgcaagtgaccttgagaagtaggctgtttctctcccaccccttcccaggacctatgggactctacaaaaccctcctgcttgttacagctttctgagaggcgtagggctccccagggaaatggcactggggaggtaatctcgcttctagcagttcctgtactcactgcctcattcttctaagctatcctggtggaaactgccggtccccagccagtgaaccagaaccatgtccctgttcctttctgtagagcaataaaggaaaagtctggcttgtgtcagctgtggctgccctgggtcacaactcacccccagggaagcagactggttttctgaacattttctgagttccagcctctttacagcaagaagaccaaaagtgggagctcataccttgctaagaggtagagctactaattacccagtgcctgctctgctattggcgttttaacatacattcttatttaattgtcaccatattgctgtgaagatgatcagaatatccctggtttacatactgggaagctgtgtctcagcgaggtgaagtgatgtacccaaggcaaaccctacagaatgtcaagactgagctttataaccagtctgactagctgtgaagttaatgctttcccctattctatactactttacagcccctccctcatgatctcctctgcggtatgctcaaacacgagatatcagtgcccacttcccatgagaggctcttctttccagctgagggctggatccttgcagcattcattc

SEQ ID NO: 1122 - DNA, 1810 bp, Homo sapiens
  Genbank Accession No. AL050137
gtgagtttttcagcggtgacaatggagtggatttgctgattgaagatcagctcctgagacacaacggcctgatgaccagtgtcacccggaggcctgcagccacccgtcagggacacagcactgctgtgacaagcgacctgaacgctcggaccgcaccctggtcctcagcactgccacagccctcgacctcagatcccagcatcgccaaccatgcctcagtgggaccaacactccaaacaacctcggtgtctccagatcccacaagggagtcagtcctgcagccttctcctcaggtaccagccaccactgtggcccacacagccacccagcaaccagcagccccagctcctccggcagtgtctcccagggaggcattgatggaagctatgcacacagtcccagtgcctcccaccacagtcagaacagactcgctggggaaagatgctcctgctgggcggggaacaacccctgccagccccacgctgagccccgaagaagaagatgacatccggaatgtcataggaaggtgcaaggacactctctccacaatcacggggccgaccacccagaacacatatgggcggaatgaaggggcctggatgaaggaccccctggccaaggatgagcggatttacgtaaccaactattactacggcaacaccctggtagagttccggaacctggagaacttcaaacaaggtcgctggagcaattcctacaagctcccgtacagctggatcggcacaggccacgtggtatacaatggcgccttctactacaatcgcgccttcacccgcaacatcatcaagtacgacctgaagcagcgctacgtggctgcctgggccatgctgcatgacgtggcctacgaggaggccaccccctggcgatggcagggccactcagacgtggactttgctgtggacgagaatggcctatggctcatctacccggccctggacgatgagggcttcagccaggaggtcattgtcctgagcaagctcaatgccgcggacctgagcacacagaaggagaccacatggcgcacggggctccggaggaatttctacggcaactgcttcgtcatctgtggggtgctgtatgccgtggatagctacaaccagcggaatgccaacatctcctacgctttcgacacccacaccaacacacagatcgtccccaggctgctgttcgagaatgagtattcctatacgacccagatagactacaaccccaaggaccgcctgctctatgcctgggacaatggccaccaggtcacttaccatgtcatctttgcctactgacacccttgtccccacaagcagaagcacagaggggtcactagcaccttgtgtgtatgtgtgtgcgtgcacgtgtgtgtaggtgggtatgtgttgtttaaaaatatatattattttgtataatattgcaaatgtaaaatgacaatttgggtctatttttttatatggattgtagatcaatccatacgtgtatgtgctggtctcatcctccccagtttatatttttgtgcaaatgaacttctccttttgaccagtaaccaccttccttcaagccttcagcccctccagctccaagtctcagatctcgaccattgaaaaggtttcttcatctgggtcttgcaggaggcaggcaacaccaggagcagaaatgaaagaggcaagaaagaagtgctatgtggcgagaaaaaaagttttaatgtattggagaagttttaaaaaacccagaaaaacgcttttttttttttaataaagaagaaatttaaaatcaaaaaaaaaaaaaaaaagggcggccg

SEQ ID NO: 1123 - DNA, 1182 bp, Homo sapiens
  Genbank Accession No. AL050202
ggcactgccccaatgtgagtctccttcccaggctacgaatactcggaccagaagtcgggaaagtcaaaggggaaggatgttaacttggcggagttcgctgtggctgcaggggaccagatgctttacaggagtgaggacatccagctagattacaaaaacaacatcctgaaggagagggcggagctggcccacagccccctgcctgccaagtacatcgacctagacaaagggttccggaaggagaactgcaaatagggaggccctgggctcctggctgggccagcagctgcacctctcctgtctgtgctcctcggggcatctcctgatgctccggggctcaccccccttccagcggctggtcccgctttcctggaatttggcctgggcgtatgcagaggccgcctccacacccctcccccaggggcttggtggcagcatagcccccacccctgcggcctttgctcacgggtggccctgcccacccctggcacaaccaaaatcccactgatgcccatcatgccctcagacccttctgggctctgcccgctgggggcctgaagacattcctggaggacactcccatcagaacctggcagccccaaaactggggtcagcctcagggcaggagtcccactcctccagggctctgctcgtccggggctgggagatgttcctggaggaggacactcccatcagaacttggcagccttgaagttggggtcagcctcggcaggagtcccactcctcctggggtgctgcctgccaccaagagctcccccacctgtaccaccatgtgggactccaggcaccatctgttctccccagggacctgctgacttgaatgccagcccttgctcctctgtgttgctttgggccacctggggctgcaccccctgccctttctctgccccatccctaccctagccttgctctcagccaccttgatagtcactgggctccctgtgacttctgaccctgacacccctcccttggactctgcctgggctggagtctagggctggggctacatttggcttctgtactggctgaggacaggggagggagtgaagttggtttggggtggcctgtgttgccactctcagcaccccacatttgcatctgctggtggacctgccaccatcacaataaagtccccatctgatttttagaaaaaaaaaaaaa

SEQ ID NO: 1124 - DNA, 745 bp, Homo sapiens
  Genbank Accession No. AL050220
ctcactcaggccccgcccgccctgccctcccctcccgatcccggagccatgtggcccctggccctagtgatcgcctccctgaccttggccttgtcaggaggtgtctcccaggagtcttccaaggttctcaacaccaatgggaccagtgggtttctcccaggtggctacacctgcttcccccactctcagccctggcaggctgccctactagtgcaagggcggctactctgtgggggagtcctggtccaccccaaatgggtcctcactgccgcacactgtctaaaggaggggctcaaagtttacctaggcaagcacgccctagggcgtgtggaagctggtgagcaggtgagggaagttgtccactctatcccccaccctgaataccggagaagccccacccacctgaaccacgaccatgacatcatgcttctggagctgcagtccccggtccagctcacaggctacatccaaaccctgcccctttcccacaacaaccgcctaacccctggcaccacctgtcgggtgtctggctggggcaccaccaccagcccccagggtatgcacccacacaggtggcctgaggccccataggagtggctggggaaacaggggcagagatgggagggaaggtctgaggtaggttcctttatatataaaaatataaataagtaaataaatatatatatttaaagttagctgtatcctttatataaatataaattcatgaatatataaaaaaaaaaaa

SEQ ID NO: 1125 - DNA, 1731 bp, Homo sapiens
  Genbank Accession No. AL080076
gggggaggctgtgatgggttgacaggtgcgtgacagtgggagctgctctcggcacaagcatgtacggcaaaggcaagagtaacagcagcgccgtcccgtccgacagccaggcccgggagaagttagcactctacgtatatgaatatctgctccatgtaggagctcagaaatcagctcaaacatttttatcagagataagatgggaaaaaaacatcacattgggggaaccaccaggattcttacattcttggtggtgtgtattttgggatctctactgtgcagctccagagagacgtgaaacatgtgaacactcaagtgaagcaaaagccttccatgattacagtgctgcagcagctcccagtccagtgctaggaaacattcccccaggagatggcatgccagtaggtcctgtaccaccagggttctttcagccttttatgtcacctcggtaccctggaggtccaaggcccccattgaggatacctaatcaggcacttggaggtgtcccaggaagtcagccattactccccagaggaatggatccaactcgacaacaaggacatccaaatatgggtgggccaatgcagagaatgactcctccaagaggaatggtgcccttaggaccacagaactatggaggtgcaatgagacccccactgaatgctttaggtggccctggaatgcctggaatgaacatgggtccaggtggtggtagaccttggccaaacccaacaaatgccaattcaataccatactcctcagcatctcctgggaattatgtaggtcctccaggaggtggagggccaccaggaacacccatcatgcctagtccagcagattcaaccaactctggtgataacatgtatactttaatgaatgcagtacctcctggacctaacagacctaattttccaatgggccctgggtcagatggtcccatgggtggattaggaggaatggagtcacatcacatgaatggctctttaggctcaggagatatggacagtatttccaagaattctcccaataatatgagcctgagtaatcaaccgggcactccaagggatgatggcgaaatggggggaaatttcttaaatccttttcagagtgagagttactcccctagcatgacaatgagcgtgtgatccattaccaagtctcctcatgaaaaccacagtgagtcagcccttcacagaactactacggaagaaaattattcatcacagtgtacagttaaacaaaggaatctcagtcacaccaaaccaaccttttcatttcctgctctctcccctcttttgtgaagaaagcgggtccagatgtgattcaaacaactgtacggagtggcatattagaattgccctaaactgaactgcaaataattatgtgtgtatgtatatgtgtgggaaagagaatgtactgtatatgtgtatgttatacagacatatacacatacatacattgacccacaggacattgtaaaatattatcacatgacatcttaagtagaaataagtagggacttttattccatcctttttttcacgtttacattttaattattacaagttgctcctgccccctccctgaactattttgtgctgtgtatatcactgctttatataagttattttttaaggtgaactcagatgttatggttttgtatatgtctgcaatcatggataggaataaaatcgcttatttgagagctttcaaaaaaaaaaaaaaaaaaac

SEQ ID NO: 1126 - DNA, 638 bp, Homo sapiens
  Genbank Accession No. AL110434
caagagcacactgcagttggagcagcaagtaaaggagctggagaagtcgggtggagctgaagagccaagaggctccgagtctgcagcagcagccagaccagtacctggagccccagtcccacaaggagcttggatgtgcggacaagcagggtggactccccaggagcacccaggcttgagtggagaagctgttggtacaggagaggcggcaggaggagcaggagaggctgcatgccattcttttcgggctgccgagaacagggagctaaacatcaccatcatctaagagcgggtcaagaaattgaaaaaaaaaaaacaaaacatttaaggggttaatatcctacacaattcatttacttcatttgaatgttagagccacttatgtttgtgtttctaatttatagtttaaatttatttgtgtttctaatttatagtttaaatttatttgtttctaatttatagtttaaatttatttgtgtttctaatttatagtttaaatttatttgtgtttctaatttataatttaaatttatttgtaaaaagttaaatgagagtgggtctttctctcatgttcactctggcatcttttagcatttttttaatttgataattataggacgttagcatgcatatcgagt

SEQ ID NO: 1127 - DNA, 1642 bp, Homo sapiens
  Genbank Accession No. AL118812
tcttaataatgtgtgtgtgtgtatgtgtgtgtgtgtgtgtgtgtgtttgtgtgtgtgtgtgtgtgtcctaattaagagaatttttactggctgcttgttacatttgttgagggtacaacacactcaagaataaagtaaaaggatagtcaggatccagatgtttcttttctagcatttaatgtgtgtgaactcagaacactaccatgaaagaacacttccccccaaaactggatgcagaggaagaaaaaaaaaaaaagaaatggcacagttttttgtatttttttttttagttattttttgttgttgttgtttgtattgtttctcttttctgatagagtatggccacttctgggggaaaaacatgtaattaagtaaatgtatacattggttttcacgttttacttttgttttcccactaccaataattttcctctggaagaattttatagttttttctatttcattttaatgagtaacaatatgttaaatgcataattaagacaaagcaatgaaattctgactttattcaaagtactgaagattattgcttctagggcatttttaaacagcaccattgtattgttgaatgtttatgtaactgatggcttttctataatgtaatttttgaatgttcaggtgttacatttccaaagtttaacttttaaaaaaccatcttctgatcccttttattgtctgggccatacaatctatattacataggtgccaacatttaattcttttaaatggaacatttgcagttttccatattggtacctgctttttctggagaggtttgagatcttgttaacaaatcagactttacactatatacagatgtgacagataaattgaaccacttgtttgtgaaaatgagttcctgtcatcttcctcattcactcagccctcaccccagcagccttttccggtcattgtagctgacatggagcagtgacagtattcatttgagaacagggatgcaagtcacagacatcataaaatcagggtctccctgctgaagcattcactagttggcaactatgaatttattccatgtcattctgtttacttagcacttgcactacccttgttggttgagtgtatgctttatttgtttctagtttgaaatcccacatctgatagctgagagtaggcaaatacaacatttacctaatgtcattcactaacatggaagagttgtgaaaattctagagtgctgtaaatccttggcatacactatgacaaacaacttcattactctcccaccaggagctgctctcctgcacttagaaataatgtcacaagtagttttctaatgtacaatgcagacaaatgtactgctctctgaatacttgaagaaatggtattatacatacatagaaacttattagttataccttttcacaatcttattacgatgttgccgttaaaagggaaaaaagacacaggcaatgaatggtgggatagtaagaggacttagagtgtatgaatgagttgattttacttttttggaatttgattaagttgacagtaggcactgattggatgattaaacataagttaatctccactgtgataaaaacttaaataataaacatgatttaaaatagaaaaaaaaaaaaaaaaaaaaaaaaaaaaaaaaaaa

SEQ ID NO: 1128 - DNA, 239 bp, Homo sapiens
  Genbank Accession No. AW001128
tttttttttttttttttaacatgcacaacctgccacttttaatcagaagtccatgtttgaaatccaggctggttttggatgttaacatggagcgaatgggatacatcaaaaaatggttggctgcttgttttaaagaggtcccactggtgacaggatggtagtggcgatggcagtgaggacagactggtaaagggaaaacccaaaggcttgtggggagaaagggcttttgttgttaggaa

SEQ ID NO: 1129 - DNA, 415 bp, Homo sapiens
  Genbank Accession No. AW001140
aaggttaagagcattggtttaataggcaaaagagaaaggaggcttggtgacacggatggtctcctggcactgagcattgtagcgcgccttcttcagggtgccttggcggactttggtgcctgtgcccccatcacacgcaccccagttctcaaacttgtacttgcagtcggctccaaactccttcttccagttgcagggcaccctgcaccggatgcgctgggtctgggccccgcaggtgccctcgcagaaacccactccgcaatccttgctgctgggggtgcagggcccccatgcccactcagcgcactcgctccccgggccgcccttcttcaccttatctttctttttggcgaccgctgaggtgagcgccaactaggcgaggagggtgaggaggaggaagcctcggtgctgcatc

SEQ ID NO: 1130 - DNA, 517 bp, Homo sapiens
  Genbank Accession No. AW001450
  unsure (1)..(517): n = a or c or g or t
ttttttttaaggagtgaggccatttagtgcccatctggggcaacaacattacatgggcatcaggaattcaggtccagctgtatccagcagctcagggccaggctggcctccttggtatggatagaggccagtttggtgaagtagagaccccagtctcagtcaaataagtcaggttccttatcctatccactccagtctgaatcaagccagagggcaagtttcactcagtgcaaggctggcccctgccaaagggtttccatgccctgagttctggacttaaggcacacaggactaggcacgtctctgggagcctccaaaccacagaatcaaagaggtccaaggagacaggagactcccggggcaggatgcgctgaagagggccccctggctcttgctcctccttccgggctagctctggcatttccttaagggccaagggggcccanggccgccttccctcgctcttgctgctggaactcctcgtgggcacgatccaggtctgcgagcacctccagca

SEQ ID NO: 1131 - DNA, 512 bp, Homo sapiens
  Genbank Accession No. AW003102
aaagttttaataaacttgactcaatctgcctttattaaaaaaccttacaaaagatgtatttaaatgcttgaaaaaattaactttatgctctatgcacagataaatttctcttactgtacaactaaatatggttatatcctttgtttaaaaaatattttttcccccactaattacacttcgtgtgtagttccacgtcaatgatctttccgctcttctgggaatgtgtcctaagagctgccgggtgggtggaaatagccctacacagcgccactttcttgctcagtcgtgtttattaagattgtttggggtttggggtttttttcctccgttttcgttttctgagacagcgtgctggtaactgtggacccgcccggccggctgaccttcacttgtccttggagcggtccaggctctcgagcacccggttgagacggatgttgagcagtctgacctgcttctccaggtgctccagcttctcctccacgctggggttgctggggttgctggggccg

SEQ ID NO: 1132 - DNA, 416 bp, Homo sapiens
  Genbank Accession No. AW003135
gctgctgacagggagtttatttggactgggctgctgagatctgctggctgcctcagctccaggtcagagctgctccggctcgggctcgggctcgggctccggttccggctccggctccggctccggttcttgctccagctcctctatcttgctctgagcctgcggagggtgaatcccttgctctaaggcagaaaatcgtcttggtcgccactgtgagaagagatggagagagagacggagggcggaaggaggagaaggatgaagggaagcggatgaggagggacactgagtccctctattttttctcagcgcccctgccctccccatctggtcctggctttctcccaaccccccttccagcctacccaggcacaagccatccctggagtgagaggcttatgaagaaggggggctct

SEQ ID NO: 1133 - DNA, 683 bp, Homo sapiens
  Genbank Accession No. AW003232
tttttttttttttttttttttttttatttaaaaatttggtttattaaattaatataaaaatctttgtaaatctctatatacatctggtcattggaggttccagttataaacccatcttagttccacccctttcccctcaaagggggagcaggggtcaagggaccccaacccatcctgccagggcagggcctatcttcctgcctttggaagacttgttgcaggtgggtagtgggtcaaattccaggtaggatgaactgggagaagctggcaccccaaggttgggagggggctggggtgcaacctccagctgtagctgcctcctgccttccgaaggcagaaggaatgaaagatgcacattctgggctgacgggcatggctagcaccatcctaggccacccacgaggggctcattggcatttgtcgtcgctgtcggaagggctgccctcccgggggaggccatgacgggagtggggcccccagagtgcatgcacctcagtggtctccgtgtcactgctgctggtggcactgtctcggaagctggcgaggggcggccggactttcacaccctgtgctgggacagagccctcgatggccttccggagctcctttagagtaacgattccaatgagtctgccaatactggtgacataagcatggtccactcccagcagtgagaagatagt

SEQ ID NO: 1134 - DNA, 406 bp, Homo sapiens
  Genbank Accession No. AW003358
gagtgagaagcaccaggtttaatattaaaatctttcccttaaaaaaaagtacacagatagaaaaacttaacagcatacaaaatagcatttctgctgtataaatgtgagttaacgtgagtcctaaaaatatttgtaaacctaggtgattatatctttggtaccgtattgagaacccactctccctccttggaccaactctggaatactctagaatgttagtgctggcaaggcactcagagttaataagtccgacttattcattttttgaaggggaaactgaggcccagagagggtgagggattcctccaaagcctcatagcaggtccaatgcagagccagggccatatactggcacacacacgtggccactccacactggcacatttacattctcatcacagatgcg

SEQ ID NO: 1135 - DNA, 586 bp, Homo sapiens
  Genbank Accession No. AW003595
gtttttttgagacagtctcgctctgtcgcccaggccggagtgcagtggtgggatctcagctcactgcatcctccacctcctgggttcaagcaattctgcttcaacctcccaagtagctgggattataggcacatgccaccacacccagctaatttttgtatttttagtacagacaaggtttcaccatggtggccaggttggtctcaaactcctgacctcaagtgatccacccgcctcagcctctcaaaatgctgggattacaggcatgagccaccatgcccggactcccagttttcatgatgaggaagtgatggtagcttttcatctgcccagaagttaacttttgatggatttgccttctaaggcatcaaacatgtcttctaaggccttctccacacattggagaaactcccgggcattgcggcctgggtaggaagagacattgcagcctatccagttgtcatgaacagcatacccaacaccaaagccatcagagaccacaggggcaaagccctcaaggttcactgctgggctgctcagtgtgctcgtggacaggacaatgtgtttatctgcccgatgcagggtc

SEQ ID NO: 1136 - DNA, 707 bp, Homo sapiens
  Genbank Accession No. AW003626
tttttttttttaagggtatctgacagcaatagatttattaagtatccccgaaaatataaacacaaaccagtaaaaaacaaaaccgtaaaacgtcaggcctggagctgcaataagacagagacaggagcagctcacacgtggcctaggtggggaggacgaggccataaatactgcaggagggcggcaagggagccctagggcgaggggaaagcagggtgtcggcagcaagatggctccgggggtttagacactgctggcttcggccccggccgccacctgcctctcactccagctgcgagcagcttcacttggggccctgggcctccgactcctcctcgtcgtcttcgtacatctcgccctcttcctcggccgtggcgtcctggtactgctggtactcggacaccaggtcgttcatgttgctctcggcctcggtgaactccatctcgtccatgccctcgcccgtgtaccagtgcaggaaggccttgcgccggaacatggccgtgaactgctcggagatgcgcttgaacagctcctggatggccgtgctgttcccgatgaaggtggaggacatcttgaggccgcggggcgggatgtcacacacggccaccttcacgttgttgggatccactccacgaagtagctgctggtcttgctctggatgggcagcaatctgctcgtccaccctccttcatgggacatgcgggccc

SEQ ID NO: 1137 - DNA, 839 bp, Homo sapiens
  Genbank Accession No. AW003733
  unsure (1)..(839): n = a or c or g or t
aagtgatgtcgttttttttgttacagttaccagtatgacaggtgggaaggggccgggtggggttctggccagagggacctaagaacattaggtcctggcaggtgcagccctgggagcagccacgagggggcatcaggctgcacaggcggctccaggatgtcggtccgggaccgggcataggggttagcgagtgattctcgggcaccgcaggacgagccctacacagagcaggtgggcccaggaaccccctttctcagtccaggactcccaggcctcagggcctggctttggtggcgcccgtctgttgcagtggagttcggcggtcacagcctagggaccgggtccagcccagccagctcagcagcaggtcagcgccctgccccttcccgcgtcgctgggacgccccgagccgctcaggtcaccacgcaaaagccctgggtaatccgccgccagaagttgcgaccgcggctgctgagggccacctcggcggcctcctggaagacggcgtggacgttgtcatggagccgagccgagcactcgaggtaggccaccgcgcccacggaccttcgcatctnctggcccctgtggtaggtcacaggctccaatccgtttctttcgagcttgtttaccagtgattngtccttgcgcaggtcagtcctgcagcccacgacgatgatgggtaccttcttgcagaaaatgatcactttctggtaccaccgctctaangatgttgcaagctgntctggcttgtgacatcgaagcanagcagcaggacgcctgctgtcagggtagaacaggggcccgcagcgggcatagtcactcttgcctgctggtnccca

SEQ ID NO: 1138 - DNA, 647 bp, Homo sapiens
  Genbank Accession No. AW003775
  unsure (1)..(647): n = a or c or g or t
ttagagctgncaaagacctttattcagtcctggagtggagctggcctgacagggtgaagcaggggctgcttagggcgggccagaccctcagcccctgagcaggtcaggccggccaggcggggctggtaggtaccaggtgccagcagctgcagggcaaactcagtgatgacagctgtgaggccccagacccggtgtggtccatgcaggaagacgggtagtgtgtagcggaagtggccaccccggcagaagtgggtatagccctgattctgcgtctgcagcaggtgggccagcggcagtgcaaacacttcatctacctcctccgagttgggcctgaggctctggggatccagtgggcctacaccagcaagcactggcaccacggtggccttttgcggatcatacacaggccgcagcaggccccacacgtgctcctcgggcactgccaggcccagctcctcccgggtttcccgcagggccgtgtgcaccacatcttggtcagccgggtcgcacttgccgcctgggaaactgacgtcgcccttgtgcctcccggtcaggcggctggaccgcagcgtgtacagcagcgccgggaccccacgcactgagcagagcgggacgagcaccgcgggcgacgcgggccgcgcgcggag

SEQ ID NO: 1139 - DNA, 562 bp, Homo sapiens
  Genbank Accession No. AW003850
cctaaacatttttttaattatttttctgggggtggggaggggagaaaaaaacccaatgctctgaactccgaggttatttggaaaacctaaaaggcactgcaagttgtctccatagagagattctgcttgtctctgagccttccctgactcatacctgcagagctcccagctctggcagcctccaggtacccacgaggtcttccctccacagctgtctaggcctatgggtattttccacttgcatacaatttgtctgtgctttttaaaaatctcctttctttggcaggactcgggtgtgtatttgggacccagcagaggcttggccaccaggtgtatgtgacctaatccaggggaaggctgtccaagagagctgcctttagttaggatcacacactagacagggaagccctctgctgcttcccgtatatttattttagggtgcattctcatccctgggtctaggccagcctggtcccaaacggtatttttcgccttagtggctctaaagaaggtcatgctgacccagagctgtcccctttgtctccaaaccagatccggccca

SEQ ID NO: 1140 - DNA, 262 bp, Homo sapiens
  Genbank Accession No. AW004007
aagattacatttatgtaaaaagaaataaactattttaatgtctgataattatggggtagcccttgcattgcaagatgatgatttgattatggacacattatcaacagaattgaatttgcatggaactcaagacacgcttaagatcaccacagcataactgcagatttcaggaattacagtcatagaggcctctgagcaagaagtttcttcattaggctctccgtgttactttatactttttacttacgttcacagtggtcct

SEQ ID NO: 1141 - DNA, 731 bp, Homo sapiens
  Genbank Accession No. AW005044
  unsure (1)..(731): n = a or c or g or t
tttttttaataatcacggaacattggccatttattgacagactgatctgtgctaggtgcttgacttacatcacgtagaattctgacaacagcccttcaaggtacatcatactgtccccgttttacagatggtggggggggccctgtccagggtcacagctgtctgacatcaagcccatgctcctttcacgtcccaggtgaagtctctcctcagaacatcctagctcttgtcctccctttgccccgattgataagttgacagaaagctgtgatattgacctccacctggcctgagcgtgtaccgatggggttggtggcctcacagatgtaggtccctgccaggctgtagttgatgggtcccttgaagaagagggttctgttctgggcctccacacccttggggagagagccatttagcgtggtccagtggtactcantggctggggggttagcatcagctttgcaggtgagcttcacgtccatccgctgcaagtaccagttgccatcaaacccctcaatggttacctcaggctcatactgcacgttgagagtgaggctttccttgaagccgtcaatgtgtagttgacgatgcaggccaaagactgctggtgggctccctgctgggcaccagcggtagcaggtgattacccgcacttggcccattggggttcggaactcctgtacttttgcttaacctttaaccaatttccaagaatccacacttggaggctt

SEQ ID NO: 1142 - DNA, 485 bp, Homo sapiens
  Genbank Accession No. AW005911
  unsure (1)..(485): n = a or c or g or t
ttttctgtaggatttttattggtggcacctggggccacatggagggagtcctcagcacaggcgctggggtgtgggaaatttcagaggcccctcctgggatgtcacccttcaggtcctcatgagtcaatcttgagtttctccttcactttctgaaatgtctctgaaaaccactcccgcatcttggcagaaagttcactctgtttgatgcggctgatgagttcccgagccttgtcctccagtgtgtttccaaactccttcagcttatccaaggcactggagacgtctggggtcccctgggctggggctgggccttccaagacgatcgacagaaccaccaccaggaccgggagcgacaggaagagcctcatggcgaggccggaggggcactctctcaatcttcctgactctgtggggtcctcagaccaccttantccctttccccactcaaaatgtagcaggaggagccgcagacaaaattcctcaga

SEQ ID NO: 1143 - DNA, 502 bp, Homo sapiens
  Genbank Accession No. AW006148
  unsure (1)..(502): n = a or c or g or t
atttttaaaatactttattttttacataatactgtcattacaaaaaaatacaaaaaaactactataaaaacattcgggggttgtcaaagtgagaaaacctaaagaccccaccccaggatctggctgaagcagtcttcccccagcttcttcactatgacctttatacaactatgggggtggggtgggatcacacangcataaaagggctggaaattccccacacagcctccaagggtaagaaatgagtagcttcacatatcacaaaagtgggatttggaagtttgggggtggctaggccctgagttcagaggtgtggggaaaaacctgtgaccctgaatctcttggtggggaatagctgccacctgaccccaaagccctttcccttcctgatgaaggctggtagatgggccctgtcccccacctcttagccttaatacctcaggccccattccctgccctccacccttgaacactcctgagagcagcagggaggacagaacct

SEQ ID NO: 1144 - DNA, 539 bp, Homo sapiens
  Genbank Accession No. AW006202
ttttgtgtccatatttcaaaaatttatttatctcaaactgtgcataatggagtaaaaacttaagttgaaaatgtacctgttataaggatgatattagttcaaatatatacatggattctcggcagactgattcaaataatacagagccgaatcttttaaaatacaactacggaaaataaaggggggaaaaccttaaaatatcacaataaatttacagaaatattacaaaccataagaaaatatttcaaacacagtaatttcatggttttttttatctgaacaaaatggaaagttgggatcgaacaaaagctattataaattaccaacggtgtcaacctgcatggccatttttgcttttaacagtaagttataaaatttagtacagtctaaaacttttgccctttttaaacaagaccacagagatggttcgccagtacttattctaattttttccttttgtacaatttttaaacaattaaaatgtccaaatttgaataattttcttcttttcacgtttgcaactgtcctaaatttcagct

SEQ ID NO: 1145 - DNA, 124 bp, Homo sapiens
  Genbank Accession No. AW006583
tcactttttactcttttattggggcactgtcggccccaaataaatataatacattaaacccagagctgagggaatcgtgcaccccaggaggcgccccccacaacctcagccgggcaaaataagt

SEQ ID NO: 1146 - DNA, 228 bp, Homo sapiens
  Genbank Accession No. AW006898
aacagtgagatccacctttattgaaacatcacacggcagcatcagggctcccacacctcacagggcagcaggcagttcacaggacagcaggcagttcacagggctttgggggcctcacagggcagcaggtggttcacagggcttcggggggcctcacagggcttcggggggcctcacagggctgcagggggttcacagagcttcaggggcctcacagagcttcagggg

SEQ ID NO: 1147 - DNA, 524 bp, Homo sapiens
  Genbank Accession No. AW007018
  unsure (1)..(524): n = a or c or g or t
gcggccgcctgcagaaaaccagacgccacggtcaccgctcgcgagaccacacaggcccgtcgggttgaggagcagcaggttcgtcccagcgaggatcccccgcacctcattcctggcctgaacccctgaggttccctctgtgagcatcggaagcttagaggggaaagagtgtgtgtgtggccaccggccctgccccagcggagctgctgagacccgcactcctaaccaggtgtgcatcctcccatccgcccccgcggggcttcctacctgcccaaggaacggccctcaacagctgngaagtcaggcgccccaggagcatggtctgtgggcggcggccacaggtcccaggggagctggaacacaagtgcccgttcaggtcaggcggcagcgccttcagtagtcgcgggcgggccgggactggggcgtctggtcccgccgcgaccctcgcttcccttctccctccgccaccccaacccacaaggaggactttgcttccaacacagctcgcgccccgaggctcccaa

SEQ ID NO: 1148 - DNA, 345 bp, Homo sapiens
  Genbank Accession No. AW007058
tttttagcacaaaagaacacagataccagtgttggacagtggttttgttatggggactgggtgacagcttatcctaaatcctgcgcatccgtccataccaggagccgggttacccttggtaccaggtgcctgccccacaaagcctgggtcgggagagggcttggtgacgggcctgcagctcccgtgagtaactgtcttttcccaggctgtgcacgcatggccaggtggtcctcagggtggctggttctccttccaggagcaaccatggcaggggcttaaaagttgagtagctctgggaaatggtccttggaaggcagcgatgggtccatgagcacagtggtccct

SEQ ID NO: 1149 - DNA, 521 bp, Homo sapiens
  Genbank Accession No. AW007116
tttttgcctgtccacctcatgttttattgtaaaaatgttaaaataaattacatttgacatcgttgccagtatgtacatacagtgtgcgcgatgccaggacaaccagcaacaacatggttcattaaaacatttcacagaaaaatacgaggctgctccttttcaggcccctgctgggtggcggcctctgcaaacggctagagaagtgggggtgtgggcacgtgcccatcactgtcttcacatgttggggaggtgggctctggccccactgccccacagtagtggggcagaaggcagagagtgaacggagctgagcggctctgatgacttgcttcctgcccggcctccagtcacccgcagtggatgccccttcctgcttttgctcacctcagtgtccccttctccacctctgcttggggacatggcccttgacatcatggccttggatgaggtcaccgaaaaaggcccaattgagttgcagggcaggagggcagacactagatctcccaatccttgggaccctg

SEQ ID NO: 1150 - DNA, 631 bp, Homo sapiens
  Genbank Accession No. AW007256
ttgcaaatgtttatggtttttatttttcaatttttattttggttttcttacaaaggttgacattttccataacaggtgtaagagtgttgaaaaaaaaattcaaatttttgggggagcggggggaaggagttaatgaaactgtattgcacaatgctctgatcaatccttctttttctcttttgcccacaattttaagcaagtagatgtgcagaagaaatggaaggattcagctttcagttaaaaaagaagaagaagaaatggcaaagagaaagttttttcaaatttctttcttttttaatttagattgagttcatttatttgaaacagactgggccaatgtccacaaagaattcctggtcagcaccaccgatgtccaaaggtgcaatatcaaggaagggcaggcgtgatggcttatttgttttgtattcaatgattgtctttccccattcatttgtctttttagagcagccatctacaagaacagtgtgagtgaacctgctgttgccctcagcaacaagttcaacatcattagagccctgtggaatgacagccctattcagggtgccagtcttctcatccatgtatgcaatgctgtttcttgcagtggtaagggaagttcctaagaggcata

SEQ ID NO: 1151 - DNA, 424 bp, Homo sapiens
  Genbank Accession No. AW007442
ttttttttgcacggtgtttctttaatggaaagacagccaccgacctcaaaagcagcccctccttgcgctggaccagaaggataaggggagacctaaccaccagtgggccagtgggggtgaggggcttctaggaaaaccggtgtctgggactctggcggttgatggtgtcatctgcgcgggatgctgggcctccaacctcccaacctcctccgggacagtacaggtttgggggcaaggcctgagcagggcaggctggggagaccgctgtccctggggttttgtgggcaggggctgggtgcaggccggacagacagaaagcagtcccagctcaaggcagaaggccagagggtgtggagtgaaagggacaggcgaagccaggttcggagagatggagggaacaggccaccaagctcagaagcgagaa

SEQ ID NO: 1152 - DNA, 497 bp, Homo sapiens
  Genbank Accession No. AW007479
ggaaggaaaattagatttctgacggacatcctgatgttggttttactgttttcgttttgaatacacaggctgggtcaggagcagtgagatttgccagcactcagggttctaagggtcttgggccagctctggatggaggaagagccccacatgcccagagcaaggccccccattaagggactgcagccacctccaagggctcctccctccacccaccagctcccaaatgccagagggagcctttttgccctccctccctgcccaccatccctcaaccatcagcctggcgttcaaagcctttccaagtcccacctcacttttccctctcccaaaggtgcccaggctctgggcaggccctgctcatatccctgatcatggcacattctctggaggaccctcctgttctcgggtaggggccgtgccccacctaggtagccgtcccatgtgggatcctgtaggatctctaaaacctagctctggccccaactttctgtctg

SEQ ID NO: 1153 - DNA, 624 bp, Homo sapiens
  Genbank Accession No. AW007566
ttttttttcttttctataaaacttcattttgtaatttttttccaagaagtagtaagggggaaatattgcaattatgtaaaggtaaggaacaatggtgtataaaaataatttaagcacaatattaataacaaagcaactttttttcaaggaaaactagtaggtcatcttgcccaagatttttccaaaggtattaaatatattttcaataacagtacatacaaatacacatacacaaatataccacacagacacatgtgcacatacatgcacacacacacacacacacacacacacacacacacacacatatatatatatacagctcaagtatttttttggtgtgcattctagctaatccacatagctaaagtgaaaaaacactgaaaagatcaatgcctgagtaaccttaaatttgaacaaactatgcattggatgtgaatttttggaggcatgctaagatttcccttctcaatttcattagctactacccagtgttctgtggttcttatccttaaaaaaatcaaagtgtgcctttcagatctgctcacggtgtggtgatgattattatggtggcgtcaatttgggaacacttgccctctcttgctcctactgcaccttatggat

SEQ ID NO: 1154 - DNA, 516 bp, Homo sapiens
  Genbank Accession No. AW007764
  unsure (1)..(516): n = a or c or g or t
tccaactccaatttgtttaatctcaattccagaggtctaggccaggccaggcacctggggctctgggctgttctgcttctctgggccctacacccagaacctggccttggcttctcgctcccgggtctttagatcgtcatcttggagtccggttccatgttctcaccgctcctccatgatgactccttctgctcagcctcctcccttgccagtctcagggaggatccttcacagccaattcatccttgggtccccttcccaggggacgtcaacagtctaggcagggacccttgcccccaactcaatccccatcaccacagccagcaaagcctccgtcaggggccctgcctcttcacctgctgcctccacaagccccaccagggccagaccccgcttcctcgggcactgctctgaccccagtgtccagcgggcacagtgggcagccagccggggccggcccaggcggaacacctcacccactgactccgggccaccctgnggtcccaggtggatgcg

SEQ ID NO: 1155 - DNA, 544 bp, Homo sapiens
  Genbank Accession No. AW007803
ttttttggctcacaactttaattgattgctttccctccactgggcccaccgggtcggcttacatagctcatagctcagtgctgctgaaatagacccagggcaagaaaggtatgaacaaccagtgaatgccactggagcataaatgttcacaaaattgtagagaaggggtgacaagaagcaagcagtggggcagggagtgtcactgatgtccgaaaccccgggtcagaccaacacgcagcacagccactcggccagagagagctgaaccatgccatccttgtcttcgtccagaaggctgaatagtttgaagagggtctccaggcggatcatacaagccacgaagctgtcaaagttgatgccaagcttgctgcacgcataccgcagggcaatggtctgctgcacctggctgttgagggtgaaacctgccttcctgagggctgtcctcatctcgtgggcatcgatggtgcccgagtggttataatcagtttcccaatagatctcctaaagcaggaaagaaatcccaagtagaaaacaaccattcacg

SEQ ID NO: 1156 - DNA, 550 bp, Homo sapiens
  Genbank Accession No. AW007811
ttttttttttttaacactttcaaactttattatcagtacagtcattgcaatacaaagttatatggaactaaattaatctagaaagtagatttttatatcattcaagataaggagaagcccagattaaatatataaaattgttgttatttacacagctaacttcccgctttgaaaacaatcccatacgtaaatttcttttttggagcaaggtaacttggtgattgttctatctctacccagaattcacccctatttggaaaactgggggctaaaagcaatcagaattcaccagttcaaaaacacttacgtccatcttattagcaacactaactacccagaggaaactaaaatagaccagatttacagcagtaagtaaatctaattgtaatttaaacattaccttattttagcaaaaggtgaagggaatcaaacgctagggggcagcatcaaactgttgtgggttaggctgggcagccttgcaaactttaagctttagggtatttttaatgagaattacacttacataaaagatgaattataaaacttccgt

SEQ ID NO: 1157 - DNA, 369 bp, Homo sapiens
  Genbank Accession No. AW008822
ggaagatactgttttgtttttaattatacaaaattttcagactttatattatcatatcaaaaacacaagatgccatcacacagtggccggaagaaaagccagcgcagaaagttccagtgggcccgggcaggtgctggggccagcgcagagtcccgctgccggcgcctgtctgtacgtccgtctgtccctcggccccgctcgcagccagggctggcctgggggcatgcttgcggtgggccttgcccagctcaggtccaaggtgggggctgtctgcagtcaccccgggcgtccacctcccccagcagcgtctgcctcctggctgctgccggccacctcctaactgcgaatcgctgtctttctgtcgcggtc

SEQ ID NO: 1158 - DNA, 601 bp, Homo sapiens
  Genbank Accession No. AW009667
  unsure (1)..(601): n = a or c or g or t
taaactaggagaaccaaatctggaagccaaaatgtaggcttagtttgtgtgttgtctcttgagtttgtcgctcatgtgtgcaacagggtatggactatctgtctggtggccccgtttctggtggtctgttggcaggctggccagtccaggctgccgtggggccgccgcctctttcaagcagtcgtgcctgtgtccatgcgctcagggccatgctgaggcctgggccgctgccacgttggagaagcccgtgtgagaagtgaatgctgggactcagccttcagacagagaggactgtagggagggcggcaggggcctggagatcctcctgcagaccacgcccgtcctgcctgtggcgccgtctccaggggctgcttcctcctggaaattgacgaggggtgtcttgggcagagctggctctgagcgcctccatccaaggccaggttctccgttagctcctgtggccccaccctgggccctgggctggaatcangaatattntccaaagagtgatagtcttttgctttttgcaaaactctacttaatccaatggtttttccctgtacagtagattttccaaatgttataaactttaatataaagt

SEQ ID NO: 1159 - DNA, 440 bp, Homo sapiens
  Genbank Accession No. AW009817
ttttttttttttgttttcaagttctgctttattattaaagttgtaatcccttgatatttacagagcaggcacctcggtgccaaggaccaggccatgcccgttctggtctgggaggcaaaacctggggttgggtgagccacggggtctgcaggttgcatccgaaacccccaggtcctatttttccaccccgtaacaaaaccagaaaccttcccaaggcagaacgccaaaggccaggtgttacccacaccccagcagttccccttaacgccagatggggctccctgagccctgtggctgaagtggggaacacggccatggggcttgtgtggactgaattctcatgtggctgcagccctttctgtagtacagactggggttgttaacatagttcatggtgcctgcagccccttcatggtgggggtgcctggtttgtcctccca

SEQ ID NO: 1160 - DNA, 361 bp, Homo sapiens
  Genbank Accession No. AW013949
tttttttttttttttctgtacaaacacaaaagaatccattttcagaaaaataaattactaaggggagaggaagaaagggtccactttgcttttctcaataaatatgcaattctgctcacctaagacttgaaaggtaattatctgggggtgggattctaacatcagggtccacgaaggtgattctaaacagagctgcagccccagcgccttgtcaggggagcccccaacccttccagagctgccccgttggcctcttccaagcaggtcagaacacccgtgtggtgagattccaaaaaaaaaaaagtgtccttgtgcccaaagtctcaggtgcttggagtgtggctagaaacagctcttttgg

SEQ ID NO: 1161 - DNA, 493 bp, Homo sapiens
  Genbank Accession No. AW014285
tttttttttttttttttaaataaaaagcaaatttaatacgaataagtggacagatgagctgcccagtaggcaggcactgagagactgatcagtgggatactcaagcagagtgagacagagcggaaccttccaagtggtattagtgttgacctggattacatcccataatgagttctggatccagaattacctgagggaaggggtctgttagcagtgccataaagggtcagtggctctgatctcccaggcgtcagggtcccttgcagagatgactgagaaccaagtgcacaaagcacagatgaagctgctacaggctggaaccccaggggccactggaatgtccatttcctgcagcctgcctatactgaggtttaatctatataacgtttgacaaaagggtcagggtaagattaggagatgataattaacctctaggagtctacctcattgtacagctgctcccccactgggtactcccattcttctaagacca

SEQ ID NO: 1162 - DNA, 618 bp, Homo sapiens
  Genbank Accession No. AW014557
tttttttttttttttttactttggattatgtttaattaagaaaagcaaagtgcatacagagatttataactttaaaaacaaaaaaaaaaagtctttttatatgatccaaagaataaactcaaaagtccatgacaaatagaagttctaaacaattgtttacaaatactttaggtataattacagtaaaagtcaagttcatttgaaatcaccaaaaaaaaagtttcaggttggacacggtggctcaccacctgtaatcccagtatttagggattttcttacaataaaaggcatacaggttgattattttaggcatacaggttgattattttaggcatacaggttgattattaaatgacatgattgcccatatataaaattttaaggaatctaaaaacaaaaaacagcttccaaaactagtgagtttagaagcacagaggatgcaacataaatatatgaaaatcgattgtatttctatatagtaacaaaaaacaagtagacactaaaattaaaactactatgttgtttataatcattcgaaaaggtaaatacttagctataaatctcacaaaacatggacagaactcataagctgaaacctacacagtgctgaggaaaaca

SEQ ID NO: 1163 - DNA, 383 bp, Homo sapiens
  Genbank Accession No. AW014764
tttttttttttttttttgactcctccctcctcatttattttggaatgtgctagaaacagcttgaaacatccctttaatagcttcctggacaaaggtcaggtccaaaaacacggctattgaccaggaggtggcaggcccgctggttctggcattcgtccagcaccttctggaaggtggtggctgccacacaggttaagctgtcttccctctgggaggcaggcttctgggaactacacatttggtaatcttgcccataaaatgccgattgggcacttatcgtagaatgccgagggcactgtagattcaaatagtccccatcacaggcataggtggggtggttttgcaggagtttggttaggtaaccagagaagtcggtgagcgct

SEQ ID NO: 1164 - DNA, 565 bp, Homo sapiens
  Genbank Accession No. AW014889
tttttttttttttttttgccattattttgatttattgcattctgaagtactccggggggagggcctgagaacgatccgctttatcagcagttctaaagccttattacctgagatttatattctggggggaaaaatcaagattggattatcaatacgtatttcacaggagatttgagttttggccctgacagaagaacacgtactaacctgaaaaaggctacgtgagattaaagagagaaacagctaaacaccaaatcctggtgagagagacgtcgatttaaaaggccagccactcactgtagcgtgacaactccctctggggtagccaggagcagagcgtgagccactggcatggagcgtgggccacgagggccacctccccaggagcccacagcagcccagggaggccttgggagcagctttgcctcagccgcagtcacttctcatcatcccgcccatagttaatcgtctgtaaggcctgagctatgagcatcgccatctcccgggtgctggccgcaaccactctgcaagccatgaggtcgaggggtccaccccaagtgtctat

SEQ ID NO: 1165 - DNA, 423 bp, Homo sapiens
  Genbank Accession No. AW015038
tttttttttttttttttacaagagaacaaaaaacagattttaatgtaggtaggagtaggagcactagccaccacagcatagtcagaatcctagcagttcaactcctgtggcttttttagttgctgaaaaagttgttcagaggccagacacggtggcctacacctataatcacagcactttgggaggccgaggcgggcggatcacttgggaccaggagttccagtccagcctggccaacacggcaaaaccccgtctgtactaaaaatacaaaaattagctgagtgtcgtggcacacgcctgtaattccaggtactcgggaggctgaagcaggagaatcgtttgaaccctggaggcagaggttgcagtgagccaagatcgcaccactgcactctggcctaggtgacagtgcaagtctttgtctca

SEQ ID NO: 1166 - DNA, 407 bp, Homo sapiens
  Genbank Accession No. AW015189
  unsure (1)..(407): n = a or c or g or t
tttttttttttttttttanaaagagacagggtcttgccgtggcccaggcttggtcccgaacctcctggctcaagcagtccctcctgactcagccttctgagtagctggagttacaggcacataccactgtgcctggctctggcttttattataaaggagacagggacctgtaagaggagatgtcagagggctttgagcagggaagtgaccatatcctacacatttaaaaaggctcccctcaggctactggggttgaaaaccaaatgaaggagttggagagagcagaagcagaagcccagtgaggaggccactacagccacctggcaagagaagatagtggctcatacccaggtgacagaagtggacggtggatggtggaggtggtgagaagtgattggcttctggat

SEQ ID NO: 1167 - DNA, 471 bp, Homo sapiens
  Genbank Accession No. AW015211
tttttttttttttttttaccatttagcaacgatttttatttaaaaagataccttcccctgcctcactccctatcctaaaataaattatagatggattaaaaatttttaatgtttaaaaaaatgctagattatatttagtaccttgagattagaaggtccaacataaggaaaaagactgataaatttgactatacaaatttaaaatttttgtgtggcaaaatataatacaaacaagattgaaaaattatgaactcgaaaaattgtttacaaaacatatgacaggaattaaaatgactacaacataaagagctttttcaaatcaaagacaaataggccaagtactgagaaaaagacaactcacaaagacagaattaacaactggccaatcaacaagcaaaattatcagagagacacagacaaaacattgaaacatccttcttcacataccagattaatcaagattaacaatac

SEQ ID NO: 1168 - DNA, 519 bp, Homo sapiens
  Genbank Accession No. AW015534
tttttttttttttttttattgctgctttacattctataaattatagatctgtttaggtgaacgagggttttttattattattatgtatttattttttgagactgggtcttgctatgttgctcacattggccttggactcaagagatccactagcttgagcagctgggactacaggcccacgaccacgcccagtatcgttgttttttaaataacaagactcctctcggttgctgaggctcttaggaccaccaaccattcctaacttaatgaatatcgattcaatctgctagtctctagctggatgcaggtccgccgaaatgggaaggaggaaggaatgcagcgtaactggaccggcctggatggctgttgtaatgcgtcacggaagagccagaagagcgtctcttcctgaggccaatgtgttcaaccaagcgggaaactccccgggtagagtgaaatccgaagttgctatgctacaagataacctgggccgtgcgccgagagctgagagccctcgtgccg

SEQ ID NO: 1169 - DNA, 629 bp, Homo sapiens
  Genbank Accession No. AW015546
tttttttttttttttttagcagcactttcaaaatacattttattgtcccgaatagaaaccttaactattcaattagtccagtaattccaaatggtcttattacttctatacataagatatgatcttacaacatttatgtagctaaatacttaacttcccatgctttttgaggattcccaaaagactttagggggttcccaagactttcagggttttttttttttttcacaataaaagaaaggaacagtgtcaatccataaagtcagaccagcagtttaataagatcctcttcatagctcagttctcagtgcatacagagattcaatatagccccatcgctctcagttattagaatctgagagggataaaagcaataactattgtttaaaagcctaagagtgaaaacagatgtccaaaaaaaaaagaaaaaaaaaagccaaattctttcatcccaggatgtctgaaaaggagagactctatggagcgtggatgtataaaaggagttattcctaccggaaaaaaatgaactgtggacacagtcactcaagaccagagaaacaaccaccatgagtaagtagcttcaatttcactgttaccaggagggcacacaccagaaagcctgggaaaaa

SEQ ID NO: 1170 - DNA, 630 bp, Homo sapiens
  Genbank Accession No. AW015585
tttttttttttttttttagatcataattattttattaactaaattacagctgctttgaataaaaacttaactaacaatcacgtaagggtctcataggtgacaaccagttacttttcttgtttcttctccccaacagtgaatcatcaaggccatggtgcttaaacacaagtgtattcctttcacgtcttactactctccaaatcggagtccatcacttcacttcagttattcatcattcatcattccttttgattctttgaatgcattaaggggttcctctacagctttcctaggaggttgtatagtcttctgattggaagctgatataaataacaaataagaatataaatttaataaatgaaataaactaaggcatttggtaatgtttaattttaagataaaatgttcagggctaaaactaaaggtgccagagatgttaatgaaagagttccagctctgacagtctattcaaacatgctgaatattcttgattatatacactgatttgaaaaatgaagcaaataacccatctacatcaaatagtaaacacattctctcatttgtttatgccatctttccccccaaatcagccacttgttacactggctggtgggaaaatgctgtcaccaa

SEQ ID NO: 1171 - DNA, 438 bp, Homo sapiens
  Genbank Accession No. AW016235
ttttttttttttttgttgggacaggaaacacatttaaagagagcacagtggggtgcgccaagccctgtgctttggaaccgcatcacagcgcccctcacaacagccctgtgaggtaggtgaaggagcccacttcccacatgcagacactgaaggctcaacagctcccctaggcctcagggttcctgcggggtgggcaggggtccagcccacgggtctgaccccaggtcagcggcgtccatcagtcagagggcgggtctctactcaaggggaggccccgggtccagagtctctgggtccagcctgtcccgtgggaataggtgcagggtgtccccgtggctgtggagggatttctagctggagaggggctggggtcccacattccaggtcccttcccacggtagcatccaggtgatggcttccgcccaaaccaggaaggag

SEQ ID NO: 1172 - DNA, 339 bp, Homo sapiens
  Genbank Accession No. AW020375
gcacgaggagacatgaaaaaaggagaaaaggaaagacagaagtgtatatatatattatttaaacaaacaaaaagaaggtgcgttactatttttttttcacccgggaaagaggtgagaggatgggaaggagcagccaggcgtgggaagcggcgagatcctcgggctgggggtgcccacgtttgctacctcccactgtgaaatcgctggtgctcacaattgtctctcacagtgtatgtgatttttttaaggaaaaaaaaaaaatccctatttaagattctgaaggtgctaccattattttgccacagactttgaagaaacttttggatgtggggcatcatc

SEQ ID NO: 1173 - DNA, 351 bp, Homo sapiens
  Genbank Accession No. AW021074
gcacgagaaaaggatggtgttctaattagtgggattgaaggaaaagtagtctttgccctcatgactgattggtttaggaaaatgtttttgttcctagagggaggaggtccttacttttttgttttccttcctgaggtgaaaaatcaagctgaatgacaattagcactaatctggcactttataaattgtgatgtagcctcgctagtcaagctgtgaatgtatattgtttgcacttaatccttaactgtattaacgttcagcttactaaactgactgcctcaagtccaggcaagttacaatgccttgttgtgcctcaataaaaaagttacatgcaaaaaaaaaaaaaaaaaa

SEQ ID NO: 1174 - DNA, 465 bp, Homo sapiens
  Genbank Accession No. AW023444
gcacgaggttcacttctgaactaaggggttcctccaaatgttggctgaaattcatcccaaggctggtctgcaaagtctgcaattcataatggagctactgtactggctattggaaggaggagattctgaagataaggaggatgccactggaaatgttgaaatgaaaaatattcagccgttggtctttgaaatttcctgtgatgtgtttcaatctagatgcaaagaacatggaaaaatcaaagtgctcgagtggtttaaatatgttttgggtattcctgtttatagactataatacttttccaattaaaatcctcagttgtcacgcagaagaaggttaagctgtatttgattgccagttttactgaaaatgcttagtattttacagtatcaccaaatatattttgtttagccaaggtataggaaaaataaaataaattgtataggttgaaaaaaaaaaaaaaaaaa

SEQ ID NO: 1175 - DNA, 473 bp, Homo sapiens
  Genbank Accession No. AW023468
gcacgagatttttggtgtattgctttttctaattgactgtttttaatgattttgatacattttaatgttgaaattaatattgaatgttagctatgaaattttagtattgaattttataatggaacagaacattggtaggtaacaagatgcaagaggatgtcaatacaagattgtctgcctgtttttctttgtaatttgtaattacagtttttgtaacttgtgattatgtttttaactaaatttaccaccagatacaaacactacttcttacacagagttatcctttatttatatcattaagacgtgaatgaaacatcatcctaacttacttccccaagatattgagaggtcatatctgtttttctttatcattcatttctttttctaaaaagttggttactgatatgcttttgatttcctatgactctattatgttgtacagaacatcttttcaatttattaaaaaaaatagc

SEQ ID NO: 1176 - DNA, 229 bp, Homo sapiens
  Genbank Accession No. AW024474
ttttttttttatgattctggaaatttattaggtttttttttctccattaaggaagctacatgcaaaagatacaacatacagaatatctttaaataacacaactcccagacagggacaggacaatatttgggggggggcattctgtctttgctttgctatgttctatttttaatttttttgttcctctggatgaaatttctgagatgttactaaatgggggatgtggggg

SEQ ID NO: 1177 - DNA, 472 bp, Homo sapiens
  Genbank Accession No. AW024884
ttaacacaaaagcttttacttggaaactggcaaatactggactagaatactgacatgctcacgctctggcgggagctcggatgcagaagctattgcacaaagcccctctgattgccttgctcctctttggcatgtatcagcagagccccaagggccaattgcccacaggtggggactgttctccatcaaggtatggggacccctacttccttgttttgttaaaaagtgcaggtaggcgaagaaagcccaggcagttgacccagtctttgaaacagctgactccccagagctggggccaggggagcctggtcttgaggggtaagggctgcagggccaggctgatggcctgtgtcatggcattggccatctcctctccagcttctcctcagccatcgcccgtccgtcatggtggtgtcggctgcacctggaccttcctgcctctccgctcagggcagcagcagtgagtgcagca

SEQ ID NO: 1178 - DNA, 806 bp, Homo sapiens
  Genbank Accession No. AW024960
ttcagtttatagctctttattaaccacacatacatattttccagtgtctaattctcatcgtgttcttttccattccagacttccctgtctctttcccagagctctgttcctcttctcactgtttctggaaggcagttgcactcaaaagtgaagtcaccagtctgccgacaggtgcctccattgacacaaggcgagggtgcacagggcacatacaggctgtcacagtactggcctgtgaagccctgaaggcactggcactggtaggaaccaggcaggttgaggcagatgccaccatgctggcagtgtcctggaatgtcacactcattgacatcagtctcacacttctgccctgtgaagcctgtgaggcatttgcaggagaactggttggccacagtggtacaggtacttccatttgcacagggatgagacaggcaggcatcggtccattggcactccttacctgtaaacccgacttgacaggtgcactcataggtatcccggctgagcatatggcatgtgccgccattcaggcaaggtcgagacacaaagcatggatgagatgtcgagtactggcagtcctctcctggtaaccctgaggcacatcggcacgtggctttccccagcatggcctgggccacactagtcccaccattctggcagcgggtcttctcacaggggtctcgatgttgacaatatgcccccaagaagccttctgggacattgcagtatcctgtgccattgtgtaggtacacacattccttcatttccacaggttcatagccatctcgacacatgccccgggtcgc

SEQ ID NO: 1179 - DNA, 520 bp, Homo sapiens
  Genbank Accession No. AW025012
ttttttttttattttcatctccttttattgacagaaatagaaatttgtgctgcagaggcagtagtacctcagagcatgagaaggtagtcaatggggctgacatgacaagccacaatgctggccaggggtcctaccatagtgggagaaccaaaaccatccagaactaacatgcagtctctaatttggagactctttattgtgaccaaaagatttggaccattagaagatccaagttaatctttcagcttcttatcctaggcagaaaaaggggctgagttcctgaaacatcacacaagtagagctggacaggtgctgatgcccagccttgctctaaaagtagtcaccattttccccgacttctcaacactgctctcactcagtatgtgccctagaaaacctctcaatgttataaacaagggacaggataggggcagcagcctagggtatgcagggaatcaaaagctgctacatagccgagagcatttcacaagaaacagcatgggaacactattgggtcaag

SEQ ID NO: 1180 - DNA, 504 bp, Homo sapiens
  Genbank Accession No. AW025183
ttaggtctaattgggtgagtttttattgtagaaatgcgcccctgaagatgtgagacgcgtaggtgggcccctgcgcctttccaccggcctcccactgcccgtgctcacagaagaaactgggtccttagacccaggcgggacccactgaaaccccgcgttcagtcatttcccagggggatgcggccccccagtgccaaccttccaaagttcaggtgagttcacgacgctcggatcctagtggggtcctcctcggtgtcaaggagcaagagaggccgtagcagctgtgggaaacagccacagggcctgcgagtccagacgggtagctccaggctagttgcacgcttgcggttcctgccccttccgtgtgcaaagtaaggaagtcagcaggcggcgagcaagcaagacgggctggcgcgccgtctttcaggaaggtttcccgacccgaccgccgtctttcgggaaggtttcccgactggaccctctgtccagaggaagaaagatttg

SEQ ID NO: 1181 - DNA, 497 bp, Homo sapiens
  Genbank Accession No. AW025309
  unsure (1)..(497): n = a or c or g or t
gcggccgcccggggaggccacacagaggcagtcaccatgctgctgcagagaggtgtggacgtgaacacccgggacacggatggcttcagcccgctgctgctggccgtgcggggcaggcatccgggtgtcattgggttgctgcgggaagccggggcctccctgtccacccaggagctggaggaagcagggacggagctgtgcaggctggcatacagggccgacctcgaaggcctgcaggtgtggtggcaggcangggcttgacctggggcagccgggctatgacgggcacagcgccctgcacgtcgcagaggcagccgggaacctggcagtggtggcctttctacagagcctggagggtgcggttggtgcccaggccccatgcccagaagtgctgcctggtgtctaacctgaaggcgtcctgctgcagtataagccattccttcctcccatgacctgctggaggggtctcangcatgaccccactgctggggctgctt

SEQ ID NO: 1182 - DNA, 661 bp, Homo sapiens
  Genbank Accession No. AW025529
tttttttttttttaaaatcaatacaaatcttttattaaagatctactcataccatggctgaaatcatctattattgttgctagttagcctctcttctatagttgggtaatgttgtcttgccactgtgtttgccatctctcccaagtgaaaagaacactttttaaaaaaaattaattgctccaagttttcaggcccaggggaggctctcccattctcctccttcaataagtcccgtccaggaaagggtgatcttgtggataaattcatcatacttcactttgccattgggttcgatatctgcttccctgaagagatcatccacttccttgtgggtgagcttctcccccagactcgtgagttttgaccgcaggtcggacgccatgacgtaacctttcttctccttgtccaccatcaacatggctagaagaatttctttctttgggtcttcttgttttatttgcatgtgcataatggtcagaaaagtggagaaatccagctctccatttccgtctatcccgtgggtctgcaggtgccgctgcacctcccctggcgttgggctggcccccaggcacctcatggccaccatgaggtcgggggctttatcttccccctctgctgctgtcatacaaggagaagcatttcttgtctcattaatttggtc

SEQ ID NO: 1183 - DNA, 443 bp, Homo sapiens
  Genbank Accession No. AW025554
ttttaagatttgcacatgttcccatttaatgtatattacatatatattatagatcatataatatacattacatattaaatagcagtaaaaagagtaataacagttacaaaggcaaaagagacacagtgcttatctggacatcctggcccatgcaatccttttgaaacaattacctgtgtaaagaaatgtgttggagtgtcctcccaccacgacgtccacacccctcactttctgagcgatgagtttatccatttcaaaacccgaatgtcccagtgcaataattttgttcacatttagagtttttaacttatctacttcaggttgtaatgcagtgatttcatcttcaaacactaaatttgtccctggatttgagagaaaaggggtttctttggaagtgtatccaacgattcccacaacttcatcaccaacaggaagaactttat

SEQ ID NO: 1184 - DNA, 458 bp, Homo sapiens
  Genbank Accession No. AW025560
ttttttttttcaattctattactttgggtatttgtttgccagtcattacagatgtcctaggcaggtgatatgctccacattttgcagctgaggaaattttaggtccagagatgttaggtgaatgacccaaggtcacacagctagagaggggtggtgatgaggactgcagctctgggtcctggaagagctctcattcttttgcacggcactgagatgaccctctgtcttcacccccactggcctttcactgtgttcctcccaccaagggccaagagggagcaggaggtgacggtgctgaaaaaggccctggatgaaaagacgcggtcccatgaggctcaggtccaggagatgaggcagaaacacgcacaggcggtggaggagctcacagagcagcttgagcagttcaagagggtaatgctttttggtgatgctttttggtgatgacacataagagtgac

SEQ ID NO: 1185 - DNA, 488 bp, Homo sapiens
  Genbank Accession No. AW025596
atgtcacttattttatttactaaccttgacagggactaaagaatgaggtacagaaaactttccagaagtctgagtgtggtgtagaagtccaagacaacttggagctccattattgcattattaagtagaatgaactgttatgaaattctccatattccaggtttactacatagaaaagtactatttacctacctcacagaggtattgtgaggatttgtgtttataaagtgcttcaggcgccttcgaagaaaggcaacatacaagtataaaataatcatacaaatttcaaaataaatgaaaagatgattttggcacaatgggaagggtgcctcctatttaaagaacacttggctattggtttataaaatcccctgacctcttgggttttaaaaaaattattatttaaaagaataaatgtttttccattgccaatcttataaaaattctcaatccaggctgtgttatcagaatcacttgaagagctcagt

SEQ ID NO: 1186 - DNA, 319 bp, Homo sapiens
  Genbank Accession No. AW025683
ttttttttcccactaaataagaaaactttaataagatgattacaaagaaattaataaagaaatagaaaatgatagcagcttcaaaaataccagtctccctgttttaaaacaaaatcaataaaatcagtgaatcacaattcattgaactcattcttggctacaaggaagcagctggatagatccactggcaggcagccctgcaggattaaaatgaggcccactgccaaaaagccccaaatgagattgccgtcctcctcatcctcacaccatcctcatcaggcagggaaggaataggattagactccctattatggagaat

SEQ ID NO: 1187 - DNA, 408 bp, Homo sapiens
  Genbank Accession No. AW025687
ttttttttttttgacccccaaaatctgagtttatgtcctaggataaatggctttccagcctcctagcccgcagcttcgctcagttgcagagcccctcattcccatgctgggggctccacgtgtaaggatctggctgagctaggggtggagggtggggtaagtctgcatcctttgcttttattctgcaaaaacagaacactcagcaaaggatctttgggcaagggaggaaggaaggggcttacaagggtctgagtttacaaaacaacaacaaaagcaagcagcctcgaaccctacgatccagcctcacgcctgagcagtctgcccgtatgagctgagtgcctcagagggtgatgtccgagttaaaagctctgacgtcaggctccagctttcctcagtttggaagccttc

SEQ ID NO: 1188 - DNA, 674 bp, Homo sapiens
  Genbank Accession No. AW025904
  unsure (1)..(674): n = a or c or g or t
tttcctccagtggagtctttatttgttttttgtgggaaacctctgggacctgccctggagagcctggcaactgcagggcactgtggggcgggaggtgcctcagcacgtggggccaggggctggctgcaccgcgctgcacagatgaggtcggcggtgaccaggcagaggtgacaccagggacggtctccttgagctgcaacaactggcccgaggctggggaccccacatggtgatttcatcccaaacagttcttgattctacgtgacctgatttggggggttcaggtttaagggaggccaggtcttggacgggcccccgtggttctcggtgtgaaggggacgtctgctgctccccaccagacccgcagtcccagtctgccgggtcatgaaggtnnggaagtgcctgatgagcgccttcttgtcaatcttgcccatctggttccgcgggatctcctccaccagcaccagctccgaaggacccgcgtacggggccaggaacatttctggcccactctttgagctccctgtgggacagtggaagtgtccttctcgggagggtcaccacaacagtgacccgcttgccccatgttatatccgggacctccaatcacagccacatctgtgatctggggggtgggccaacagggtgcacttcacctacagggggctgacctt

SEQ ID NO: 1189 - DNA, 326 bp, Homo sapiens
  Genbank Accession No. AW025939
ttttttttttttagaatagttttttctcatcaaaacatgatttattaattttaagcaagagtaagcatatttgatagtggccagcttggggatagaactcttcctggttgatgcacagttcaacacctgttgggtcttggctgttgggatgataattcttttgggtgaggggaacagccgtggtcaaggctgcctgcagcctaaaaaaaatcatgccctaaaaccgcccaggcctgggggctgcacacctggctgtgaccctgtgagtggaagctcgctcactcctgggagctccgacaggacctgctcgattcaaggacgggtca

SEQ ID NO: 1190 - DNA, 580 bp, Homo sapiens
  Genbank Accession No. AW026010
taataaaattttacaaatcttttattaaagatctactcataccatggctgaaatcatctattattgttgctagttagcctctcttctatagttgggtaatgttgtcttgccactgtgtttgccatctctcccaagtgaaaagaacactttttaaaaaaaattaattgctccaagttttcaggcccaggggaggctctcccattctcctccttcaatagtcccgtccaggaagggtgatcttgtggataaattcatcatacttcactttgccattgggttcgatatctgcttccctgaagagatcatccacttccttgtgggtgagcttctcccccagactcgtgagttttgaccgcaggtcggacgccatgacgtaacctttcttctccttgtccaccatcaacatggctagaagaatttctttctttgggtcttcttgttttatttgcatgtgcataatggtcagaaaagtggagaaatccagctctccatttccgtctatcccgtgggtctgcaagtgccgctgcaccttccctggcgtcaggcatgcccccaggcacctcatggccaccatgaggtc

SEQ ID NO: 1191 - DNA, 693 bp, Homo sapiens
  Genbank Accession No. AW026718
ttttttttttttttttttttttttttttttttttttttattccaaaagcctttaattgaatttctcaatgtttttcaaaaacaaaaagatccaaatttgagggaaaaagggacctggaaaattcccctcaaggggggtcacaatctcaggggcatgctccaggcgtgggaaaacccaagcaggcgcaatacctgccctgggcccagctaaaccttttgactaccacacgctgtaaaccacgggcagggctccctgctccctgacccccaaacaccccaaaaatgggggcctgagcaggtaaaggccagccgtgaccctgccccaacctagggctgtatgctggcctttaatgccatcccacccctgggcaagggaggcttaacaactaagggaggctgggggtcaccaggccatgcagcatgaggctgaaacgcccaactgcttttgccagtgagttgtgtggctctacccgcaagaactgaaaaagcttttgcgcacctgggccataacgagcccattgtggcccaaatgaagggggtccttgggacccagtccattccggccttttccgggaacctggcctgggggtcaatctcagtgccggggtcaatacccacctgttggatgagggaaggacccccggcttggaaaacgggcgggggggttgcccaaaacctggggtggtgccccagt

SEQ ID NO: 1192 - DNA, 477 bp, Homo sapiens
  Genbank Accession No. AW050627
ttccagagccacattttattccaggatgcgacacggggcggcggatgcctggcctcggaaaccccctccctgcctatgagggcttgtccagggctcccctggaacacagctcagccaggcaaggctgggagagggctgggccccccaggtgacctgcagacgcctcccccacctacatgccccacgcaaggggagccctggagcccggcctgccttgacaggaaggagataggtgaaaaataaatacacggctgggccgcctgcagcaagcgcgacagtgcccgggacccccagggccactcctgcctctggtggcctcaccgcggcccaggccctcgtccccaagggttcagacaccactgtcggcgagcaccgtgctgggcgcagaggccacgtgtggtgggacggcagcctgctggcccctccaggtgaggaccaggagcacaggctgtggcaactccagcccgggcaggggcc

SEQ ID NO: 1193 - DNA, 371 bp, Homo sapiens
  Genbank Accession No. AW051272
tttttttttaatttttctgaaggataatcaataatttatttctctttaattgtcacaattaccataattatctagctacatgaccaatgtcactacatatcacaggaagattgtccacctacactttactgagacaaagacaatggccatttatgtgttaaatgtacaatgggatgttaacaccatttatgtgttaaatgtacaatgggatgttaaaagcagtggcttttatgtgtaagacaagatgtggcacatgatttattacgaacaggtttgatttaaaatgtattatgccaagaaacaagcatagaaatattttggcattgagttattattaaagtagaaaataagtaaactagagaaataaatcc

SEQ ID NO: 1194 - DNA, 577 bp, Homo sapiens
  Genbank Accession No. AW051353
ttttttttataggtagtatatatgcttttatcctttactactcaaaggatgatgtacagtggagttatatcataaacacatttaacttacattaactcaacaaatgaggtcagtgaaaaggaagccgtaaggaaaataacatgaaatcctgtggcgatcccacctaaaatgaatgcacacccttgagtaaacccaggtgggtgctgtccatccgctgggtgggcgcttcactccttgtcagttcacatctgccactagcggggcaagcatcttgcgggctgattctagtgttaaaagttatgtgcttttttttttttttttttaacaaaatggcccctaaacaaacaccaacaacttcacttggtcttcaaacaaagaaacagtctttttttccaacataggaggaaaagctacttgttgtggatgtacaggtttccaacatggcacccttctaaagggctttcaaggatcatcctaatagcccattttacctatgtactgaccttggaagctaacccctgagtatgatgcaactccactctaatgtaaattaaaatgccatgatcttaaaaatgcc

SEQ ID NO: 1195 - DNA, 546 bp, Homo sapiens
  Genbank Accession No. C00414
  unsure (1)..(546): n = a or c or g or t
gatcacaaaaatgtattttataaaatgttctgtacnataaagttacannccaaagtgtactcttggaatggnttctttcctgtaaagtcttatctgcgactctgtctcgggaatgttttgtctgttgccgtcagccgaactttgttatggagggagcagcctcacacaagcagaaacactcctgtggatggtattgtagcatgtattgtttattttagtcaatagaccctctccttataaatggtgtttagtcttcctgttgcatttcatgggcctgggggtttcctagcagaggatattggagcccctttttgtgacattaccaattacatctttgtccacgtttaatacttttgttttggaaaantttaaatgctgcagattttngtgtagnggttctaatacccaaagncaagaagtaaantgnttttccataatactntngncttggcctgtnatgcagnccnttgngntaataatggntgaattaggagncggtatttcactttaggattnatttttgtaaantntntnantgtaatnaat

SEQ ID NO: 1196 - DNA, 454 bp, Homo sapiens
  Genbank Accession No. C06075
  unsure (1)..(454): n = a or c or g or t
tttagtggaaacatgtttatttttattatttaaggttccaaagactggggtaggtaaaactattgaagattaacaaggcaaactcagcagagaagagagtgtccaggttgagttgagttggagagatggtccggtttaatttttgactccgttgtaattgctggatcagttctagacatgtattttccagctgcctctagtttttgaacttgcagacaaaggagaacttgtcttcacaaggcacatccttccatttctggaatcctgtgcttgaggtcaggctcacacagtagccaggattaacactgcttggggctcccaatgcccccangacttgttagaaaaccagggacccactgctcccagtgcccacggcggtcctttttgggttcatggaaggccatcccaaacttgaatcctccatgccctcccccttaatccagtgaggcccaag

SEQ ID NO: 1197 - DNA, 543 bp, Homo sapiens
  Genbank Accession No. C75510
tttttttgctggagacaaacatctttattaaagacactaccaaaattttggcaaacatttcaaaacagatttgtaaacataatgcttcccttttcaactggcagcactttgaaaagacaatacaataagacaatacaacttgaatcaacattaattcaaaatccttatatttttgaccacataacttatgttcccacatgataaaacaagtgacagtttaaatcaatgtcaacagataaactccatgaaatgaaagtttgtgctgtttgatgaatcacagtatgttatggttaaatatatccactcttttttatattcctggcaccaggatgaaaaaaaaaatctttaaatatacctcttatgtaggtaatagcttctttgcatatctctcttcaaaaaatactttatagcagtatataaataggttacctacacatttcattttataatttgtcccaaaactatagatctgttcatttccatgacatatcaattttggcccaacattaataaagccgaacaaactcgttgaaatggaaaatg

SEQ ID NO: 1198 - DNA, 1603 bp, Homo sapiens
  Genbank Accession No. D00632
ggccagggatcaggcagcggctcaggcgaccctgagtgtgcccccaccccgccatggcccggctgctgcaggcgtcctgcctgctttccctgctcctggccggcttcgtctcgcagagccggggacaagagaagtcgaagatggactgccatggtggcataagtggcaccatttacgagtacggagccctcaccattgatggggaggagtacatccccttcaagcagtatgctggcaaatacgtcctctttgtcaacgtggccagctactgaggcctgacgggccagtacattgaactgaatgcactacaggaagagcttgcaccattcggtctggtcattctgggctttccctgcaaccaatttggaaaacaggaaccaggagagaactcagagatccttcctaccctcaagtatgtccgaccaggtggaggctttgtccctaatttccagctctttgagaaaggggatgtcaatggagagaaagagcagaaattctacactttcctaaagaactcctgtcctcccacctcggagctcctgggtacatctgaccgcctcttctgggaacccatgaaggttcacgacatccgctggaactttgagaagttcctggtggggccagatggtatacccatcatgcgctggcaccaccggaccacggtcagcaacgtcaagatggacatcctgtcctacatgaggcggcaggcagccctgggggtcaagaggaagtaactgaaggccgtctcatcccatgtccaccatgtaggggagggactttgttcaggaagaaatccgtgtctccaaccacactatctacccatcacagacccctttcctatcactcaaggccccagcctggcacaaatggatgcatacagttctgtgtactgccaggcatgtgggtgtgggtgcatgtgggtgtttacacacatgcctacaggtatgcgtgattgtgtgtgtgtgcatgggtgtacagccacgtgtcctacctatgtgtctttctgggaatgtgtaccatctgtgtgcctgcagctgtgtagtgctggacagtgacaaccctttctctccagttctccactccaatgataatagttcacttacacctaaacccaaaggaaaaaccagctctaggtccaattgttctgctctaactgatacctcaaccttggggccagcatctcccactgcctccaaatattagtaactatgactgacgtccccagaagtttctgggtctaccacactccccaaccccccactcctacttcctgaagggccctcccaaggctacatccccaccccacagttctccctgagagagatcaacctccctagatcaaccaaggcagatgtgacaagcaagggccacggaccccataggcaggggtggcgtcttcatgagggaggggcccaaagcccttgtgggcggacctcccctgagcctgtctgaggggccagcccttagtgcattcaggctaaggcccctgggcagggatgccaccctgctccttcggaggacgtgccctcacccctcactggtccactggcttgagactcaccccgtctgcccagtaaaagcctttctgcagcaaaaaaccccc

SEQ ID NO: 1199 - DNA, 466 bp, Homo sapiens
  Genbank Accession No. D00654
cccctttttctgggataagtacatttttggaccaccttgcttattcccttggggactgatcatgattcaccacatttgttctttgcagattattgctcccccagagcggaagtactcagtctggatcgggggctctatcctggcctctctctccaccttccagcagatgtggatcagcaagcctgagtatgatgaggcagggccctccattgtccacaggaagtgcttctaaagtcagaacaggttctccaaggatcccctcgagactactctgttaccagtcatgaaacattaaaacctacaagccttacttctctgtgtggggctcttttttcctgggctatgtctcatacacagtgctaaggacttttcacacattacttttaatccatgcaatagtgctctaaggtaggtgctatcattatacccatattacagatgaggaaattgaggctcagagaagtca

SEQ ID NO: 1200 - DNA, 3388 bp, Homo sapiens
  Genbank Accession No. D10667
aattcggagaacctgctacaggaacagctgcaggcagagacagagctgtatgcagaggctgaggagatgcgggtgcggctggcggccaagaagcaggagctggaggagatactgcatgagatggaggcccgcctggaggaggaggaagacaggggccagcagctacaggctgaaaggaagaagatggcccagcagatgctggaccttgaagaacagctggaggaggaggaagctgccaggcagaagctgcaacttgagaaggtcacggctgaggccaagatcaagaaactggaggatgagatcctggtcatggatgatcagaacaataaactatcaaaagaacgaaaactccttgaggagaggattagtgacttaacgacaaatcttgcagaagaggaagaaaaggccaagaatcttaccaagctgaaaaacaagcatgaatctatgatttcagaactggaagtgcggctaaagaaggaagagaagagccgacaggagctggagaagctgaaacggaagctggagggtgatgccagcgacttccacgagcagatcgctgacctccaggcgcagatcgcagagctcaagatgcagctggccaagaaggaggaggagctgcaggcggccctggccaggcttgacgatgaaatcgctcagaagaacaatgccctgaagaagatccgggagctggagggccacatctcagacctccaggaggacctggactcagagcgggccgccaggaacaaggctgaaaagcagaagcgagacctcggcgaggagctggaggccctaaagacagagctggaagacacactggacagcacagccactcagcaggagctcagggccaagagggagcaggaggtgacggtgctgaagaaggccctggatgaagagacgcggtcccatgaggctcaggtccaggagatgaggcagaaacacgcacaggcggtggaggagctcacagagcagcttgagcagttcaagagggccaaggcgaacctagacaagaataagcagacgctggagaaagagaacgcagacctggccggggagctgcgggtcctgggccaggccaagcaggaggtggaacataagaagaagaagctggaggcgcaggtgcaggagctgcagtccaagtgcagcgatggggagcgggcccgggcggagctcaatgacaaagtccacaagctgcagaatgaagttgagagcgtcacagggatgcttaacgaggccgaggggaaggccattaagctggccaaggacgtggcgtccctcagttcccagctccaggacacccaggagttgcttcaagaagaaacccggcagaagctcaacgtgtctacgaagctgcgccagctggaggaggagcggaacagcctgcaagaccagctggacgaggagatggaggccaagcagaacctggagcgccacatctccactctcaacatccagctctccgactcgaagaagaagctgcaggactttgccagcaccgtggaagctctggaagaggggaagaagaggttccagaaggagatcgagaacctcacccagcagtacgaggagaaggcggccgcttatgataaactggaaaagaccaagaacaggcttcagcaggagctggacgacctggttgttgatttggacaaccagcggcaactcgtgtccaacctggaaaagaagcagaggaaatttgatcagttgttagccgaggagaaaaacatctcttccaaatacgcggatgagagggacagagctgaggcagaagccagggagaaggaaaccaaggccctgtccctggctcgggcccttgaagaggccttggaagccaaagaggaactcgagcggaccaacaaaatgctcaaagccgaaatggaagacctggtcagctccaaggatgacgtgggcaagaacgtccatgagctggagaagtccaagcgggccctggagacccagatggaggagatgaagacgcagctggaagagctggaggacgagctgcaagcctcggaggacgccaaactgcggctggaagtcaacatgcaggcgctcaagggccagttcgaaagggatctccaagcccgggacgagcagaatgaggagaagaggaggcaactgcagagacagcttcacgagtatgagacggaactggaagacgagcgaaacgaacgtgccctggcagctgcagcaaagaagaagctggaaggggacctgaaagacctggagcttcaggccgactctgccatcaaggggagggaggaagccatcaagcagctacgcaaactgcaggctcagatgaaggactttcaaagagagctggaagatgcccgtgcctccagagatgagatctttgccacagccaaagagaatgagaagaaagccaagagcttggaagcagacctcatgcagctacaagaggacctcgccgccgctgagagggctcgcaaacaagcggacctcgagaaggaggaactggcagaggagctggccagtagcctgtcgggaaggaacgcactccaggacgagaagcgccgcctggaggcccggatcgcccagctggaggaggagctggaggaggagcagggcaacatggaggccatgagcgaccgggtccgcaaagccacacagcaggccgagcagctcagcaacgagctggccacagagcgcagcacggcccagaagaatgagagtgcccggcagcagctcgagcggcagaacaaggagctccggagcaagctccacgagatggagggggccgtcaagtccaagttcaagtccaccatcgcggcgctggaggccaagattgcacagctggaggagcaggtcgagcaggaggccagagagaaacaggcagccaccaagtcgctgaagcagaaagacaagaagctgaaggaaatcttgctgcaggtggaggacgagcgcaagatggccgagcagtacaaggagcaggcagagaaaggcaatgccagggtcaagcagctcaagaggcagctggaggaggcagaggaggagtcccagcgcatcaacgccaaccgcaggaagctgcagcgggagctggatgaggccacggagagcaacgaggccatgggccgtgaggtgaacgcactcaagagcaagctcagagggccccccccacaggaaacttcgcagtgatgcaccaggcgaggaaacgagacctctttcgttccttctagaaggtctggaggacgtagagttattgaaaatgcagatggttctgaggaggaactggacactcgagacgcagacttcaatggaaccaaggccagtgaataagcaactttctacagttttgcaccacggcaagaaaaccaaaaaccaaaacaaacaaacaaaaaaaacccaacaacaacccgaacaagac

SEQ ID NO: 1201 - DNA, 2051 bp, Homo sapiens
  Genbank Accession No. D10923
cgccactttgctggagcattcactaggcgaggcgctccatcggactcactagccgcactcatgaatcggcaccatctgcaggatcactttctggaaatagacaagaagaactgctgtgtgttccgagatgacttcattgccaaggtgttgccgccggtgttggggctggagtttatctttgggcttctgggcaatggccttgccctgtggattttctgtttccacctcaagtcctggaaatccagccggattttcctgttcaacctggcagtagctgactttctactgatcatctgcctgccgttcgtgatggactactatgtgcggcgttcagactggaactttggggacatcccttgccggctggtgctcttcatgtttgccatgaaccgccagggcagcatcatcttcctcacggtggtggcggtagacaggtatttccgggtggtccatccccaccacgccctgaacaagatctccaattggacagcagccatcatctcttgccttctgtggggcatcactgttggcctaacagtccacctcctgaagaagaagttgctgatccagaatggccctgcaaatgtgtgcatcagcttcagcatctgccataccttccggtggcacgaagctatgttcctcctggagttcctcctgcccctgggcatcatcctgttctgctcagccagaattatctggagcctgcggcagagacaaatggaccggcatgccaagatcaagagagccatcaccttcatcatggtggtggccatcgtctttgtcatctgcttccttcccagcgtggttgtgcggatccgcatcttctggctcctgcacacttcgggcacgcagaattgtgaagtgtaccgctcggtggacctggcgttctttatcactctcagcttcacctacatgaacagcatgctggaccccgtggtgtactacttctccagcccatcctttcccaacttcttctccactttgatcaaccgctgcctccagaggaagatgacaggtgagccagataataaccgcagcacgagcgtcgagctcacaggggaccccaacaaaaccagaggcgctccagaggcgttaatggccaactccggtgagccatggagcccctcttatctgggcccaacctcaaataaccattccaagaagggacattgtcaccaagaaccagcatctctggagaaacagttgggctgttgcatcgagtaatgtcactggactcggcctaaggtttcctggaacttccagattcagagaatctgatttagggaaactgtggcagatgagtgggagactggttgcaaggtgtgaccacaggaatcctggaggaacagagagtaaagcttctaggcatctgaaacttgcttcatctctgacgctcgcaggactgaagatgggcaaattgtaggcgtttctgctgagcagagttggagccagagatctacttgtgacttgttggccttcttcccacatctgcctcagactggggggggctcagctcctcgggtgatatctagcctgcttgtgagctctagcagggataaggagagctgagattggagggaattgtgttgctcctggaggaagcccaggcatcattaaacaagccagtaggtcacctggcttccgtggaccaattcatctttcagacaagctttagagaaatggactcagggaagagactcacatgctttggttagtatctgtgtttccggtgggtgtaataggggattagccccagaagggactgagctaaacagtgttattatgggaaaggaaatggcattgctgctttcaaccagcgactaatgcaatccattcctctcttgtttatagtaatctaagggttgagcagttaaaacggcttcaggatagaaagctgtttcccacctgtttcgttttaccattaaaagggaaacgtgcctctgccccacgggtagagggggtgcacgttcctcctggttccttcgcttgtgtttctgtacttaccaaaaatctaccacttcaataaattttgataggagacaaaaaaaaaa

SEQ ID NO: 1202 - DNA, 2431 bp, Homo sapiens
  Genbank Accession No. D11139
tatgatcttattttattggctcatgcagtccatttgactcatatttcctcctctcctgccagtcatcaggcccaagttcgtggggacaccagaagtcaaccagaccaccttataccagcgttatgagatcaagatgaccaaggtatcccctgcccccgcctctttcccagcattttctaacatcttcttcctggtcaaaacagaaacttctggccactggttggtgcgagaaagttggctgtgatcttgggatgctatatgacttcagggaagaacctggagtgggaggattatgtcagtaaagagacacttcccctcatccatcaacagatgtataaagggttccaagccttaggggatgccgctgacatccggttcgtctacacccccgccatggagagtgtctgcggatacttccacaggtcccacaaccgcagcgaggagtttctcattgctggtgaggcaccgtcccgcgccctgtgccacaccaacagtccctgggcgcggcctagcaaccacgaggggcgaggctctgatgggaatggtccactggaaatgggaccaccccaatttcagtctatcagaaggccgggcgtttgccagcttggcagctcagccaatcacaagctgcttgtcggtccccgccccgcctttctccttaggaaaactgcaggatggactcttgcacatcactacctgcagtttcgtggctccctggaacagcctgagcttagctcagcgccggggcttcaccaagacctacactgttggctgtgaggaatgcacagtgagtgcctggaccctgacctccaacgggagatccttcccggggccattccctaaatcgtgggcttgtttcttgctccctctggctattctgtgtccctgtggctgctccccaaccctaaggctgtccctgatctctcttgctattcccaagccgagactgctcccttacaaattctggctgctccctttccctgtgtccaataccgtgtgatcgcctgtccctccctggtccctctaattctcccttgtgactattctgtaatcccactcccgttcctgagccccgggattgttttcttggttccccagaatgttctccaagaacccaaagtgctgttccctaatcccactgacccttcctcagcacatctgcttgttgctctgcagctctgactattccagacaccagaggtgttacactgacctcctggctagtccaagcctgttccctgatggctcctgatggcctctgagcccagtgactatcttgaagccccactggctattcctgtgcttaaactccttagccgccaaccggggtggggcccttactactgccagtttttccctgtcctttggacaattccacaggcgacctgcctgactgaccccaggcctattccccagccaccattccaggacactgatttactggcttactgttacctttcaggacccagtgacatttccctcaatgggaggggctgtcctgggctatgtacttaggtggggtgagagcaagtctccccagcgcggctcagtgttgaaagctgaggagaggaagttctgctccacgggggaggcagggagaagccctcagagatgtttccctcctcccttccaggtgtttccctgtttatccatcccctgcaaactgcagagtggcactcattgcttgtggacggaccagctcctccaaggctctgaaaagggcttccagtcccgtcaccttgcctgcctgcctcgggagccagggctgtgcacctggcagtccctgcggtcccagatagcctgaatcctgcccggagtggaactgaagcctgcacagtgtccaccctgttcccactcccatctttcttccggacaatgaaataaagagttaccacccagcagacactgtttctgtgtactgcctgggaacaaacccatgttgctgatgacctggtgtgagcacctgggaccagtgggatgaggatgccaatgttggttatatttacttaatctgatgtactggtagtaattcctcaacattgggattagcactgatgatctgcaacagcagcaatggtcactgaacctgcattatcaaccgtaacctctgaataatttctccagccaatactttaaacattttcctatactgattcctaattgctatttgcccagggctttctagttataaattatcccacagctgacaaatcactgcctgactggaaattccccattcacaatcttgccagctgacagagtcattgacaaatgccctaccaattggcaaatgactatcattgcctcaagcacagtcctgatgttgtccagtgagatgcccatccaaacacatgggtgttactgtcctcatcctcaggtttgtaccatgagtctgacttgagtgaagggacccaggcacccagagtcccac

SEQ ID NO: 1203 - DNA, 4187 bp, Homo sapiens
  Genbank Accession No. D13643
ggcgcgaacccgcagcgcttaccgcgcggcgccgcaccatggagcccgccgtgtcgctggccgtgtgcgcgctgctcttcctgctgtgggtgcgcctgaaggggctggagttcgtgctcatccaccagcgctgggtgttcgtgtgcctcttcctcctgccgctctcgcttatcttcgatatctactactacgtgcgcgcctgggtggtgttcaagctcagcagcgctccgcgcctgcacgagcagcgcgtgcgggacatccagaagcaggtgcgggaatggaaggagcagggtagcaagaccttcatgtgcacggggcgccctggctggctcactgtctcactacgtgtcgggaagtacaagaagacacacaaaaacatcatgatcaacctgatggacattctggaagtggacaccaagaaacagattgtccgtgtggagcccttggtgaccatgggccaggtgactgccctgctgacctccattggctggactctccccgtgttgcctgagcttgatgacctcacagtggggggcttgatcatgggcacaggcatcgagtcatcatcccacaagtacggcctgttccaacacatctgcactgcttacgagctggtcctggctgatggcagctttgtgcgatgcactccgtccgaaaactcagacctgttctatgccgtaccctggtcctgtgggacgctgggtttcctggtggccgctgagatccgcatcatccctgccaagaagtacgtcaagctgcgtttcgagccagtgcggggcctggaggctatctgtgccaagttcacccacgagtcccagcggcaggagaaccacttcgtggaagggctgctctactccctggatgaggctgtcattatgacaggggtcatgacagatgaggcagagcccagcaagctgaatagcattggcaattactacaagccgtggttctttaagcatgtggagaactatctgaagacaaaccgagagggcctggagtacattcccttgagacactactaccaccgccacacgcgcagcatcttctgggagctccaggacatcatcccctttggcaacaaccccatcttccgctacctctttggctggatggtgcctcccaagatctccctcctgaagctgacccagggtgagaccctgcgcaagctgtacgagcagcaccacgtggtgcaggacatgctggtgcccatgaagtgcctgcagcaggccctgcacaccttccaaaacgacatccacgtctaccccatctggctgtgtccgttcatcctgcccagccagccaggcctagtgcaccccaaaggaaatgaggcagagctctacatcgacattggagcatatggggagccgcgtgtgaaacactttgaagccaggtcctgcatgaggcagctggagaagtttgtccgcagcgtgcatggcttccagatgctgtatgccgactgctacatgaaccgggaggagttctgggagatgtttgatggctccttgtaccacaagctgcgagagaagctgggttgccaggacgccttccccgaggtgtacgacaagatctgcaaggccgccaggcactgagctggagcccgcctggagagacagacacgtgtgagtggtcaggcatcttcccttcactcaagcttggctgctttcctagatccacactttcaaagagaaacccctccagaactcccaccctgacagcccaacaccaccttcctcctggcttccagggggcagcccagtggaatggaaagaatgtgggatttggagtcagacaagcctgagtccagttccccgtttagaactcattagctgtgtgactctgggtgagtcccttaacccctctgagcccgggtctcttcattagttgaaagggatagtaatacctacttgcaggttgttgtcatctgagttgagcactggtcacattgaaggtgctgggtaagtggtagctcttgttgcttcccgttcagcgtcacatctgcagtggagcctgaaaaggctccacattaggtcacctgtgcacagccatggctggaatgatgaaggggatacgctggagttgccctgccatcgcctccatcagccagacgaggtcctcacaggagaaggacagctcttccccaccctgggatctcaggagggcagccacggagtggggaggccccagatgcgctgtgccaaagccaggtccgaggccaaagttctccctgccatccttggtgccgtcctgccccttcctccttcatgcctgggcctgcaggcccaccccagccaccactgagtccactcggagtgccctgtgttcctggagaaggcattccagggttgaatcttgtcccagcctcagcctgggacacctaggtggagagagtggtctccgctctgaattggatccaggggacctgggctcattcttcttggctcaccaaccctgcaggcctcatctttcccaaaacccactttgtcttggtgggagtgggtccgcgctgctctgcagcaggggctggggagtggacagcatcaggtgggaaagtggagtccaccctcatgtttctgtaggattctcaccgtggggctggaagaaaagagcatcgacttgatttctccaaccactcatccctctttttctttcttccaccactccccaccccagctgtagttaatttcagtgccttacaaatcctaagctcagagaaagttccatttccgttccagagggaagggaacctccctaggtccttccctggcttgttataacgcaaagcttggttgtttatgcaactctatcttaagaactgcccagcctcagctgaaaacccgaatctgagaaggaattgcgtcatgtaagggaagctggaattaagggagctgagccagtcatggttgtggcgtgtgagtcaggagacctaggtttcagcccctctctactgtcagcgagctgtgcaacgtgggcaagtcattgtcctctgagctgcagtttcctcatctgtcacatcgctacagacaagacctccctggaacccttctgattgtcttagacactgtggttgcaaaacccacggaaagcctcatttgtgtggaaagtcagaggaaaaatgatccagtggacacttggggattatctgtcattcaagatccttccttcaaccccaaggccagctcccatctcatttccagaaaggctcatacctggcttgcagggaagcatctgtcttgtcattccaggtgccagaatcctctcagagtcattgaagggtgttcacccatcccacccaaggcttggcacactgccagtgtcttagcagggtcttgtgagggctgggggcatccaggcactcagaaggcaaaggaaccaccctacccatttggcctctggagggggcagaagaaagaaagaaacctcatcctatattttacaaagcatgtgaattctggcattagctctcataggagacccatgtgcttccttgctcagtgcaaaactgatgattctacttgctgtagatgaatggttaacacgagctagttaaacagtgccattgttttgccagtgaagcctccaaccctaagccactgggacggtggccagagatgccagcagcctctgtcgcccttagtcatataaccaaaatccagaccttatccacaacccggggcttggaaaggaaggtattttggaatcacaccctccggttatgttgctccagtaaaatcttgcctggaaagaggcagtcttcttagcatggtgagctgagttcatggcttttttttgtagccagtcctgtccctggccatccatgtgatggttttggatggagttaaacttgatgccagtgggcagtgcatgtggaaagtatcagagtaagcctctcccctccagagccctgagtttcttggctgcatgaaggttttctttagaatcagaattgtagccagtttctttggccagaaggatgaatacttggatattactgaaagggaggggtggagatgggtgtggcagtgtatggtgtgtgatttttattttcttctttggtcatgggggccaaggagaaaggcatgaatcttccctgtcaggctcttacagccacaggcactgtgtctactgtctggaagacatgtccccgtggctgtggggccgctgcttctgtttaaataaaagtggcctgg

SEQ ID NO: 1204 - DNA, 3213 bp, Homo sapiens
  Genbank Accession No. D13666
agagactcaagatgattccctttttacccatgttttctctactattgctgcttattgttaaccctataaacgccaacaatcattatgacaagatcttggctcatagtcgtatcaggggtcgggaccaaggcccaaatgtctgtgcccttcaacagattttgggcaccaaaaagaaatacttcagcacttgtaagaactggtataaaaagtccatctgtggacagaaaacgactgttttatatgaatgttgccctggttatatgagaatggaaggaatgaaaggctgcccagcagttttgcccattgaccatgtttatggcactctgggcatcgtgggagccaccacaacgcagcgctattctgacgcctcaaaactgagggaggagatcgagggaaagggatccttcacttactttgcaccgagtaatgaggcttgggacaacttggattctgatatccgtagaggtttggagagcaacgtgaatgttgaattactgaatgctttacatagtcacatgattaataagagaatgttgaccaaggacttaaaaaatggcatgattattccttcaatgtataacaatttggggcttttcattaaccattatcctaatggggttgtcactgttaattgtgctcgaatcatccatgggaaccagattgcaacaaatggtgttgtccatgtcattgaccgtgtgcttacacaaattggtacctcaattcaagacttcattgaagcagaagatgacctttcatcttttagagcagctgccatcacatcggacatattggaggcccttggaagagacggtcacttcacactctttgctcccaccaatgaggcttttgagaaacttccacgaggtgtcctagaaaggttcatgggagacaaagtggcttccgaagctcttatgaagtaccacatcttaaatactctccagtgttctgagtctattatgggaggagcagtctttgagacgctggaaggaaatacaattgagataggatgtgacggtgacagtataacagtaaatggaatcaaaatggtgaacaaaaaggatattgtgacaaataatggtgtgatccatttgattgatcaggtcctaattcctgattctgccaaacaagttattgagctggctggaaaacagcaaaccaccttcacggatcttgtggcccaattaggcttggcatctgctctgaggccagatggagaatacactttgctggcacctgtgaataatgcattttctgatgatactctcagcatggttcagcgcctccttaaattaattctgcagaatcacatattgaaagtaaaagttggccttaatgagctttacaacgggcaaatactggaaaccatcggaggcaaacagctcagagtcttcgtatatcgtacagctgtctgcattgaaaattcatgcatggagaaagggagtaagcaagggagaaacggtgcgattcacatattccgcgagatcatcaagccagcagagaaatccctccatgaaaagttaaaacaagataagcgctttagcaccttcctcagcctacttgaagctgcagacttgaaagagctcctgacacaacctggagactggacattatttgtgccaaccaatgatgcttttaagggaatgactagtgaagaaaaagaaattctgatacgggacaaaaatgctcttcaaaacatcattctttatcacctgacaccaggagttttcattggaaaaggatttgaacctggtgttactaacattttaaagaccacacaaggaagcaaaatctttctgaaagaagtaaatgatacacttctggtgaatgaattgaaatcaaaagaatctgacatcatgacaacaaatggtgtaattcatgttgtagataaactcctctatccagcagacacacctgttggaaatgatcaactgctggaaatacttaataaattaatcaaatacatccaaattaagtttgttcgtggtagcaccttcaaagaaatccccgtgactgtctatacaactaaaattataaccaaagttgtggaaccaaaaattaaagtgattgaaggcagtcttcagcctattatcaaaactgaaggacccacactaacaaaagtcaaaattgaaggtgaacctgaattcagactgattaaagaaggtgaaacaataactgaagtgatccatggagagccaattattaaaaaatacaccaaaatcattgatggagtgcctgtggaaataactgaaaaagagacacgagaagaacgaatcattacaggtcctgaaataaaatacactaggatttctactggaggtggagaaacagaagaaactctgaagaaattgttacaagaagaggtcaccaaggtcaccaaattcattgaaggtggtgatggtcatttatttgaagatgaagaaattaaaagactgcttcagggagacacacccgtgaggaagttgcaagccaacaaaaaagttcaaggttctagaagacgattaagggaaggtcgttctcagtgaaaatccaaaaaccagaaaaaaatgtttatacaaccctaagtcaataacctgaccttagaaaattgtgagagccaagttgacttcaggaactgaaacatcagcacaaagaagcaatcatcaaataattctgaacacaaatttaatatttttttttctgaatgagaaacatgagggaaattgtggagttagcctcctgtggtaaaggaattgaagaaaatataacaccttacaccctttttcatcttgacattaaaagttctggctaactttggaatccattagagaaaaatccttgtcaccagattcattacaattcaaatcgaagagttgtgaactgttatcccattgaaaagaccgagccttgtatgtatgttatggatacataaaatgcacgcaagccattatctctccatgggaagctaagttataaaaataggtgcttggtgtacaaaactttttatatcaaaaggctttgcacatttctatatgagtgggtttactggtaaattatgttattttttacaactaattttgtactctcagaatgtttgtcatatgcttcttgcaatgcatattttttaatctcaaacgtttcaataaaaccatttttcagatataaagagaattacttcaaattgagtaattcagaaaaactcaagatttaagttaaaaagtggtttggacttgggaa

SEQ ID NO: 1205 - DNA, 1301 bp, Homo sapiens
  Genbank Accession No. D14520
gggcacgcgcaccaccgcccgcagcgcagcccgcgcccgcgcaggccccgcagccggcccagcccgccgccaccggccgcggctgcctccagaggacctggtccagacaagatgtgaaatggagaagtatctgacacctcagcttcctccagttcctataattccagagcataaaaagtatagacgagacagtgcctcagtcgtagaccagttcttcactgacactgaagggttaccttacagtatcaacatgaacgtcttcctccctgacatcactcacctgagaactggcctctacaaatcccagagaccgtgcgtaacacacatcaagacagaacctgttgccattttcagccaccagagtgaaacgactgcccctctccggccccgacccaggccctccctgagttcaccagtatattcagctcacaccagaccgcagctccagaggtgaacaatattttcatcaaacaagaacttcctacaccagatcttcatctttctgtccctacccagcagggccacctgtaccagctactgaatacaccggatctagatatgcccagttctacaaatcagacagcagcaatggacactcttaatgtttctatgtcagctgccatggcaggccttaacacacacacctctgctgttccgcagactgcagtgaaacaattccagggcatgcccccttgcacatacacaatgccaagtcagtttcttccacaacaggccacttactttcccccgtcaccaccaagctcagagcctggaagtccagatagacaagcagagatgctccagaatttaaccccacctccatcctatgctgctacaattgcttctaaactggcaattcacaatccaaatttacccaccaccctgccagttaactcacaaaacatccaacctgtcagatacaatagaaggagtaaccccgatttggagaaacgacgcatccactactgcgattaccctggttgcacaaaagtttataccaagtcttctcatttaaaagctcacctgaggactcacactggtgaaaagccatacaagtgtacctgggaaggctgcgactggaggttcgcgcgatcggatgagctgacccgccactaccggaagcacacaggcgccaagcccttccagtgcggggtgtgcaaccgcagcttctcgcgctctgaccacctggccctgcatatgaagaggcaccagaactgagcactgcccgtgtgacccgttccaggtcccctgggctccctcaaatgacagacctaactattcctgtgtaaaaacaacaaccc

SEQ ID NO: 1206 - DNA, 1857 bp, Homo sapiens
  Genbank Accession No. D14710
ttttgtcccagtcagtccggaggctgcggctgcagaagtaccgcctgcggagtaactgcaaagatgctgtccgtgcgcgttgctgcggccgtggtccgcgcccttcctcggcgggccggactggtctccagaaatgctttgggttcatctttcattgctgcaaggaacttccatgcctctaacactcatcttcaaaagactgggactgctgagatgtcctctattcttgaagagcgtattcttggagctgatacctctgttgatcttgaagaaactgggcgtgtcttaagtattggtgatggtattgcccgcgtacatgggctgaggaatgttcaagcagaagaaatggtagagttttcttcaggcttaaagggtatgtccttgaacttggaacctgacaatgttggtgttgtcgtgtttggaaatgataaactaattaaggaaggagatatagtgaagaggacaggagccattgtggacgttccagttggtgaggagctgttgggtcgtgtagttgatgcccttggtaatgctattgatggaaagggtccaattggttccaagacgcgtaggcgagttggtctgaaagcccccggtatcattcctcgaatttcagtgcgggaaccaatgcagactggcattaaggctgtggatagcttggtgccaattggtcgtggtcagcgtgaactgattattggtgaccgacagactgggaaaacctcaattgctattgacacaatcattaaccagaaacgtttcaatgatggatctgatgaaaagaagaagctgtactgtatttatgttgctattggtcaaaagagatccactgttgcccagttggtgaagagacttacagatgcagatgccatgaagtacaccattgtggtgtcggctacggcctcggatgctgccccacttcagtacctggctccttactctggctgttccatgggagagtattttagagacaatggcaaacatgctttgatcatctatgacgacttatccaaacaggctgttgcttaccgtcagatgtctctgttgctccgccgaccccctggtcgtgaggcctatcctggtgatgtgttctacctacactcccggttgctggagagagcagccaaaatgaacgatgcttttggtggtggctccttgactgctttgccagtcatagaaacacaggctggtgatgtgtctgcttacattccaacaaatgtcatttccatcactgacggacagatcttcttggaaacagaattgttctacaaaggtatccgccctgcaattaacgttggtctgtctgtatctcgtgtcggatccgctgcccaaaccagggctatgaagcaggtagcaggtaccatgaagctggaattggctcagtatcgtgaggttgctgcttttgcccagttcggttctgacctcgatgctgccactcaacaacttttgagtcgtggcgtgcgtctaactgagttgctgaagcaaggacagtattctcccatggctattgaagaacaagtggctgttatctatgcgggtgtaaggggatatcttgataaactggagcccagcaagattacaaagtttgagaatgctttcttgtctcatgtcgtcagccagcaccaagccttgttgggcactatcagggctgatggaaagatctcagaacaatcagatgcaaagctgaaagagattgtaacaaatttcttggctggatttgaagcttaaactcctgtggattcacatcaaataccagttcagttttgtcattgttctagtaaattagttccatttgtaaaagggttactctcatactccttatgtacagaaatcacatgaaaaataaaggttccataatgc

SEQ ID NO: 1207 - DNA, 2493 bp, Homo sapiens
  Genbank Accession No. D16217
acattggtaaggtgttttcccccattgaaactaatattttctattttcaagaaaaaagcagcaagcctcggcagcagtcaatcctccagaacctatgctggtggaacagcctcggccaccaaggtgtcagcttcctctggtgcaaccagcaagtcttccagtatgaatcccacagaaaccaaggccattccagtcagccaacagatggaaggaccacatcttcctaacaagaaaaaacacaaaaaacaggctgtaaaaacagaacctgagaagaagtcacagtcaaccaagctgtctgtggttcatgagaaaaaatcccaagaaggaaagccaaaagaacacacagagccaaaaagcctacccaagcaggcatcagatacaggaagtaacgatgctcacaataaaaaagcagtttccagatcagctgaacagcagccatcagagaaatcaacagaaccaaagactaaaccacaagacatgatttctgctggtggagagagtgttgctggtatcactgcaatatctggcaagccgggtgacaagaaaaaagaaaagaaatcattaaccccagctgtgccagttgaatctaaaccggataaaccatcgggaaagtcaggcatggatgctgctttggatgacttaatagatactttaggaggacctgaagaaactgaagaagaaaatacaacgtatactggaccagaagtttcagatccaatgagttccacctacatagaggaattgggtaaaagagaagtcacaattcctccaaaatatagggaactattggctaaaaaggaagggatcacagggcctcctgcagactcttcaaaacccatagggccagatgatgctatagacgccttgtcatctgacttcacctgtgggtcgcctacagctgctggaaagaaaactgaaaaagaggaatctacagaagttttaaaagctcagtcagcagggacagtcagaagtgctgctccaccccaagagaagaaaagaaaggtggagaaggatacaatgagtgatcaagcactcgaggctctgtcggcttcactgggcacccggcaagcagaacctgagctcgacctccgctcaattaaggaagtcgatgaggcaaaagctaaagaagaaaaactagagaagtgtggtgaggatgatgaaacaatcccatctgagtacagattaaaaccagccacggataaagatggaaaaccactattgccagagcctgaagaaaaacccaagcctcggagtgaatcagaactcattgatgaactttcagaagattttgaccggtctgaatgtaaagagaaaccatctaagccaactgaaaagacagaagaatctaaggccgctgctccagctcctgtgtcggaggctgtgtctcggacctccatgtgtagtatacagtcagcaccccctgagccggctaccttgaagggcacagtgccagatgatgctgtagaagccttggctgatagcctggggaaaaaggaagcagatccagaagatggaaaacctgtgatggataaagtcaaggagaaggccaaagaagaagaccgtgaaaagcttggtgaaaaagaagaaacaattcctcctgattatagattagaagaggtcaaggataaagatggaaagccactcctgccaaaagagtctaaggaacagcttccacccatgagtgaagacttccttctggatgctttgtctgaggacttctctggtccacaaaatgcttcatctcttaaatttgaagatgctaaacttgctgctgccatctctgaagtggtttcccaaaccccagcttcaacgacccaagctggagccccaccccgtgatacctcgcagagtgacaaagacctcgatgatgccttggataaactctctgacagtctaggacaaaggcagcctgacccagatgagaacaaaccaatgggagataaagtaaaggaaaaagctaaagctgaacatagagacaagcttggagaaagagatgacactatcccacctgaatacagacatctcctggatgataatggacaggacaaaccagtgaagccacctacaaagaaatcagaggattcaaagaaacctgcagatgaccaagaccccattgatgctctctcaggagatctggacagctgtccctccactacagaaacctcacagaacacagcaaaggataagtgcaagaaggctgcttccagctccaaagcacctaagaatggaggtaaagcgaaggattcagcaaagacaacagaggaaacttccaagccaaaagatgactaaagaaatacaagttaaggtatctggtatctgcatgtaaaatcttcagctggtggatggtgacttttgaagaacaaaaggctttggcaacagaaaacaattgttctgggtgatttctagaatggtttttgttgagtctctgaacatcctaaatattggtttgttattctttccagaaagaaaatgaatttgactggttcggaattc

SEQ ID NO: 1208 - DNA, 664 bp, Homo sapiens
  Genbank Accession No. D16532
tcttttccacagatatcagttgtaagcacagatgatgatctagcttgacttctgtgacaaatgttgacctttgaggtctaaacaaataatacccccgtcggaatggaaccgagccagcagctgaagtctctttttcttcctctcggctggaagaacatcaagatacctttgcgtggatcaagcttgtgtacttgaccgtttttatattacttttgtaaatattcttgtccacattctacttcagctttggatgtggttaccgagtatctgtaacccttgaatttctagacagtattgccacctctggccaaatatgcactttccctagaaagccatattccagcagtgaaacttgtgctatagtgtataccacctgtacatacattgtataggccatctgtaaatatcccagagaacaatcactattcttaagcactttgaaaatatttctatgtaaattattgtaaactttttcaatggttgggacaatggcaataggacaaaacgggttactaagatgaaattgccaaaaaaatttataaactaattttgtacgtatgaatgatatctttgacctcaatggaggtttgcaaagactgagtgttcaaactactgtacattttttttcaagtgctaaaaaattaaaccaagcagcttaaccatg

SEQ ID NO: 1209 - DNA, 1517 bp, Homo sapiens
  Genbank Accession No. D17408
aggagggaagagtgtgcagacggaacttcagccgctgcctctgttctcagcgtcagtgccgccactgcccccgccagagcccaccggccagcatgtcctctgctcacttcaaccgaggccctgcctacgggctgtcagccgaggttaagaacaagctggcccagaagtatgaccaccagcgggagcaggagctgagagagtggatcgagggggtgacaggccgtcgcatcggcaacaacttcatggacggcctcaaagatggcatcattctttgcgaattcatcaataagctgcagccaggctccgtgaagaagatcaatgagtcaacccaaaattggcaccagctggagaacatcggcaacttcatcaaggccatcaccaagtatggggtgaagccccacgacatttttgaggccaacgacctgtttgagaacaccaaccatacacaggtgcagtccaccctcctggctttggccagcatggcgaagacgaaaggaaacaaggtgaacgtgggagtgaagtacgcagagaagcaggagcggaaattcgagccggggaagctaagagaagggcggaacatcattgggctgcagatgggcaccaacaagtttgccagccagcagggcatgacggcctatggcacccggcgccacctctacgaccccaagctgggcacagaccagcctctggaccaggcgaccatcagcctgcagatgggcaccaacaaaggagccagccaggctggcatgactgcgccagggaccaagcggcagatcttcgagccggggctgggcatggagcactgcgacacgctcaatgtcagcctgcagatgggcagcaacaagggcgcctcgcagcggggcatgacggtgtatgggctgccacgccaggtctacgaccccaagtactgtctgactcccgagtacccagagctgggtgagcccgcccacaaccaccacgcacacaactactacaattccgcctagggccacaaggccttccctgttttccccccaagggaggctgctgctgctcttggctggacccagccagggcccaagccgacccccctctccctgcatggcatcctccagcccctgtagaactcaacctctacagggttagagtttggagagagcagactggcggggggcccattggggggaaggggaccctccgctctgtagtgctacagggtccaacatagagccgggtgtccccaacagcgcccaaaggacgcactgagcaacgctattccagctgtccccccactccctcacaagtgggtacccccaggaccagaagctcccccagcaaagcccccagagcccaggctcggcctgcccccaccccattcccgcagtgggagcaaactgcatgcccagagacccagcggacacacgcggtttggtttgcagcgactggcatactatgtggatgtgacagtggcgtttgtaatgagagcactttcttttttttctatttcactggagcacaataaatggctgtaaaatctc

SEQ ID NO: 1210 - DNA, 3661 bp, Homo sapiens
  Genbank Accession No. D21254
cgcggagagatgccgcgggggccgctcgcagccgccgctgacttgtgaatgggaccgggactggggccgggactgacaccgcagcgcttgccctgcgccagggactggcggctcggaggttgcgtccaccctcaagggccccagaaatcactgtgttttcagctcagcggccctgtgacattccttcgtgttgtcatttgttgagtgaccaatcagatgggtggagtgtgttacagaaattggcagcaagtatccaatgggtgaagaagaagctaactggggacgtgggcagccctgacgtgatgagctcaaccagcagagacattccatcccaagagaggtctgcgtgacgcgtccgggaggccaccctcagcaagaccaccgtacagttggtggaaggggtgacagctgcattctcctgtgcctaccacgtaaccaaaaatgaaggagaactactgtttacaagccgccctggtgtgcctgggcatgctgtgccacagccatgcctttgccccagagcggcgggggcacctgcggccctccttccatgggcaccatgagaagggcaaggaggggcaggtgctacagcgctccaagcgtggctgggtctggaaccagttcttcgtgatagaggagtacaccgggcctgaccccgtgcttgtgggcaggcttcattcagatattgactctggtgatgggaacattaaatacattctctcaggggaaggagctggaaccatttttgtgattgatgacaaatcagggaacattcatgccaccaagacgttggatcgagaagagagagcccagtacacgttgatggctcaggcggtggacagggacaccaatcggccactggagccaccgtcggaattcattgtcaaggtccaggacattaatgacaaccctccggagttcctgcacgagacctatcatgccaacgtgcctgagaggtccaatgtgggaacgtcagtaatccaggtgacagcttcagatgcagatgaccccacttatggaaatagcgccaagttagtgtacagtatcctcgaaggacaaccctatttttcggtggaagcacagacaggtatcatcagaacagccctacccaacatggacagggaggccaaggaggagtaccacgtggtgatccaggccaaggacatgggtggacatatgggcggactctcagggacaaccaaagtgacgatcacactgaccgatgtcaatgacaacccaccaaagtttccgcagagcgtataccagatatctgtgtcagaagcagccgtccctggggaggaagtaggaagagtgaaagctaaagatccagacattggagaaaatggcttagtcacatacaatattgttgatggagatggtatggaatcgtttgaaatcacaacggactatgaaacacaggagggggtgataaagctgaaaaagcctgtagattttgaaaccaaaagagcctatagcttgaaggtagaggcagccaacgtgcacatcgacccgaagtttatcagcaatggccctttcaaggacactgtgaccgtcaagatcgcagtagaagatgctgatgagccccctatgttcttggccccaagttacatccacgaagtccaagaaaatgcagctgctggcaccgtggttgggagagtgcatgccaaagaccctgatgctgccaacagcccgataaggtattccatcgatcgtcacactgacctcgacagatttttcactattaatccagaggatggttttattaaaactacaaaacctctggatagagaggaaacagcctggctcaacatcactgtctttgcagcagaaatccacaatcggcatcaggaagccaaagtcccagtggccattagggtccttgatgtcaacgataatgctcccaagtttgctgccccttatgaaggtttcatctgtgagagtgatcagaccaagccactttccaaccagccaattgttacaattagtgcagatgacaaggatgacacggccaatggaccaagatttatcttcagcctaccccctgaaatcattcacaatccaaatttcacagtcagagacaaccgagataacacagcaggcgtgtacgcccggcgtggagggttcagtcggcagaagcaggacttgtaccttctgcccatagtgatcagcgatggcggcatcccgcccatgagtagcaccaacaccctcaccatcaaagtctgcgggtgcgacgtgaacggggcactgctctcctgcaacgcagaggcctacattctgaacgccggcctgagcacaggcgccctgatcgccatcctcgcctgcatcgtcattctcctggtcattgtagtattgtttgtgaccctgagaaggcaaaagaaagaaccactcattgtctttgaggaagaagatgtccgtgagaacatcattacttatgatgatgaagggggtggggaagaagacacagaagcctttgatattgccaccctccagaatcctgatggtatcaatggatttatcccccgcaaagacatcaaacctgagtatcagtacatgcctagacctgggctccggccagcgcccaacagcgtggatgtcgatgacttcatcaacacgagaatacaggaggcagacaatgaccccacggctcctccttatgactccattcaaatctacggttatgaaggcaggggctcagtggccgggtccctgagctccctagagtcggccaccacagattcagacttggactatgattatctacagaactggggacctcgttttaagaaactagcagatttgtatggttccaaagacacttttgatgacgattcttaacaataacgatacaaatttggccttaagaactgtgtctggcgttctcaagaatctagaagatgtgtaaacaggtatttttttaaatcaaggaaaggctcatttaaaacaggcaaagttttacagagaggatacatttaataaaactgcgaggacatcaaagtggtaaatactgtgaaataccttttctcacaaaaaggcaaatattgaagttgtttatcaacttcgctagaaaaaaaaaacacttggcatacaaaatatttaagtgaaggagaagtctaacgctgaactgacaatgaagggaaattgtttatgtgttatgaacatccaagtctttcttcttttttaagttgtcaaagaagcttccacaaaattagaaaggacaacagttctgagctgtaatttcgccttaaactctggacactctatatgtagtgcatttttaaacttgaaatatataatattcagccagcttaaacccatacaatgtatgtacaatacaatgtacaattatgtctcttgagcatcaatcttgttactgctgattcttgtaaatctttttgcttctactttcatcttaaactaatacgtgccagatataactgtcttgtttcagtgagagacgccctatttctatgtcatttttaatgtatctatttgtacaattttaaagttcttattttagtatacatataaatatcagtattctgacatgtaagaaaatgttacggcatcacacttatattttatgaacattgtactgttgctttaatatgagcttcaatataagaagcaatctttgaaataaaaaaagatttttttttaaaaaaaa

SEQ ID NO: 1211 - DNA, 3867 bp, Homo sapiens
  Genbank Accession No. D21255
acaggcccgcgacgctcccctcagctggcggcggccgcggagagatgccgcgggggccgctcgcagccgccgctgacttgtgaatgggaccgggactggggccgggactgacaccgcagcgcttgccctgcgccagggactggcggctcggaggttgcgtccaccctcaagggccccagaaatcactgtgttttcagctcagcggccctgtgacattccttcgtgttgtcatttgttgagtgaccaatcagatgggtggagtgtgttacagaaattggcagcaagtatccaatgggtgaagaagaagctaactggggacgtgggcagccctgacgtgatgagctcaaccagcagagacattccatcccaagagaggtctgcgtgacgcgtccgggaggccaccctcagcaagaccaccgtacagttggtggaaggggtgacagctgcattctcctgtgcctaccacgtaaccaaaaatgaaggagaactactgtttacaagccgccctggtgtgcctgggcatgctgtgccacagccatgcctttgccccagagcggcgggggcacctgcggccctccttccatgggcaccatgagaagggcaaggaggggcaggtgctacagcgctccaagcgtggctgggtctggaaccagttcttcgtgatagaggagtacaccgggcctgaccccgtgcttgtgggcaggcttcattcagatattgactctggtgatgggaacattaaatacattctctcaggggaaggagctggaaccatttttgtgattgatgacaaatcagggaacattcatgccaccaagacgttggatcgagaagagagagcccagtacacgttgatggctcaggcggtggacagggacaccaatcggccactggagccaccgtcggaattcattgtcaaggtccaggacattaatgacaaccctccggagttcctgcacgagacctatcatgccaacgtgcctgagaggtccaatgtgggaacgtcagtaatccaggtgacagcttcagatgcagatgaccccacttatggaaatagcgccaagttagtgtacagtatcctcgaaggacaaccctatttttcggtggaagcacagacaggtatcatcagaacagccctacccaacatggacagggaggccaaggaggagtaccacgtggtgatccaggccaaggacatgggtggacatatgggcggactctcagggacaaccaaagtgacgatcacactgaccgatgtcaatgacaacccaccaaagtttccgcagagcgtataccagatatctgtgtcagaagcagccgtccctggggaggaagtaggaagagtgaaagctaaagatccagacattggagaaaatggcttagtcacatacaatattgttgatggagatggtatggaatcgtttgaaatcacaacggactatgaaacacaggagggggtgataaagctgaaaaagcctgtagattttgaaaccaaaagagcctatagcttgaaggtagaggcagccaacgtgcacatcgacccgaagtttatcagcaatggccctttcaaggacactgtgaccgtcaagatcgcagtagaagatgctgatgagccccctatgttcttggccccaagttacatccacgaagtccaagaaaatgcagctgctggcaccgtggttgggagagtgcatgccaaagaccctgatgctgccaacagcccgataaggtattccatcgatcgtcacactgacctcgacagatttttcactattaatccagaggatggttttattaaaactacaaaacctctggatagagaggaaacagcctggctcaacatcactgtctttgcagcagaaatccacaatcggcatcaggaagccaaagtcccagtggccattagggtccttgatgtcaacgataatgctcccaagtttgctgccccttatgaaggtttcatctgtgagagtgatcagaccaagccactttccaaccagccaattgttacaattagtgcagatgacaaggatgacacggccaatggaccaagatttatcttcagcctaccccctgaaatcattcacaatccaaatttcacagtcagagacaaccgagataacacagcaggcgtgtacgcccggcgtggagggttcagtcggcagaagcaggacttgtaccttctgcccatagtgatcagcgatggcggcatcccgcccatgagtagcaccaacaccctcaccatcaaagtctgcgggtgcgacgtgaacggggcactgctctcctgcaacgcagaggcctacattctgaacgccggcctgagcacaggcgccctgatcgccatcctcgcctgcatcgtcattctcctgggttgcccaagcttaatggaacccccctctcccagggaagacatgagattgctttatctgggcttccagctgatgctattttcctatgttaaagtaaacagaagattttgtcttctgggggtctttataaaacttcctttcctctatgtggtggctacagagagtccaaccacacttacgtcattgtagtattgtttgtgaccctgagaaggcaaaagaaagaaccactcattgtctttgaggaagaagatgtccgtgagaacatcattacttatgatgatgaagggggtggggaagaagacacagaagcctttgatattgccaccctccagaatcctgatggtatcaatggatttatcccccgcaaagacatcaaacctgagtatcagtacatgcctagacctgggctccggccagcgcccaacagcgtggatgtcgatgacttcatcaacacgagaatacaggaggcagacaatgaccccacggctcctccttatgactccattcaaatctacggttatgaaggcaggggctcagtggccgggtccctgagctccctagagtcggccaccacagattcagacttggactatgattatctacagaactggggacctcgttttaagaaactagcagatttgtatggttccaaagacacttttgatgacgattcttaacaataacgatacaaatttggccttaagaactgtgtctggcgttctcaagaatctagaagatgtgtaaacaggtatttttttaaatcaaggaaaggctcatttaaaacaggcaaagttttacagagaggatacatttaataaaactgcgaggacatcaaagtggtaaatactgtgaaataccttttctcacaaaaaggcaaatattgaagttgtttatcaacttcgctagaaaaaaaaaacacttggcatacaaaatatttaagtgaaggagaagtctaacgctgaactgacaatgaagggaaattgtttatgtgttatgaacatccaagtctttcttcttttttaagttgtcaaagaagcttccacaaaattagaaaggacaacagttctgagctgtaatttcgccttaaactctggacactctatatgtagtgcatttttaaacttgaaatatataatattcagccagcttaaacccatacaatgtatgtacaatacaatgtacaattatgtctcttgagcatcaatcttgttactgctgattcttgtaaatctttttgcttctactttcatcttaaactaatacgtgccagatataactgtcttgtttcagtgagagacgccctatttctatgtcatttttaatgtatctatttgtacaattttaaagttcttattttagtatacatataaatatcagtattctgacatgtaagaaaatgttacggcatcacacttatattttatgaacattgtactgttgctttaatatgagcttcaatataagaagcaatctttgaaataaaaaaagattttttttt

SEQ ID NO: 1212 - DNA, 10524 bp, Homo sapiens
  Genbank Accession No. D26350
cttccagctcccgccggcgctgtgacggccgagcggtcgcagagcagggagtggacacgaggtgggagcggagagggaaggaggaggaggaggagcaaaggtgttggagagaaaacttcagaaaggaacaggaaacctgccggggagcgggcggcggctgcggcttctctgggcgcctgggctgcctcttcgcggggtgtcccgagctggcgcttggccccggtctggcttccccggcgcgcaccacggctgagcgcgacgctcagtggctcgggccgtgcctccgccgtggctcttggccgctgtagtcccgcgatccgatccgcttctgccgcggcggctccctggagagagggcggcgagggcgcagggaagaagagggacgtccactgtggaacatgaagcagcatgaagcagcatgactgagaaaatgtccagcttcctctacataggggacatcgtgtccctgtacgcggagggctcggtcaacggcttcatcagcaccttggggttagtggatgacagatgtgtggtgcacccagaggccggggaccttgccaaccctcccaagaagttcagagactgccttttcaaggtgtgccctatgaacagatattctgcccagaagcaatattggaaagcaaagcaagccaaacaagggaaccacaccgaggcagccttgctgaagaaactacagcacgctgcagaactggaacaaaaacaaaatgaatcggagaataagaaactgttgggagaaattgtaaaatacagtaatgttatacaactactgcatataaaaagcaacaaatatcttactgtcaacaagagattacctgctttactggagaagaatgccatgcgtgtgtccttggatgctgcaggaaatgaagggtcttggttttatattcatccattctggaaactgagaagcgagggtgacaatattgttgtaggagataaagttgttttgatgcctgtgaatgcagggcagccactacatgccagcaacatagagcttcttgataacccagggtgtaaagaggtgaatgctgtcaattgcaacaccagctggaaaatcactttattcatgaaatatagttcctatcgagaggatgtattaaaaggaggggacgttgttagattatttcatgcggaacaagagaagtttttgacttgtgatgaatatgagaaaaaacagcacattttccttcgtacgaccttgcgccaatcagctacttctgctactagttctaaagcactctgggaaatagaggtggttcatcatgacccatgccgtgggggtgcaggacagtggaacagcttgttcagatttaagcatcttgcaactggaaactatttagctgcagagcttaatcctgattatcgagatgcccaaaatgaaggaaaaaatgtgagagatggagtccctccaacttcaaagaaaaaacgccaggcaggggagaagatcatgtatactttggtttcagtcccgcatggcaatgacattgcatccctttttgaactagatgccacaactcttcagagagctgactgcctggttccaaggaactcatatgttcggttaaggcatttatgcaccaacacatgggtaaccagtactagtatccccatagacacagatgaagagaggcctgttatgttaaagattggaacctgccaaaccaaagaagataaagaagcgttcgcaatcgtgtctgttccactgtctgaagttcgagacttagactttgccaatgatgccaataaagtactagcgaccacagttaaaaagctagaaaacggcacaataactcagaatgaaaggaggtttgtaaccaaattattggaagatctcatattctttgttgctgatgtgcctaataatggacaagaagttctggatgtggttatcactaagccaaaccgagagcgtcaaaaattgatgagggaacaaaacatactggcacaggtatttggaattcttaaagcaccctttaaagagaaagcaggagaaggctcgatgctgagacttgaagatctgggggatcaaagatatgcaccctacaagtacatgctgcggctctgttaccgcgtcctgagacactcgcagcaggattaccggaaaaatcaggaatatattgctaagaatttctgtgtcatgcagtcccagattggctatgatattttggcagaagatactatcacacctttgttgcacaacaacagaaaactactagagaaacatatcacagcaaaagaaatagaaacatttgtcagtttactcaggagaaatcgggagccaaggtttttggattatttgtcagatctgtgtgtgtctaataccactgctatccctgtaactcaagaactcatctgtaaatttatgttgagtccaggcaatgcagacattctcattcaaactaaggtggtctcaatgcaagcagacaaccccatggagagctccatcctttcagatgacattgatgatgaagaagtttggctctattggattgacagcaacaaggaacctcatggcaaagctatcaggcaccttgctcaagaggcaaaagaaggcaccaaagctgacttagaagttcttacctattacaggtaccagctaaacctctttgcaaggatgtgcttggatcgccagtatctggccataaaccagatttctacacagctgtctgtagacctgatcctgcggtgtgtgtcggatgagagcctgccgttcgacctccgagcgtccttctgtcgcctcatgctccacatgcacgttgaccgggatccccaggagtccgtggtgcctgttcgctatgccaggctctggacagaaatccccacaaagatcacaattcatgaatatgattctataacagactcttccagaaatgatatgaagaggaaatttgccctgacaatggaatttgttgaagaatatttgaaagaagttgtaaaccagccctttccttttggggataaagaaaaaaataaactgacatttgaggtggtccacttggctcggaatcttatatactttggattttatagtttcagtgagttattaaggctaacaagaacacttctggctattttagacattgtacaggcccccatgtcatcatactttgaaagattaagcaaatttcaagatggaggaaacaatgtgatgagaaccattcatggggtgggagagatgatgacccagatggtactcagtagaggctccatcttccccatgagcgtgccggatgtgccacccagcatccacccgagcaagcaagggagccccaccgagcatgaggatgtgactgtgatggacaccaagctgaagatcattgagattttgcagtttatcctgagtgtcagactggattataggatctcatatatgctgtcaatatataagaaggagtttggagaggacaatgacaatgcggagacatctgccagtggatctccagacactttactaccatcagctattgttcctgatatagatgaaattgcagctcaggcagaaactatgtttgcgggaagaaaagaaaaaaatccagttcaacttgacgatgaaggaggcaggacgtttttacgggtcctcattcatctgatcatgcacgactacgcgcctttgctgtctggagccctgcagctgttgtttaagcacttcagccagagggcagaggttttacaggcatttaagcaggtgcaattactggtgtctaatcaagacgtagataactacaagcaaatcaaggcagatctagaccagcttcgactgacagtagaaaagtctgagctatgggtggagaagagcagcaactatgagaatggagaaataggggaaagtcaagtgaaaggtggtgaagagccaattgaggaatcaaacattttaagtccagtgcaggatggaacaaagaaacctcagattgacagcaacaagagcaataagtaccggattgtaaaggagattttgatcaggctaagtaaactctgtgtgcagaataaaaagtgtcggaatcaacatcaacgattactgaaaaatatgggggcgcattcggtggtgttggatcttctgcagataccctatgaaaagaatgatgaaaagatgaatgaagtaatgaatctagcccatacatttctgcagaatttctgtcgaggaaatccacagaatcaagttcttcttcataaacatctgaatttgtttttaactccaggtctccttgaagcagaaaccatgcggcacatcttcatgaacaattaccatctgtgcaacgaaattagcgagagagttgtacaacactttgtgcactgcattgagacacatggccgccacgtggagtacctgaggtttttgcaaacaattgtaaaagcagatggtaaatatgtgaagaaatgccaggatatggtaatgacagagttgataaatgggggtgaagacgtgctgatattttacaatgatagagcatcatttccaatccttctccatatgatgtgttcagagagagaccgaggggatgagagtggccccttagcctaccacatcaccctggtggagttgctggcagcatgcacagaggggaaaaatgtctacactgaaatcaagtgtaattcccttctcccgctggacgacatagtgagggtggtgacccatgacgactgcatccctgaggttaaaattgcttatgtgaactttgttaatcactgttatgttgacactgaagtggaaatgaaagaaatctatacaagtaaccacatttggaaattatttgagaacttcttggtggatatggcaagggtttgcaacacaactacagacaggaaacatgcagacatctttttggaaaagtgtgttactgagtcaataatgaatattgtgagcggcttctttaattctcccttttcagacaatagtaccagcctccagacacatcagccagtttttattcagctactgcaatctgccttcagaatttacaattgcacctggccaaacccagcgcagaaagcctcagtggaatcctgtatcagaactttggctgaagtggcaaaaaatcgtggaattgccattccagtggatttggacagccaagttaatactcttttcatgaagagccattcaaatatggtgcagagagcagcaatgggttggagactatcagctcgctctgggccacgctttaaggaagctcttggagggcctgcttgggattacagaaatattattgaaaagttacaggatgtagtggcctccttggagcaccagttcagcccaatgatgcaggctgaattctcagtgttggttgatgtattgtacagtccagaactgctgttccctgagggaagcgatgcaagaataagatgtggcgctttcatgtcgaagttgattaatcatacaaagaaactaatggagaaagaagaaaaactgtgcattaaaattcttcagacattacgagaaatgttagagaagaaagacagctttgtggaagagggtaacacattaagaaagatacttctgaatcgatactttaaaggtgattatagtattggtgtgaatggacacctatcaggagcctactccaaaactgcacaggtgggaggaagcttttctggacaagattcagataagatggggatatcaatgtcagacattcagtgtctgctggataaagaaggtgcatcagaacttgtcatcgatgttatagtgaacaccaaaaatgacagaattttttcagaaggcattttcctcggcattgccttgcttgaaggaggaaatacacaaacacagtattctttctaccagcagttgcatgaacaaaaaaagtcagaaaaattctttaaagttctctatgatcgaatgaaggctgctcagaaagaaataagatcaacagtgacagttaataccatagatttaggtaacaaaaaaagggacgatgacaatgaattgatgacatctggtccacgaatgagagtaagagattcaacactacatttaaaagagggaatgaaagggcaattaacagaagcttcttcagcaacatccaaagcatattgtgtatacagaagagaaatggatccagaaatagacattatgtgcacaggaccagaagcgggaaacactgaggaaaaatccgcagaggaagtaacaatgagtcccgcaattgccatcatgcagccaatactgagatttcttcagttactgtgtgagaatcacaaccgggaattgcagaacttcttgaggaatcaaaacaacaaaacaaattacaacctagtctgtgagacccttcagtttctggactgcatttgtggaagtacaaccggtggcctgggcctgttgggtctctacatcaatgagaagaatgtagcgctggtcaaccagaacctggagagcttgactgagtattgccagggcccttgccatgaaaatcagacctgtatcgctacacatgagtctaatgggattgatatcatcattgctttgattctgaatgacataaaccctcttggtaaataccgaatggacctggtgctccagctaaagaacaatgcatctaaacttttgctggccattatggaaagcagacatgacagtgagaatgcagaaagaattctttttaacatgagacccagagaactggtggatgtgatgaagaatgcctataaccaaggattggaatgtgaccatggggatgatgagggtggagatgatggtgtttctccaaaagatgttggacacaatatctatattctggcccatcagttggcccgccacaataaactgttgcagcagatgctcaaaccaggatcggatccagatgaaggagatgaagccttaaagtattatgccaaccacactgcacagattgagattgtccggcatgataggaccatggaacaaatagtttttcctgtccccaatatatgtgaatacctcactcgagaatccaagtgccgtgtgttcaatacaactgaaagggatgaacaaggaagtaaagtgaatgactttttccagcaaacagaagatctctacaatgaaatgaagtggcagaagaaaatcaggaataaccctgcactgttctggttctcgaggcacatctctctctgggggagcatttccttcaacctggctgtgttcatcaatttagctgttgctctcttctacccatttggggatgatggagatgaaggtacactttctccattgttctcggttcttctttggatagcagttgcgatctgcacatctatgctgtttttcttctccaagcctgtgggtattcggccgtttcttgtatcaataatgctcagatcaatatatacaataggtcttgggcctacattaatacttcttggtgcagctaatctttgtaataaaattgtttttctggtgagttttgttggaaatcgtggcacgttcacccgtgggtaccgagcagtcatcctggatatggcctttctctatcacgtggcgtatgtcctggtttgcatgctgggcctttttgtccatgaattcttctatagcttcctgctttttgatttggtgtacagggaagagactttgctgaatgtcataaaaagtgtcacacgaaatggccgctctattattctaactgcagtcctggctctcatcctcgtctacctgttttccattattgggttcctttttttgaaggatgacttcactatggaagttgataggctgaaaaaccgaactcctgttacaggcagtcatcaagtgcctactatgactttaactaccatgatggaagcatgtgccaaggagaactgttcacccacaattccagcttcaaatacagctgatgaagagtatgaagatggaattgaaaggacgtgtgacactctccttatgtgcattgtcaccgtgctgaaccagggcctcaggaatggcggtggtgtgggggatgtgctaagaaggccatcgaaagatgagcctttgtttgctgcccgagtggtttatgaccttcttttttatttcattgttatcattattgttctgaacttgatttttggtgttatcatcgatacttttgctgatctcagaagcgaaaaacagaaaaaagaagaaattctaaagacaacttgtttcatctgtggacttgagagagacaagtttgataataaaacggtttcatttgaggagcacattaagtcagaacacaatatgtggcattatttgtacttcatagtcctggtgaaagttaaagacccaacagaatacactggacctgaaagttatgtggctcaaatgattgtggagaagaatttggattggtttcctcggatgcgagccatgtccctcgttagcaatgaaggcgacagtgagcaaaatgaaattcggagccttcaggagaagttggaatcgaccatgagtctggtcaaacagctgtcgggtcagctggcggagctcaaggagcagatgacagaacaaaggaagaataagcagagactgggcttcctcggatcaaacacaccccatgtgaatcatcacatgccaccacactgataccatggggggaagccgtgactagcctttcatcagtgtcctgcctgatcactgaataaagaactgagatggaggggagtgaacagtgcctattgttgaaaagttaaaaacaaccaagtgccaagatgttgagtgggttagctccgagaacaatttataactgtgttttcatggttgcgaagacctaacctcaaatgcatctgctagaaagcgtacatcacacattcgcaatgcatcaggaagaaaaggcttgcccaaaaggctggagagggcagggagcggcaggatggaaggagacacggggcagggagaactctcttctgctaaatcgataggagtcagttttgtcttaaatgctgactacagccactgacatggttggctggaatttcttcttttaattgtggcatataggtttgtgacacaagaagtcatactttggtggctaagttttactaaggaaaataactgaaaagattaaaagtgagagctgaaaagagaaatgataatgcttccaaactgtagctgtcacagggcaatttctttatttataacatgaagcacaatggatttacagctctaggaacttagtactttggagcttttgcctctcacactgacaacataacaggatgtgattgccttctctgggattcagacaggctctgtcaatgtggagcacaaaaggagattttcatataacttgttaaaaacatgttctaagtcatgtataggctaagattttaagaagatctgggggaataaaaagccaacagtaagccccaggaaagggttttttgagaccatatgtatgctattaaaatatattgagattaatacatgaaaatgcttaaaagtgataggaattattgagaaacttatgatggtggcattgccttttataaacatggagtgaaagccatttgactcaacgtttgctgtgcttaaagaattgcttcaggacccgagcgtttttatgtatgctgttcctgcagttaggaaaaaaaaatccaagaaatgtattgaatactcaagaaaatgccacatttcaattacatatttaaaactgtatctgtaagggcttttcaaaatgtagcaagataaaaatctcttattcaaattgtttttgtattaaatcatgcactcagaatttgtcgagggagagaataacctggtgtgttcaggttattcttagagactacacatttggaatagcagagcaaaatatggataatgaaagtgttgggaaaaaagtgatgtgacagggagtgaagacacttgataccagactctgggagatactctgcaagttgacctggcctctcccccacaggaacaaaacactgcctccagagtctttaaattctcagttatcaacgccaaggtttaaggtctagatagggtttgctatagggtttgctctgacaatttttaaagcttttggattgttctaacatagcttaagctattggttcctaaaaatcccaaatcaagatctatgtagaatataaaggaagcctgaaccaatccttccacatactgttaagatgtagacttggaacaaagctgttgggacccagagcaatgaatttttgaactgaagctactggtactccccagcaccacctcatactaagaattcctcactctgacatgacagtattttttctgaccaggagctgaaagaccctgacattcatgatccaaagatataagaaattttgatatgtctgcatgcagcacagaactttgaacctaggaggcagtcaataaatacatgagaaattcagctgtcattcagttactcttaattctttataaaactttaaatgataccacatatttgtttgtttaaaatggctttcccaaaatcaaagtagactaaagcagccatctttaaaatccaggatcatcaatgctattaacagtatcaggtaaaaagtacactttaaaatattttaatcaggcagagttttatggataggagatgtactcactcg

SEQ ID NO: 1213 - DNA, 3236 bp, Homo sapiens
  Genbank Accession No. D26579
gacccggccatgcgcggcctcgggctctggctgctgggcgcgatgatgctgcctgcgattgcccccagccggccctgggccctcatggagcagtatgaggtcgtgttgccgcggcgtctgccaggcccccgagtccgccgagctctgccctcccacttgggcctgcacccagagagggtgagctacgtccttggggccacagggcacaacttcaccctccacctgcggaagaacagggacctgctgggttccggctacacagagacctatacggctgccaatggctccgaggtgacggagcagcctcgcgggcaggaccactgcttataccagggccacgtagaggggtacccggactcagccgccagcctcagcacctgtgccggcctcaggggtttcttccaggtggggtcagacctgcacctgatcgagcccctggatgaaggtggcgagggcggacggcacgccgtgtaccaggctgagcacctgctgcagacggccgggacctgcggggtcagcgacgacagcctgggcagcctcctgggaccccggacggcagccgtcttcaggcctcggcccggggactctctgccatcccgagagacccgctacgtggagctgtatgtggtcgtggacaatgcagagttccagatgctggggagcgaagcagccgtgcgtcatcgggtgctggaggtggtgaatcacgtggacaagctatatcagaaactcaacttccgtgtggtcctggtgggcctggagatttggaatagtcaggacaggttccacgtcagccccgaccccagtgtcacactggagaacctcctgacctggcaggcacggcaacggacacggcggcacctgcatgacaacgtacagctcatcacgggtgtcgacttcaccgggactactgtggggtttgccagggtgtccgccatgtgctcccacagctcaggggctgtgaaccaggaccacagcaagaaccccgtgggcgtggcctgcaccatggcccatgagatgggccacaacctgggcatggaccatgatgagaacgtccagggctgccgctgccaggaacgcttcgaggccggccgctgcatcatggcaggcagcattggctccagtttccccaggatgttcagtgactgcagccaggcctacctggagagctttttggagcggccgcagtcggtgtgcctcgccaacgcccctgacctcagccacctggtgggcggccccgtgtgtgggaacctgtttgtggagcgtggggagcagtgcgactgcggcccccccgaggactgccggaaccgctgctgcaactctaccacctgccagctggctgagggggcccagtgtgcgcacggtacctgctgccaggagtgcaaggtgaagccggctggtgagctgtgccgtcccaagaaggacatgtgtgacctcgaggagttctgtgacggccggcaccctgagtgcccggaagacgccttccaggagaacggcacgccctgctccgggggctactgctacaacggggcctgtcccacactggcccagcagtgccaggccttctgggggccaggtgggcaggctgccgaggagtcctgcttctcctatgacatcctaccaggctgcaaggccagccggtacagggctgacatgtgtggcgttctgcagtgcaagggtgggcagcagcccctggggcgtgccatctgcatcgtggatgtgtgccacgcgctcaccacagaggatggcactgcgtatgaaccagtgcccgagggcacccggtgtggaccagagaaggtttgctggaaaggacgttgccaggacttacacgtttacagatccagcaactgctctgcccagtgccacaaccatggggtgtgcaaccacaagcaggagtgccactgccacgcgggctgggccccgccccactgcgcgaagctgctgactgaggtgcacgcagcgtccgggagcctccccgtcctcgtggtggtggttctggtgctcctggcagttgtgctggtcaccctggcaggcatcatcgtctaccgcaaagcccggagccgcatcctgagcaggaacgtggctcccaagaccacaatggggcgctccaaccccctgttccaccaggctgccagccgcgtgccggccaagggcggggctccagccccatccaggggcccccaagagctggtccccaccacccacccgggccagcccgcccgacacccggcctcctcggtggctctgaagaggccgccccctgctcctccggtcactgtgtccagcccacccttcccagttcctgtctacacccggcaggcaccaaagcaggtcatcaagccaacgttcgcacccccagtgcccccagtcaaacccggggctggtgcggccaaccctggtccagctgagggtgctgttggcccaaaggttgccctgaagccccccatccagaggaagcaaggagccggagctcccacagcaccctaggggggcacctgcgcctgtgtggaaatttggagaagttgcggcagagaagccatgcgttccagccttccacggtccagctagtgccgctcagccctagaccctgactttgcaggctcagctgctgttctaacctcagtaatgcatctacctgagaggctcctgctgtccacgccctcagccaattccttctccccgccttggccacgtgtagccccagctgtctgcaggcaccaggctgggatgagctgtgtgcttgcgggtgcgtgtgtgtgtacgtgtctccaggtggccgctggtctcccgctgtgttcaggaggccacatatacagcccctcccagccacacctgcccctgctctggggcctgctgagccggctgccctgggcacccggttccaggcagcacagacgtggggcatccccagaaagactccatcccaggaccaggttcccctccgtgctcttcgagagggtgtcagtgagcagactgcaccccaagctcccgactccaggtcccctgatcttgggcctgtttcccatgggattcaagagggacagccccagctttgtgtgtgtttaagcttaggaatgccctttatggaaagggctatgtgggagagtcagctatcttgtctggttttcttgagacctcagatgtgtgttcagcagggctgaaagcttttattctttaataatgagaaatgtatattttactaataaattattgaccgagttctgtagattcttgttaga

SEQ ID NO: 1214 - DNA, 144 bp, Homo sapiens
  Genbank Accession No. D28364
aagctcagcatttggggacgctctcagctctcggcgcacggcccaggttatcttgtagcatagcaacttcggatttcactctacccggagagtttcccgcttggttgaacacattggcctcaggaagcttccttcaaaatgtct

SEQ ID NO: 1215 - DNA, 124 bp, Homo sapiens
  Genbank Accession No. D28423
attttcgtggacgccgggtgagtgagagagttggttggtgttgggccggaggaaagcgggaagactcatcggagcgtgtggatttgagccgccgcattttttaaccctagatctcgaaatgcat

SEQ ID NO: 1216 - DNA, 418 bp, Homo sapiens
  Genbank Accession No. D29047
  unsure (1)..(418): n = a or c or g or t
nnttgtangatctaaaaantgtatctgtataccattgaatctattgtananagttaatagnaagtcatgctgcattatgtcctatcagagtgagntgccatggcttgttaatacncnatttanaggatttttacncacgtggagtttaaaanattgtgatactttcaggtnacttattccctananaaanactatagagaacctgtacttggcagnagagnagtgaacatgtggaagtggtctctaaaaaaaatattgtcctggaactctccaggacaanacaaccttatgagtgacatctgttggcattctgtggaatttctgtttatagcctgagtctctgtttgaatgcaagtaaagacccttaaaatttgtttgccaagtatcatattagaattggtgtttttgttatccggca

SEQ ID NO: 1217 - DNA, 6754 bp, Homo sapiens
  Genbank Accession No. D31883
gagagaagcctgatatgtaacccaggcgggtgggagcctcagtctgtcgggctgaggtctggcatctacaaagcctcttggccgtgttctgaacttgaagcctggaggagttctctgctcagcacagccaaggaacagaattagaagaaaaggaaccctggcctgaggcaggtgacaaacattaccaccccagctgtgcacgatgcagcagatgcaaccagatgttcacagaaggagaggaaatgtatcttcaaggctccaccgtttggcatcccgactgtaagcaatctacgaagaccgaggaaaagctgcggcctaccaggacatcctcggaaagtatttattctaggccaggctccagtattcctggctcaccaggtcatactatctatgcaaaagtagacaatgagatcctggattacaaggatttagcagccattccgaaggtcaaggcaatttatgacattgaacgtccagatcttattacctatgagcctttctacacttcgggctatgatgacaaacaggagagacagagccttggagagtctccgaggactttgtctcctactccatcagcagaagggtaccaggatgttcgggatcggatgatccatcggtccacgagccagggctccatcaactcccctgtgtacagccgccacagctacactccaaccacgtcccgctctccccagcatttccacagacctggcaatgagccgtccagcggccggaactcccctctcccttaccggccagacagccgccctctaactccaacttacgctcaggcccctaaacatttccatgttccagatcaaggaatcaacatttaccgaaagccacccatctacaaacagcatgctgccttggcagcccagagcaagtcctcagaagatatcatcaagttttccaagttcccagcagcccaggcaccagaccccagcgagacaccagagattgagacggaccactggcctggtcccccctcatttgctgtcataggacctgacatgaaacgcagatctagtggcagagaggaagatgatgaggaacttctgagacgtcggcagcttcaagaagagcaattaatgaagcttaactcaggcctgggacagttgatcttgaaagaagagatggagaaagagagccgggaaaggtcatctctgttagccagtcgctacgattctcccatcaactcagcttcacatattccatcatctaaaactgcatctctccctggctatggaagaaatgggcttcaccggcctgtttctaccgacttcgctcagtataacagctatggggatgtcagcgggggagtgcgagattaccagacactcccagatggccacatgcctgcaatgagaatggaccgaggagtgtctatgcccaacatgttggaaccaaagatatttccatatgaaatgctcatggtgaccaacagagggcgaaacaaaatcctcagagaggtggacagaaccaggctggagcgccacttagcccctgaagtgtttcgggaaatctttggaatgtccatacaggagtttgacaggttacctctttggagacgcaacgacatgaagaaaaaagcaaaactcttctaagtcccactcgtgaatggcaattagagaaaggactgacagtggcggtgccccataggatgtcatattgaggcccaaacttgattggagaatttgcaaactaccgtcgctcagcaacaccaaaaagagaaagtctggttaaaacaccatgagtcaaatgtcgggccagccaacagtaacacttgccaagaagcatggcgtagaaatttctatgttccgaaacacagagtagtgtccacatgtgaccttttcacattaccttatgtatacaacaggagctgcgttgttttcttctttttcttttcctttatctgttgtccaacaacagtgctgactgtccggataagagctggcaagtgcccttaggatgccgcatgggaaaaatcggttatcataatttcaaagtataaatatatttattatgtagcgctgcggctaagaaggaagagtgaggggtctgtccatggggtggcagtgatttcacacccgcctttcttgaatggcttcgtgttactcagccgtgccctggcaggaatggaactccatcagggaacagggcagctctgtttgaatggggtgaaaaacagcaaaattaattcttagcaagctccttgttctctactgttcaccgggacctggctggcaaatgacttagctattagtatatttaaaaactgttcaaaagcaaaagagaaggaacaggaatgaaaggaaaccttcccttaactctttctgcttcccatagcaggtctggttcctgctccccgcctaggacaggagctgtctggagctccacctttgcaaagaaaggaaaaacacaaattgcccccagattggcccagtggcatgccattaggtgattttgcgtaggggccatatcattcatggccaaaaaaaaccaaaaagcaaaaaacaaaaacaagtcccatgtcctactgactctagttcttccagtcgttatcctctgctgtctctctggcatcctatgaatcagatcaagcccatgctgttgttggtttttaaggtttctttcaataataggctaaggaaagacatgtttttctcttttaaatctctgcaactccaaagtagactccttcgaacgtatttaatttggccttttcagctttcttcttgcccagctctgtcgaattcatgggtgtgtgtgcacatgttggtttcactcacccagagtaattttgtgagcatgcatgtgctttttaatttctgcttgaatgtttgtcctgctgtgttgcagcttctaaagacattgtcaccgagtgtgtgtgactcaaagatcaagagtgaggctaaactgcgaccccaacatcacttccttcatggaaaggtgttggcgctgatgtagctcatggaaggatcagactgggaaccacagaggaaggatgaggtgggatgtggaggtcagagcatctcacgagagtccctcaggctctgcaacactagattcgaatatgagcctagggtttccccaacacgtgcgtgcatatgaaaccacatcatgattcccgacgtgagttagatgagggagagtttgtgtaactccacacccaggagggtaagccactttattatcatgctttggggctgtgcttaagaatttaagctctgttttaaagccgaagaagaaaacatttgaatttaccttcatatgccactaagaacaaaagctctgaagttcttcctgctggcaccaaatattaggattacaagctgtctctctgacaccagtggtaaaaaagcaagtagaatagtttctgagtctgtgttgcagcctctgacacgtggctcactgctgtcatttggggggtggaatgaacagtcactgttctatagcatcctcctgtgctcttacctaaggaatctaaattgtcctagccttccattgctatgcactgaatgaggactactctcgtgtgtgtgtgtgtgtgtgtgtgtgtgtgtgtgtgtgtgtgtgtgtgttggatctactaacatgtttagcaaatggctctgacagggtggccatgagcagatgagaccagctcttgcttggttggaagccacactgcagtttgcagtttagcctttggtgtctcagtggcctcttgcttattccatgctttttctatcccatcctctctctgtgccctcctgcaatggcagccttggcacaatgcctgggtgtcctcatccttgctttactctggaaagtgtggggatggagaggatggtgcatttccagtgcttccttacctgtcaataacaatggtggccacctgggtcccagcacttggctggtggagagatttttttcattatggagctaataaagggtccctacgttttacattgattaatgaattatcacccagacatgtgcagatgaaatgtcaatataagaaaaatcaaggtatttgggaaacatgggcataatcaggtagttttgctaaaattcctcttccttggtctacataaagaagacatgggtctgtcatagaatggggacattagactgaaaactgggacaacccccttccttattttatagagactaggagttaaggggcctgcctaagattgcagtgataaagaactgaaccctaaatcagctcccactaatgaaaccctgctttccttgtatcttttaaactcagttctgcatccaacttgagaagaaaaaaagcttctttccatatcaagtaccatatgagttcatttaaactgcaccttgcagaaatgcattgccagaaagcaccagtagcctcctatctgcaagcagagtagtgctctgctctggggaggggtcattggaaaccataatgcagagtgggccccctactccatttcccagcaaaaggctccagctggagggatgggttgtggggcaacctggttcctgctaactgccagattgaatgtgtgggctagaatgcctgcgcatttagttaaactgggctcagcatgcttgtcctcaaaatgtccatcctggtcacagcacacaagatggctattggtctgcttttaccctaccctgtactatacatgaaaattccagttattaacacactcaaactggtggagcttgttcaccctaggaaggggattgtatatatggcaggcttccctggtgccgatgtaaagggctacatttgggaacatttgacttccttgggactcttaagtgcatactgatggcatgaagtaaaaggggcctcaatgatgataggaaaatcagttcttttaaaatttcttcaagaaaatccaggctatcacatagtctttctgtgtgacttattaggagataggaagagcattgggaaacttgcacagctagctatgcatctacattttggtttggggttagttatgaaatgttcttaatatgacgtgttcaataacttcacataaacttcctgttctccaaaacctcaaagagatagagttaatgagttgttgtttttttttaaatgggggtagttttctatctgtcatgggctctagcatctactccgctacccaattctgtcatctccaagctgagtttcctcttctgaggcagaggctggagcagttctttttcagttctcatcctctccatcccaatccagtatatcaatcaactctaactcggagacgtctagctggcaatgtttctaaaactttcactggatttctttagacattgaagcaaacatttttttctaagaattgcttctcagatgatgatatcaaatgtatatgcttttgcaagtttgaaaagttcaaattaaccacttttgactaggtaagtctttctaaaaaccatttaaagctaactgggtcttagcatcctcctgtgtatggaagagacaggtgaccgctccaggttgggtgctcacagaacccttttcctgactctcatggaagatggtggaaggaaaatagactgtctcatcaaccctcctgtgtcctctgaagcaatctcagtttttattaaccacctcttctgtgtttctggtagctatttaacctgtatttaatctgtacttcctatgccagcctcaattttatttgatttttaaaattattctcttctaaccaatgaagtgtttgtcagtatgccccaaagcttgctcttttgtgctcccttttgaataactttctatccagaaaaagagattatttgggacttgagatttgcagtgataccaacttatagcaatgatgtactttaagggaactacccaactatgttgtgatagaagaaagagaaaccttcactttggcattttttttaatcactgtttatttttctgtttgcggcccaggaagcagtgggaggtggtggcagatatgctttgcatatggattgttatgtttttatttgggcaagtttaatcatggaaaactcaaaaagaaggggggaaatggtcagtttaagccaaaagaaactttctaaacaatgtataggtacacagcaaaattaaacaaatccaacaatttctgaagcttagtgtaattgagtggtggttgttattcaataaaattattcccaaaagtgtttctcctaagagtgcagttcccatgagtcacttcctgaacccattgaccaaaggtggacagagacaatcctgtagaccttgacattcagaaagatgtgagctgcttactgatcatatatgcatacgtttctttacagcagaggaaaccattgtccacaaaactgatgttcttttggggttttatgtacagacttgtccaatcatgtgtgtggttcctgcgagttgctgatgactccgcattgaagctctctgagttctttgattttaagttgggtttatggaattttttcaaatgttggaaggcgtgtggttcttcctgccctccctccccttttggaaatatgaaagcaaatgtttagaagaattccttttgaaaagctgtgtcgtgttccctgtgaaactgagcaggtgtgtgttggcgcgctaagtgccacatgcttgtgtgtagaggaggaggtggccctgccggctccgcgctgctgtgcctgtgatccctacctgctccccgctcctgttgccagcagcactcactgcactcctttgtcatatactctgcatcactgtcatactcacaacttcgtgaataaagttgtgtgctttattcgt

SEQ ID NO: 1218 - DNA, 6212 bp, Homo sapiens
  Genbank Accession No. D43969
ggaaaggggaacagttaaatttgtaatttgggttgtgtgaaaacttctttgggcctcataaacaaccacagaaccacaagttgggtagcctggcagtgtcagaagtctgaacccagcatagtggtcagcaggcaggacgaatcacactgaatgcaaaccacagggtttcgcagcgtggtgagcatcaccaacccacagccaaggcggcgctggcttttttttttttttaatctttaacaatttgaatatttgtttttacaaaggtgcattttttaatagggcttggggagtcccagaggtatccagcagaggggagaagaaagagagatgtagggctagaggggtgaggctgaaacagtgacctgtcttggttttcgctccgaaggtaaaagaaatcattgagtcccccgccttcagaagagggtgcattttcaggaggaagcgatggcttcagacagcatatttgagtcatttccttcgtacccacagtgcttcatgagagaatgcatacttggaatgaatccttctagagacgtccacgatgccagcacgagccgccgcttcacgccgccttccaccgcgctgagcccaggcaagatgagcgaggcgttgccgctgggcgccccggacgccggcgctgccctggccggcaagctgaggagcggcgaccgcagcatggtggaggtgctggccgaccacccgggcgagctggtgcgcaccgacagccccaacttcctctgctccgtgctgcctacgcactggcgctgcaacaagaccctgcccatcgctttcaaggtggtggccctaggggatgttccagatggcactctggtcactgtgatggctggcaatgatgaaaactactcggctgagctgagaaatgctaccgcagccatgaagaaccaggttgcaagatttaatgacctcaggtttgtcggtcgaagtggaagagggaaaagcttcactctgaccatcactgtcttcacaaacccaccgcaagtcgccacctaccacagagccatcaaaatcacagtggatgggccccgagaacctcgaagacatcggcagaaactagatgatcagaccaagcccgggagcttgtccttttccgagcggctcagtgaactggagcagctgcggcgcacagccatgagggtcagcccacaccacccagcccccacgcccaaccctcgtgcctccctgaaccactccactgcctttaaccctcagcctcagagtcagatgcaggatacaaggcagatccaaccatccccaccgtggtcctacgatcagtcctaccaatacctgggatccattgcctctccttctgtgcacccagcaacgcccatttcacctggacgtgccagcggcatgacaaccctctctgcagaactttccagtcgactctcaacggcacccgacctgacagcgttcagcgacccgcgccagttccccgcgctgccctccatctccgacccccgcatgcactatccaggcgccttcacctactccccgacgccggtcacctcgggcatcggcatcggcatgtcggccatgggctcggccacgcgctaccacacctacctgccgccgccctaccccggctcgtcgcaagcgcagggaggcccgttccaagccagctcgccctcctaccacctgtactacggcgcctcggccggctcctaccagttctccatggtgggcggcgagcgctcgccgccgcgcatcctgccgccctgcaccaacgcctccaccggctccgcgctgctcaaccccagcctcccgaaccagagcgacgtggtggaggccgagggcagccacagcaactcccccaccaacatggcgccctccgcgcgcctggaggaggccgtgtggaggccctactgaggcgccaggcctggcccggctgggccacgcgggccgccgccttcgcctccgggcgcgcgggcctcctgttcgcgacaagcccgccgggatcccgggccctgggcccggccaccgtcctggggccgagggcgcccgacggccaggatctcgctgtaggtcaggcccgcgcagcctcctgcgcccagaagcccacgccgccgccgtctgctggcgccccggccctcgcggaggtgtccgaggcgacgcacctcgagggtgtccgccggccccagcacccaggggacgcgctggaaagcaaacaggaagattcccggagggaaactgtgaatgcttctgatttagcaatgctgtgaataaaaagaaagattttatacccttgacttaactttttaaccaagttgtttattccaaagagtgtggaattttggttggggtggggggagaggagggatgcaactcgccctgtttggcatctaattcttatttttaatttttccgcaccttatcaattgcaaaatgcgtatttgcatttgggtggtttttatttttatatacgtttatataaatatatataaattgagcttgcttctttcttgctttgaccatggaaagaaatatgattcccttttctttaagttttatttaacttttcttttggacttttgggtagttgtttttttttgttttgttttgtttttttgagaaacagctacagctttgggtcatttttaactactgtattcccacaaggaatccccagatatttatgtatcttgatgttcagacatttatgtgttgataattttttaattatttaaatgtacttatattaagaaaaatatcaagtactacattttcttttgttcttgatagtagccaaagttaaatgtatcacattgaagaaggctagaaaaaaagaatgagtaatgtgatcgcttggttatccagaagtattgtttacattaaactccctttcatgttaatcaaacaagtgagtagctcacgcagcaacgtttttaataggatttttagacactgagggtcactccaaggatcagaagtatggaattttctgccaggctcaacaagggtctcatatctaacttcctccttaaaacagagaaggtcaatctagttccagagggttgaggcgggtgccaataattacatctttggagaggatttgatttctgcccagggatttgctcaccccaaggtcatctgataatttcacagatgctgtgtaacagaacacagccaaagtaaactgtgtaggggagccacatttacataggaaccaaatcaatgaatttaggggttacgattatagcaatttaagggccaccagaagcaggcctcgaggagtcaatttgcctctgtgtgcctcagtggagacaagtgggaaaacatggtcccacctgtgcgagaccccctgtcctgtgctgctcactcaacaacatctttgtgttgctttcaccaggctgagaccctaccctatggggtatatgggcttttacctgtgcaccagtgtgacaggaaagattcatgtcactactgtccgtggctacaattcaaaggtatccaatgtcgctgtaaattttatggcactatttttattggaggatttggtcagaatgcagttgttgtacaactcataaatactaactgctgattttgacacatgtgtgctccaaatgatctggtggttatttaacgtacctcttaaaattcgttgaaacgatttcaggtcaactctgaagagtatttgaaagcaggacttcagaacagtgtttgatttttattttataaatttaagcattcaaattaggcaaatctttggctgcaggcagcaaaaacagctggacttatttaaaacaacttgtttttgagttttcttatatatatattgattatttgttttacacacatgcagtagcactttggtaagagttaaagagtaaagcagcttatgttgtcaggtcgttcttatctagagaagagctatagcagatctcggacaaactcagaatatattcactttcatttttgacaggattccctccacaactcagtttcatatattattccgtattacatttttgcagctaaattaccataaaatgtcagcaaatgtaaaaatttaatttctgaaaagcaccattagcccatttcccccaaattaaacgtaaatgttttttttcagcacatgttaccatgtctgacctgcaaaaatgctggagaaaaatgaaggaaaaaattatgtttttcagtttaattctgttaactgaagatattccaactcaaaaccagcctcatgctctgattagataatcttttacattgaacctttactctcaaagccatgtgtggagggggcttgtcactattgtaggctcactggattggtcatttagagtttcacagactcttaccagcatatatagtatttaattgtttcaaaaaaaatcaaactgtagttgttttggcgataggtctcacgcaacacatttttgtatgtgtgtgtgtgtgcgtgtgtgtgtgtgtgtgtgaaaaattgcattcattgacttcaggtagattaaggtatctttttattcattgccctcaggaaagttaaggtatcaatgagacccttaagccaatcatgtaataactgcatgtgtctggtccaggagaagtattgaataagccatttctactgcttactcatgtccctatttatgatttcaacatggatacatatttcagttctttctttttctcactatctgaaaatacatttccctccctctcttccccccaatatctccctttttttctctcttcctctatcttccaaaccccactttctccctcctccttttcctgtgttctcttaagcagatagcacatacccccacccagtaccaaatttcagaacacaagaaggtccagttcttcccccttcacataaaggaacatggtttgtcagcctttctcctgtttatgggtttcttccagcagaacagagacattgccaaccatattggatctgcttgctgtccaaaccagcaaacttcctgggcaaatcacaatcagtgagtaaatagacagcctttctgctgccttgggtttctgtgcagataaacagaaatgctctgattagaaaggaaatgaatggttccactcaaatgtcctgcaatttaggattgcagatttctgccttgaaatacctgtttctttgggacattccgtcctgatgatttttatttttgttggtttttatttttggggggaatgacatgtttgggtcttttatacatgaaaatttgtttgacaataatctcacaaaacatattttacatctgaacaaaatgcctttttgtttaccgtagcgtatacatttgttttgggatttttgtgtgtttgttgggaattttgtttttagccaggtcagtattgatgaggctgatcatttggctctttttttccttccagaagagttgcatcaacaaagttaattgtatttatgtatgtaaatagattttaagcttcattataaaatattgttaatgcctataactttttttcaatttttttgtgtgtgtttctaaggactttttcttaggtttgctaaatactgtagggaaaaaatgcttctttctaactttgtttattttagactttaaaatgagctacttcttattcacttttgtaaacagctaatagcatggttccaattttttttaagttcactttttttgttctaggggaaatgaatgtgcaaaaaaagaaaaagaactgttggttatttgtgttattctggatgtataaaaatcaatggaaaaaaataaactttcaaattgaaatgacggtataacacatctactgaaaaagcaacgggaaatgtggtcctatttaagccagcccccacctagggtctatttgtgtggcagttattgggtttggtcacaaaacatcctgaaaattcgtgcgtgggcttctttctccctggtacaaacgtatggaatgcttcttaaaggggaactgtcaagctggtgtcttcagccagatgacatgagagaatatcccagaaccctctctccaaggtgtttctagatagcacaggagagcaggcactgcactgtccacagtccacggtacacagtcgggtgggccgcctcccctctcctgggagcattcgtcgtgcccagcctgagcagggcagctggactgctgctgttcaggagccaccagagccttcctctctttgtaccacagtttcttctgtaaatccagtgttacaatcagtgtgaatggcaaataaacagtttgacaagtacata

SEQ ID NO: 1219 - DNA, 1102 bp, Homo sapiens
  Genbank Accession No. D49950
gcctggacagtcagcaaggaattgtctcccagtgcattttgccctcctggctgccaactctggctgctaaagcggctgccacctgctgcagtctacacagcttcgggaagaggaaaggaacctcagaccttccagatcgcttcctctcgcaacaaactatttgtcgcaggaataaagatggctgctgaaccagtagaagacaattgcatcaactttgtggcaatgaaatttattgacaatacgctttactttatagctgaagatgatgaaaacctggaatcagattactttggcaagcttgaatctaaattatcagtcataagaaatttgaatgaccaagttctcttcattgaccaaggaaatcggcctctatttgaagatatgactgattctgactgtagagataatgcaccccggaccatatttattataagtatgtataaagatagccagcctagaggtatggctgtaactatctctgtgaagtgtgagaaaatttcaactctctcctgtgagaacaaaattatttcctttaaggaaatgaatcctcctgataacatcaaggatacaaaaagtgacatcatattctttcagagaagtgtcccaggacatgataataagatgcaatttgaatcttcatcatacgaaggatactttctagcttgtgaaaaagagagagacctttttaaactcattttgaaaaaagaggatgaattgggggatagatctataatgttcactgttcaaaacgaagactagctattaaaatttcatgccgggcgcagtggctcacgcctgtaatcccagccctttgggaggctgaggcgggcagatcaccagaggtcaggtgttcaagaccagcctgaccaacatggtgaaacctcatctctactaaaaatactaaaaattagctgagtgtagtgacgcatgccctcaatcccagctactcaagaggctgaggcaggagaatcacttgcactccggaggtagaggttgtggtgagccgagattgcaccattgcgctctagcctgggcaacaacagcaaaactccatctcaaaaaataaaataaataaataaacaaataaaaaattcataatgtg

SEQ ID NO: 1220 - DNA, 6662 bp, Homo sapiens
  Genbank Accession No. D79987
ggcggttaagtcctgtacctaggaaagagggcgagctctggggcgctctccggtgtcatgaggagcttcaaaagagtcaactttgggactctgctaagcagccagaaggaggctgaagagttgctgcccgacttgaaggtgggggtgctgcctggctcgggatacacctggctttccaaactgagctgttttgtgtttgccttttgaagagatggataagagttcctgtccaaccctccagctggttttcccagcagccgatctgatgctgagaggagacaagcttgtgatgccatcctgagggcttgcaaccagcagctgactgctaagctagcttgccctaggcatctggggagcctgctggagctggcagagctggcctgtgatggctacttagtgtctaccccacagcgtcctcccctctacctggaacgaattctctttgtcttactgcggaatgctgctgcacaaggaagcccagaggccacactccgccttgctcagcccctccatgcctgcttggtgcagtgctctcgcgaggctgctccccaggactatgaggccgtggctcggggcagcttttctctgctttggaagggggcagaagccctgttggaacggcgagctgcatttgcagctcggctgaaggccttgagcttcctagtactcttggaggatgaaagtaccccttgtgaggttcctcactttgcttctccaacagcctgtcgagcggtagctgcccatcagctatttgatgccagtggccatggtctaaatgaagcagatgctgatttcctagatgacctgctctccaggcacgtgatcagagccttggtgggtgagagagggagctcttctgggcttctttctccccagagggccctctgcctcttggagctcaccttggaacactgccgtcgcttttgctggagccgccaccatgacaaagccatcagcgcagtggagaaggctcacagttacctaaggaacaccaatctagcccctagccttcagctatgtcagctgggggttaagctgctgcaggtcggggaggaaggacctcaggcagtggccaagcttctgatcaaggcatcagctgtcctgagcaagagtatggaggcaccatcacccccacttcgggcattgtatgagagctgccagttcttcctttcaggcctggaacgaggcaccaagaggcgctatagacttgatgccattctgagcctctttgcttttcttggagggtactgctctcttctgcagcagctgcgggatgatggtgtgtatgggggctcctccaagcaacagcagtcttttcttcagatgtactttcagggacttcacctctacactgtggtggtttatgactttgcccaaggctgtcagatagttgatttggctgacctgacccaactagtggacagttgtaaatctaccgttgtctggatgctggaggccttagagggcctgtcgggccaagagctgacggaccacatggggatgaccgcttcttacaccagtaatttggcctacagcttctatagtcacaagctctatgccgaggcctgtgccatctctgagccgctctgtcagcacctgggtttggtgaagccaggcacttatcccgaggtgcctcctgagaagttgcacaggtgcttccggctacaagtagagagtttgaagaaactgggtaaacaggcccagggctgcaagatggtgattttgtggctggcagccctgcaaccctgtagccctgaacacatggctgagccagtcactttctgggttcgggtcaagatggatgcggccagggctggagacaaggagctacagctaaagactctgcgagacagcctcagtggctgggacccggagaccctggccctcctgctgagggaggagctgcaggcctacaaggcggtgcgggccgacactggacaggaacgcttcaacatcatctgtgacctcctggagctgagccccgaggagacaccagccggggcctgggcacgagccacccacctggtagaactggctcaggtgctctgctaccacgactttacgcagcagaccaactgctctgctctggatgctatccgggaagccctgcagcttctggactctgtgaggcctgaggcccaggccagagatcagcttctggacgataaagcacaggccttgctgtggctttacatctgtactctggaagccaaaatacaggaaggtatcgagcgggatcggagagcccaggcccctggtaacttggaggaatttgaagtcaatgacctgaactatgaagataaactccaggaagatcgtttcctatacagtaacattgccttcaacctggctgcagatgctgctcagtccaaatgcctggaccaagccctggccctgtggaaggagctgcttacaaaggggcaggccccagctgtacggtgtctccagcagacagcagcctcactgcagatcctagcagccctctaccagctggtggcaaagcccatgcaggctctggaggtcctcctgctgctacggattgtctctgagagactgaaggaccactcgaaggcagctggctcctcctgccacatcacccagctcctcctgaccctcggctgtcccagctatgcccagttacacctggaagaggcagcatcgagcctgaagcatctcgatcagactactgacacatacctgctcctttccctgacctgtgatctgcttcgaagtcaactctactggactcaccagaaggtgaccaagggtgtctctctgctgctgtctgtgcttcgggatcctgccctccagaagtcctccaaggcttggtacttgctgcgtgtccaggtcctgcagctggtggcagcttaccttagcctcccgtcaaacaacctctcacactccctgtgggagcagctctgtgcccaaggctggcagacacctgagatagctctcatagactcccataagctcctccgaagcatcatcctcctgctgatgggcagtgacattctctcaactcagaaagcagctgtggagacatcgtttttggactatggtgaaaatctggtacaaaaatggcaggttctttcagaggtgctgagctgctcagagaagctggtctgccacctgggccgcctgggtagtgtgagtgaagccaaggccttttgcttggaggccctaaaacttacaacaaagctgcagataccacgccagtgtgccctgttcctggtgctgaagggcgagctggagctggcccgcaatgacattgatctctgtcagtcggacctgcagcaggttctgttcttgcttgagtcttgcacagagtttggtggggtgactcagcacctggactctgtgaagaaggtccacctgcagaaggggaagcagcaggcccaggtcccctgtcctccacagctcccagaggaggagctcttcctaagaggccctgctctagagctggtggccactgtggccaaggagcctggccccatagcaccttctacaaactcctccccagtcttgaaaaccaagccccagcccatacccaacttcctgtcccattcacccacctgtgactgctcgctctgcgccagccctgtcctcacagcagtctgtctgcgctgggtattggtcacggcaggggtgaggctggccatgggccaccaagcccagggtctggatctgctgcaggtcgtgctgaagggctgtcctgaagccgctgagcgcctcacccaagctctccaagcttccctgaatcataaaacacccccctccttggttccaagcctcttggatgagatcttggctcaagcatacacactgttggcactggagggcctgaaccagccatcaaacgagagcctgcagaaggttctacagtcagggctgaagtttgtagcagcacggataccccacctagagccctggcgagccagcctgctcttgatttgggccctcacaaaactaggtggcctcagctgctgtactacccaactttttgcaagctcctggggctggcagccaccattaataaaaagtgtccctggctcagagccctctaagactcagggccaaaaacgttctggacgagggcgccaaaagttagcctctgctcccctgagcctcaataatacctctcagaaaggtctggaaggtagaggactgccctgcacacctaaacccccagaccggatcaggcaagctggccctcatgtccccttcacggtgtttgaggaagtctgccctacagagagcaagcctgaagtaccccaggcccccagggtacaacagagagtccagacgcgcctcaaggtgaacttcagtgatgacagtgacttggaagaccctgtctcagctgaggcctggctggcagaggagcctaagagacggggcactgcttcccggggccgggggcgagcaaggaagggcctgagcctaaagacggatgccgtggttgccccaggtagtgcccctgggaaccctggcctgaatggcaggagccggagggccaagaaggtggcatcaagacattgtgaggagcggcgtccccagagggccagtgaccaggccaggcctggccctgagatcatgaggaccatccctgaggaagaactgactgacaactggagaaaaatgagctttgagatcctcaggggctctgacggggaagactcagcctcaggtgggaagactccagctccgggccctgaggcagcttctggagaatgggagctgctgaggctggattccagcaagaagaagctgcccagcccatgcccagacaaggagagtgacaaggaccttggtcctcggctccagctcccctcagcccccgtagccactggtctttctaccctggactccatctgtgactccctgagtgttgctttccggggcattagtcactgtcctcctagtgggctctatgcccacctctgccgcttcctggccttgtgcctgggccaccgggatccttatgccactgctttccttgtcaccgagtctgtctccatcacctgtcgccaccagctgctcacccacctccacagacagctcagcaaggcccagaagcaccgaggatcacttgaaatagcagaccagctgcaggggctgagccttcaggagatgcctggagatgtccccctggcccgcatccagcgcctcttttccttcagggctttggaatctggccacttcccccagcctgaaaaggagagtttccaggagcgcctggctctgatccccagtggggtgactgtgtgtgtgttggccctggccaccctccagcccggaaccgtgggcaacaccctcctgctgacccggctggaaaaggacagtcccccagtcagtgtgcagattcccactggccagaacaagcttcatctgcgttcagtcctgaatgagtttgatgccatccagaaggcacagaaagagaacagcagctgtactgacaagcgagaatggtggacagggcggctggcactggaccacaggatggaggttctcatcgcttccctagagaagtctgtgctgggctgctggaaggggctgctgctgccgtccagtgaggagcccggccctgcccaggaggcctcccgcctacaggagctgctacaggactgtggctggaaatatcctgaccgcactctgctgaaaatcatgctcagtggtgccggtgccctcacccctcaggacattcaggccctggcctacgggctgtgcccaacccagccagagcgagcccaggagctcctgaatgaggcagtaggacgtctacagggcctgacagtaccaagcaatagccaccttgtcttggtcctagacaaggacttgcagaagctgccgtgggaaagcatgcccagcctccaagcactgcctgtcacccggctgccctccttccgcttcctactcagctactccatcatcaaagagtatggggcctcgccagtgctgagtcaaggggtggatccacgaagtaccttctatgtcctgaaccctcacaataacctgtcaagcacagaggagcaatttcgagccaatttcagcagtgaagctggctggagaggagtggttggggaggtgccaagacctgaacaggtgcaggaagccctgacaaagcatgatttgtatatctatgcagggcatggggctggtgcccgcttccttgatgggcaggctgtcctgcggctgagctgtcgggcagtggccctgctgtttggctgtagcagtgcggccctggctgtgcatggaaacctggagggggctggcatcgtgctcaagtacatcatggctggttgccccttgtttctgggtaatctctgggatgtgactgaccgcgacattgaccgctacacggaagctctgctgcaaggctggcttggagcaggcccaggggccccccttctctactatgtaaaccaggcccgccaagctccccgactcaagtatcttattggggctgcacctatagcctatggcttgcctgtctctctgcggtaaccccatggagctgtcttattgatgctagaagcctcataactgttctacctccaaggttagatttaatccttaggataactcttttaaagtgattttccccagtgttttatatgaaacatttccttttgatttaacctcagtataataaagatacatcattt

SEQ ID NO: 1221 - DNA, 4792 bp, Homo sapiens
  Genbank Accession No. D79994
ctcaaatatgtggatgacatacagaagggaaataccatcaaaagactgaacatccagaagaggcggaagccgtccgtgccatgcccagaacccaggaccacatctggtcagcaaggtatatggacttccactgaatccctctcatcctccaacagtgatgacaacaagcagtgccccaacttcctcatagccagaagtcaagttacatcaactccaatctcaaagccacctccccctctggagacctcactcccttttcttaccatcccagaaaatcgacagctgccacctccctcaccacaactcccaaagcataaccttcatgtcaccaagacactgatggagacccggagaagactggaacaggagagagccaccatgcagatgacaccgggtgagttcagaaggcccaggctggccagttttggaggcatgggcaccacaagctccctcccttcttttgtgggttctggaaaccacaatcctgccaagcaccagcttcagaatggataccaaggtaatggggattatggtagctatgccccagctgctcccaccacttcctccatggggagctccatccgccacagccccctgagctcagggatctccaccccagtgaccaacgtgagccccatgcacctgcagcacatccgcgagcagatggccattgctctgaaacgcctgaaggagctggaggagcaggtgcgaaccatccctgtgctccaggtaaagatctctgtcttgcaagaagagaaaaggcagttggtctcacagctgaaaaaccaaagggctgcatcccagatcaatgtctgtggtgtgaggaagcggtcctatagtgcggggaacgcctcccagctggaacagctctcccgggcccgaagaagtggcggggaattatacattgactatgaggaggaagaaatggagaccgtagaacagagcacgcagaggataaaggagttccggcaacttacagcagacatgcaagccctggagcagaagatccaggacagcagctgtgaggcctcctcagagctcagggagaatggagagtgccggtctgtggctgtgggtgccgaggagaacatgaacgacatcgtcgtgtaccacagaggctccaggtcctgtaaggatgcagctgtagggacacttgttgagatgagaaattgtggggtcagcgtgacagaggccatgcttggagtgatgactgaagctgacaaagaaattgagctccaacagcagaccatagaagccttgaaggaaaagatctatcgcctagaagtacagcttagagaaaccacccatgaccgggagatgactaaactgaaacaagagctgcaggctgctggatcgaggaaaaaggttgacaaagccacgatggcccagccgcttgttttcagtaaggtggtggaggcagtggtgcagaccagagaccaaatggtcggcagtcacatggacctggtggacacgtgtgttgggacctccgtggaaacaaacagtgtaggcatctcctgccagcctgaatgtaagaataaagtcgtagggcctgagctgcctatgaattggtggattgttaaggagagggtggaaatgcatgaccgatgtgctgggaggtctgtggaaatgtgtgacaagagtgtgagtgtggaagtcagcgtctgcgaaacaggcagcaacacagaggagtctgtgaacgacctcacactcctcaagacaaacttgaatctcaaagaagtgcggtctatcggttgtggagattgttctgttgacgtgaccgtctgctctccaaaggagtgcgcctcccggggcgtgaacactgaggctgttagccaggtggaagctgccgtcatggcagtgcctcgtactgcagaccaggacactagcacagatttggaacaggtgcaccagttcaccaacaccgagacggccaccctcatagagtcctgcaccaacacttgtctaagcactttggacaagcagaccagcacccagactgtggagacgcggacagtagctgtaggagaaggccgtgtcaaggacatcaactcctccaccaagacgcggtccattggtgttggaacgttgctttctggccattctgggtttgacaggccatcagctgtgaagaccaaagagtcaggtgtggggcagataaatattaacgacaactatctggttggtctcaaaatgaggactatagcttgtgggccaccacagttgactgtggggctgacagccagcagaaggagcgtgggggttggggatgaccctgtaggggaatctctggagaacccccagcctcaagctccacttggaatgatgactggcctggatcactacattgagcgtatccagaagctgctggcagaacagcagacactgctggctgagaactacagtgaactggcagaagctttcggggaacctcactcacagatgggctccctcaactctcagctcatcagcaccctgtcgtctatcaactctgtcatgaaatctgcaagcactgaagagctgaggaaccctgacttccagaaaaccagtctgggtaaaatcacaggcaattatttgggatatacctgtaagtgtgggggccttcagtcaggaagtcccttaagctcccagacatcccagcctgagcaagaagtggggacctcagaaggaaagccaatcagcagcctggatgccttccccactcaggaaggtacgctgtctccagtgaacctgacagacgaccagatcgccgctggcctctatgcatgtacaaacaatgaaagtacactgaagtccatcatgaagaagaaagatggtaacaaagattcaaatggcgcaaaaaagaatcttcagtttgttggcattaatggagggtatgaaacaacttcaagtgatgattccagctcagatgaaagctcttcttccgagtcagatgacgagtgtgatgtcattgagtatcctcttgaagaagaggaggaggaggaggatgaagacactcggggaatggcagaagggcaccatgcagttaatattgaaggtttgaagtctgccagggtggaagatgaaatgcaggttcaagaatgtgaacctgagaaggtggaaatcagagagaggtatgaattaagtgaaaagatgttgtctgcatgcaacttactgaaaaatactataaatgaccccaaagctttgaccagcaaagatatgaggttctgtctgaacaccctccagcacgagtggttccgcgtgtccagtcagaagtcagccattccagccatggtgggggactacatagctgcttttgaggccatttccccagatgtcctccgctatgtcatcaacttggcagacggcaacggcaacacagccctccattacagcgtgtcccactccaacttcgagattgtgaagctgctgttagatgccgatgtgtgtaatgtggatcaccagaacaaggcaggctacacccccatcatgttggcggccctcgccgctgtggaagcagagaaggacatgcggattgtggaagaactctttggctgtggggatgtgaatgccaaagctagtcaggcgggacagacggccctcatgctggcggtcagtcacggacggatagacatggtgaagggccttctggcctgtggggctgatgtcaacatccaggatgacgagggctccacggccctcatgtgtgccagcgagcacgggcacgtggagattgtcaagctgctgctggcccagcccggctgcaacggtcacctagaggacaacgatggcagcactgcgctctcaatcgccctggaagcaggacacaaggacatcgctgttcttctgtatgcccatgtcaactttgcaaaagcccagtctccgggcacccctaggcttggaaggaagacgtctcctggccccacccaccgaggttcatttgattgattgtatgcaaatagccctttatttacatgccactattaagctgctaattgttcctgttggggtgacagatactgaatgtatacgtattgtgcctgagctcaccagcaaacagaagcatcaagcccaggggtaaaggctgaagctttcacagtgcagagactgctagcctgggcacacgcacctcctttctggccgtcttctgtgtagggcacactttaacccagtctctgttgctgttgagtctctgctccgttttgtacagtcacagggaattctgatctgaaggggcaccttctgttcactcccacaaagtggtgtctggttctcactgagacgttttaagatttttccacaaatatttatatgtactaaatgtggaaccattagaaagttcttccaaaatctcattccagcatagttttggatttttcttttgtcttattttaaaataaggaagtcgagatgactttgatcattggtaacttgggcctgggccagacaaagtataaaacttacaaaagaatattctcatttggtcttaactaggtagatgtaatatatgactttttataaaaagggtatctatatgaacttgacacagtattttcagcttttgtattccatactaaagccatgaagaactacacgtaacatcatcatttgtattaattgcacaactccaatgctaaaggttggattgtgttagaggaatcggctctgtatttgcctctagagaaacacagtgttctctttgtatttatggattcctttttaccgtgtcacatttactttggtcctctatgtatttaaatgtttgaagtgccttagactcttgccatattttcaaaataaaattccattaagctct

SEQ ID NO: 1222 - DNA, 2047 bp, Homo sapiens
  Genbank Accession No. D83174
gtcgcggctcgagagcgagagtcacgtcccggcgctagcccagcccgacccaggcccaccgtggtgcacgcaaaccacttcctggccatgcgctccctcctgcttctcagcgccttctgcctcctggaggcggccctggccgccgaggtgaagaaacctgcagccgcagcagctcctggcactgcggagaagttgagccccaaggcggccacgcttgccgagcgcagcgccggcctggccttcagcttgtaccaggccatggccaaggaccaggcagtggagaacatcctggtgtcacccgtggtggtggcctcgtcgctggggctcgtgtcgctgggcggcaaggcgaccacggcgtcgcaggccaaggcagtgctgagcgccgagcagctgcgcgacgaggaggtgcacgccggcctgggcgagctgctgcgctcactcagcaactccacggcgcgcaacgtgacctggaagctgggcagccgactgtacggacccagctcagtgagcttcgctgatgacttcgtgcgcagcagcaagcagcactacaactgcgagcactccaagatcaacttccgcgacaagcgcaggccgctgcagtccatcaacgagtgggccgcgcagaccaccgacggcaagctgcccgaggtcaccaaggacgtggagcgcacggacggcgccctgttagtcaacgccatgttcttcaagccacactgggatgagaaattccaccacaagatggtggacaaccgtggcttcatggtgactcggtcctataccgtgggtgtcatgatgatgcaccggacaggcctctacaactactacgacgacgagaaggaaaagctgcaaatcgtggagatgcccctggcccacaagctctccagcctcatcatcctcatgccccatcacgtggagcctctcgagcgccttgaaaagctgctaaccaaagagcagctgaagatctggatggggaagatgcagaagaaggctgttgccatctccttgcccaagggtgtggtggaggtgacccatgacctgcagaaacacctggctgggctgggcctgactgaggccattgacaagaacaaggccgacttgtcacgcatgtcaggcaagaaggacctgtacctggccagcgtgttccacgccaccgcctttgagttggacacagatggcaacccctttgaccaggacatctacgggcgcgaggagctgcgcagccccaagctgttctacgccgaccaccccttcatcttcctagtgcgggacacccaaagcggctccctgctattcattgggcgcctggtccggcctaagggtgacaagatgcgagacgagttatagggcctcagggtgcacacaggatggcaggaggcatccaaaggctcctgagacacatgggtgctattggggttgggggggaggtgaggtaccagccttggatactccatggggtgggggtggaaaagcagaccggggttcccgtgtgcctgagcggaccttcccagctagaattcactccacttggacatgggccccagataccatgatgctgagcccggaaactccacatcctgtgggacctgggccatagtcattctgcctgccctgaaagtcccagatcaagcctgcctcaatcagtattcatatttatagccaggtaccttctcacctgtgagaccaaattgagctaggggggtcagccagccctcttctgacactaaaacacctcagctgcctccccagctctatcccaacctctcccaactataaaactaggtgctgcagcccctgggaccaggcacccccagaatgacctggccgcagtgaggcggattgagaaggagctcccaggaggggcttctgggcagactctggtcaagaagcatcgtgtctggcgttgtggggatgaactttttgttttgtttcttccttttttagttcttcaaagatagggagggaagggggaacatgagcctttgttgctatcaatccaagaacttatttgtacattttttttttcaataaaacttttccaatgacattt

SEQ ID NO: 1223 - DNA, 4829 bp, Homo sapiens
  Genbank Accession No. D86425
atggagggggaccgggtggccgggcggccggtgctgtcgtcgttaccagtgctactgctgctgcagttgctaatgttgcgggccgcggcgctgcacccagacgagctcttcccacacggggagtcgtggtgggaccagctcctgcaggaaggcgacgacgtaaagctcagccgtggtgaagctggcgaatcccctgcacttcttacgaagcccgattcagcaacctctacgtgggcaccaacggcatcatctccactcaggacttccccagggaaacgcagtatgtggactatgatttccccaccgacttcccggccatcgccccttttctggcggacatcgacacgagccacggcagaggccgagtcctgtaccgagaggacacctcccccgcagtgctgggcctggccgcccgctatgtgcgcgctggcttcccgcgctctgcgcgctttttacccccacccacgccttcctggccacctgggagcaggtaggcgcttacgaggaggtcaaacgcgggcgctgccctcgggagagctgaacactttccaggcagttttggcatctgatgggtctgatagctacgccctctttctttatcctgccaacggcctgcagttccttggaacccgccccaaagagtcttacaatgtccagcttcagcttccagctcgggtgggcttctgccgaggggaggctgatgatctgaagtcagaaggaccatatttcagcttgactagcactgaacagtctgtgaaaaatctctatcaactaagcaacctggggatccctggagtgtgggctttccatatcggcagcacttccccgttggacaatgtcaggccagctgcagttggagacctttccgctgcccactcttctgttcccctgggacgttccttcagccatgctacagccctggaaagtgactataatgaggacaatttggattactacgatgtgaatgaggaggaagctgaataccttccgggtgaaccagaggaggcattgaatggccacagcagcattgatgtttccttccaatccaaagtggatacaaagcctttagaggaatcttccaccttggatcctcacaccaaagaaggaacatctctgggagaggtagggggcccagatttaaaaggccaagttgagccctgggatgagagagagaccagaagcccagctccaccagaggtagacagagattcactggctccttcctgggaaaccccaccaccgtaccccgaaaacggaagcatccagccctacccagatggagggccagtgccttcggaaatggatgttcccccagctcatcctgaagaagaaattgttcttcgaagttaccctgcttcaggtcacactacacccttaagtcgagggacgtatgaggtgggactggaagacaacataggttccaacaccgaggtcttcacgtataatgctgccaacaaggaaacctgtgaacacaaccacagacaatgctcccggcatgccttctgcacggactatgccactggcttctgctgccactgccaatccaagttttatggaaatgggaagcactgtctgcctgagggggcacctcaccgagtgaatgggaaagtgagtggccacctccacgtgggccatacacccgtgcacttcactgatgtggacctgcatgcgtatatcgtgggcaatgatggcagagcctacacggccatcagccacatcccacagccagcagcccaggccctcctccccctcacaccaattggaggcctgtttggctggctctttgctttagaaaaacctggctctgagaacggcttcagcctcgcaggtgctgcctttacccatgacatggaagttacattctacccgggagaggagacggttcgtatcactcaaactgctgagggacttgacccagagaactacctgagcattaagaccaacattcaaggccaggtgccttacgtcccagcaaatttcacagcccacatctctccctacaaggagctgtaccactactccgactccactgtgacctctacaagttccagagactactctctgacttttggtgcaatcaaccaaacatggtcctaccgcatccaccagaacatcacttaccaggtgtgcaggcacgcccccagacacccgtccttccccaccacccagcagctgaacgtggaccgggtctttgccttgtataatgatgaagaaagagtgcttagatttgctgtgaccaatcaaattggcccggtcaaagaagattcagaccccactccggtgaatccttgctatgatgggagccacatgtgtgacacaacagcacggtgccatccagggacaggtgtagattacacctgtgagtgcgcatctgggtaccagggagatggacggaactgtgtggatgaaaatgaatgtgcaactggctttcatcgctgtggccccaactctgtatgtatcaacttgcctggaagctacaggtgtgagtgccggagtggttatgagtttgcagatgaccggcatacttgcatcttgatcaccccacctgccaacccctgtgaggatggcagtcatacctgtgctcctgctgggcaggcccggtgtgttcaccatggaggcagcacgttcagctgtgcctgcctgcctggttatgccggcgatgggcaccagtgcactgatgtagatgaatgctcagaaaacagatgtcaccctgcagctacctgctacaatactcctggttccttctcctgccgttgtcaacccggatattatggggatggatttcagtgcatacctgactccacctcaagcctgacaccctgtgaacaacagcagcgccatgcccaggcccagtatgcctaccctggggcccggttccacatcccccaatgcgacgagcagggcaacttcctgcccctacagtgtcatggcagcactggtttctgctggtgcgtggaccctgatggtcatgaagttcctggtacccagactccacctggctccaccccgcctcactgtggaccatcaccagagcccacccagaggcccccgaccatctgtgagcgctggagggaaaacctgctggagcactacggtggcaccccccgagatgaccagtacgtgccccagtgcgatgacctgggccacttcatccccctgcagtgccacggaaagagcgacttctgctggtgtgtggacaaagatggcagagaggtgcagggcacccgctcccagccaggcaccacccctgcgtgtatacccaccgtcgctccacccatggtccggcccacgccccggccagatgtgacccctccatctgtgggcaccttcctgctctatactcagggccagcagattggctacttacccctcaatggcaccaggcttcagaaggatgcagctaagaccctgctgtctctgcatggctccataatcgtgggaattgattacgactgccgggagaggatggtgtactggacagatgttgctggacggacaatcagccgtgccggtctggaactgggagcagagcctgagacgatcgtgaattcaggtctgataagccctgaaggacttgccatagaccacatccgcagaacaatgtactggacggacagtgtcctggataagatagagagcgccctgctggatggctctgagcgcaaggtcctcttctacacagatctggtgaatccccgtgccatcgctgtggatccaatccgaggcaacttgtactggacagactggaatagagaagctcctaaaattgaaacgtcatctttagatggagaaaacagaagaattctgatcaatacagacattggattgcccaatggcttaacctttgaccctttctctaaactgctctgctgggcagatgcaggaaccaaaaaactggagtgtacactacctgatggaactggacggcgtgtcattcaaaacaacctcaagtaccccttcagcatcgtaagctatgcagatcacttctaccacacagactggaggagggatggtgttgtatcagtaaataaacatagtggccagtttactgatgagtatctcccagaacaacgatctcacctctacgggataactgcagtctacccctactgcccaacaggaagaaagtaagtacagtaatgtaaaggaagacttggagtttacaatcagaacctggaccctaaagaacagtgactgcaaaggcaaagaaagtaaaaaaggaattggccattagacgttcctgagcatccaagatgaacattttgtagtgcaaaaagacttttgtgaaaagctgatacctcaatctttactactgtatttttaaaaatgaaggttgttattgcaagtttaaaaaggtaacagaattttaactgttgcttattaaagcaacttcttgtaaacatttatcattaatatttaaaagatcaaattcattcaactaagaattagagtttaagactctaaacctgatttttgccatggattccttctggccaagaaattaaagcacatgtgatcaatataacaatataatcctaaaccttgacagttggagaagccaatgcagaactgatgggaaaggaccaattatttatagtttcccaacaaaagttctaagattttttacctctgcatcagtgcatttctatttatatcaaaaggtgctaaaatgattcaatttgcattttctgatcctgtagtgcctctatagaagtacccacagaaagtaaagtatcacatttataaataccaaagatgtaacaattttaaaattttctagattactccaataaagtgttttaagtttaaaaaaaaaaaaaaaaaaaaaa

SEQ ID NO: 1224 - DNA, 4249 bp, Homo sapiens
  Genbank Accession No. D86961
gggaaagcgaggagccgcggcggcgtggagccggcgggcccgggcgggggctccccggagccctaccaccccaccctgggcatctacgcccgctgcatccggaacccaggggtgcagcacttccagcgggacacgctgtgcgggccctacgccgagagcttcggcgagatcgccagcggcttctggcaggccacagctattttcctggctgtgggaatctttattctctgcatggtggccttggtgtccgtcttcaccatgtgtgtacagagcatcatgaagaaaagcatcttcaatgtctgtgggctgttgcaaggaattgcaggtctattccttatcctcggtttgatactctaccctgctggctggggttgccagaaggccatagactactgtggacattatgcatctgcctacaaacctggagactgctccttgggctgggccttttataccgccattgggggcacagtcctcactttcatctgtgctgtcttctctgcacaagcagaaattgcaacctctagtgacaaagtacaggaagaaattgaagaggggaaaaacctgatctgcctcctttagtttggaagagacaatgccattttctcccttgagtaatcttgtgaaacagtccacagtttcatcatttgagtcaagtggagaactaacctttacctaccaaagccacgttccacggcccgaggcttaaacaggaccaatgagaggccacatccagctacgcaaagttactggacatgcggtctgcagtgcacattataaggaatggaacatgaaaatagtatataatcctagacctggagttgccaagttctgtcagactccatctcccccaggttcaatgatggatgataatctaaatcattagggcagcagtttctctggtaacggaagagaccgtccgccagatctgcaggctgtttctgctccaacactgcttgcttgtgagcatctctgcctcagaatggggttttgggttggagttcttgttttcctctgttctttcaagttgtctccaacgaacagaaaactataaacttactggggacaggatgtgtgctaaagggcacagcaagacactgtcttttgcttagctgaccaaaggggtcagcagggatggcgtggagtcatgctgtggaacttattctaggctgaatcctagggtaaggtggatcaactgaactgtcactccagagattttagaaatttgagtaaagaaacaataaggacctatacaatcatatgagaacaaaaatatgaaatcttgctagtgaagacgtattttttcttcttcccagcagccaggctagcaccagttctggcccagtctcctcttcttctggagatcacatgtttttcttctaaggttaggattgtgctttgactgcgaaaggaaacctcactgtttcctccttccagggactgaggtctccaagctagctgtggcttatgcagatgttcactgggaggacctgccagaatctcggcacttggggggagacctttactcccagtttggtgaccatgctgtagtcagctctatttccaatcccgacagtagcagaatggcattctacaacaaaaagaagctagttatgggagttaagtttttgtagttactggtgttgatcctgaaagcagactgagataacattaaattgctgcaactgaagaactgcagccaagaccttaattccaggaaagcacagaggacaaagttaattcaaaaagaggcgctagatcaaggtcacagcactgcctacacctgtttacaaaaagaatcaaataccactatgaataaggattcaggggtttttaatctactttccataaattaccaatatcactgattcaggaagatagtatctcagaatgaccagagcagcacagaaacaagctactctgacattatgggagcttcaaaattgtatcatgatacagaaacactccttagcactttaagaaagtgagatggaactgccagatttctggaaggagaaaaagtgtaggtatttgggttcattaatctgctcacttgaggactttgttttgaaaaagtaccttctgtggacaaggtattgtgctaccagctatacaaccctgacttcagagtttgcaaccttgccctgagtgaatcatgttaaagctgtctgagtctaaagcaccgtatcttggtgcagaacagataattatacagagatggaatgggacaaccgcagttttactacattctggtgtttggcctatatgagaaaccatcttctcacagattaagggctaagggcaaaaggggtgggaggtgtggaactagccttaatgagtttcccattcctgaaccaaaattcaaagtgagtgagatgtaaatcctgtgattttggtgaagaaaaaaacgggtatcttcatagcagcctaggaaaccttaaccatatctctaacaccacacagaaagaggctggaggagccactggacaaagcttctgtctctgtgtgtacatttataatgttctaaccaagtctcaaaccttgatgaaaaacacaaaatttttccataaacttatcagaagactcacttttctttctttcttggatagagaaaccattttctgacactaggtttacaatctcagtgtccttacaagttaagtcctaagctcacaggatcctccgagcatgtccatcacctgctctttggctaaggtggcagtgtacctctagatcaacctgggaacagtcacaagggagtgtgacttcttggccataataaactcactcgatagtgtttatgttattaatctgaatgcaacagaagacaaaagcacaggcatgcacacacacagaaccccaaaccactaaaaactacctaaacactgacttagtaaatagtaaaaaggtaatgttgggacttttaaaccttgaatccattagccaggcttgggatgaaaggaccatctaaaatcatgctagtctaaaccatgctcttccacacagctgtttaaaaaccactgggtatgaggaatatgctagaaagaaatgttaaaaatagattgttggctcacacttatttttctaataaataggaccattattactaccaggaaagtcttatttattttgcctgaaattggcttaaagaaagtctcatgacgggatgggatgggctgcgcttctcaatgaactctgaggcagaaatatttgccttggattctgtggattctttaaacctgtgtgctaataattcaaacaatgttgcattaattgtataagggtttttgtatagttttcaaacatctgtggtgtaatgatctttgttaaacatatattctgtaaagtgccatagtctttttttatgtgtagcatatttaaaaatatatatgtatattatacatacacaagtttgtgtgaaagatgtgcaataacaaaggtgtatgtatgttttgttgttttgttttggaaactggacaggagtcaaaacagggatgtttgtttctgttttggcaaaggagagttccacatttttgccttcatggcttattcagtaacccataattttaatgctacacaaatcttatgtgaagaaaagactggtatgaaatcattttttcctgggtctaaaataatcgctagtgttatgtcaaagttaagcccgcacgccaggcccagttaatgctagtctttcatgtgaaatgtgaagctgccatgttgccttttctcttagtaggataactagtagctggtacataatcactgaggagctatttcttaacatgcttttatagaccatgctaatgctagaccagtatttaagggctaatctcacacctccttagctgtaagagtctggcttagaacagacctctctgtgcaataacttgtggccactggaaatccctgggccggcatttgtattggggttgcaatgactcccaagggccaaaagagttaaaggcacgactgggatttcttctgagactgtggtgaaactccttccaaggctgagggggtcagtaggtgctctggagggactcggcaccacttgatattcaacagccacttgagccaaatataaaattgtatttacagctgatggactcaatttgagccttcaaacttgtagttatcctattatattgtaaactaatacattgtctagcattgatttggttcctgtgcatatgtattttcactatgtgctcccctccccagatcttaattaaaccagattttgcaattc

SEQ ID NO: 1225 - DNA, 5217 bp, Homo sapiens
  Genbank Accession No. D86980
ctcggggccacggtccccccgcagcgctagtcccgggcccgcgagcaccggcccccgccacccgcaggttgcggagggaggagggcgggagcgggcggcgcggagccgggaggcgggggaggggccggcgtccgaggcggcggcggcggcggctggagcagcctctggcagcagcggggagaatgggagtgcggggcgccagaccgccgcggggtgtcacggccgccacgaagcctgcgaggcgcggggccggcgcccgcggcttttaaacccgggaaggcgcggcggcggcggcggcggcgggcagatcgcggcgcgcaccaggcgccggggcggcggccgaatggagagaaagggctcggcggccggggccaaggggaacccgagcccgcccgcggccggagaggggcagcggccaccgccgccgctgtgcgtcccgggcggcggcggaggagccccagcgaggggccaggtcggggcggcggccgagccggccgagctcatccgacgagcgcacgagttcaaaagccaaggggcgcagtgctacaaggacaagaaattccgtgaagccataggcaaataccaccgggcgttgctggagctgaaggggctgctgccgccccccggggaacgggagcgggactcgcgcgcggcctccccggctggggccctgaagcccggccgcctctcggaggagcagagcaagacggtggaagccatcgagatcgactgttacaacagcctggcagcctgcctgctccaggctgagctggtaaactatgaacgagtcaaggaatattgcctcaaagtcttgaagaaggaaggggagaacttcaaggccctttaccggtctggtgtggccttctaccaccttggggactatgacaaagcactctactacctgaaagaagcaaggacccaacaaccaacagacaccaacgtgattcggtatatccagctgacggagatgaaactcagccgatgctcccagagagaaaaagaagccatgtaaccaggaagcagctccagagctgcgcccacgcctgaccggggacttccaggcatcccctggcagagagccccgtcctggattctgtccctttctccccacttcttctggctcctcatttttcctcctgttgcaccccagctctttgtctcctcccagtacgaaaaggagagatgcaaatttggaatctggtaggtcgcccagacaatggagacatcctctcctctagcaggtcagcgactgagaggggcctgacttctgctgggacagctggagaggagtctcatgggctgggatgctgttgtggctttgactttggccagtgcttctgacagaggcggagcctggcaagtgtaccatcccacaggcagcaggcacacagcccatgggctggatccttccacactttcctgacagaccagaaccagagcatctcgaggcaactgttagaaatccagggacgagacaaacagagaagcgctggtgaagccaacatagagactgtcaatgtgtacactggagttcccacccccaccccccacccgtcacttagcccctgcctccttcccccactcgttgtcttggcttgtgctttctcctctccccatcggggatccgagactctgccaggattcacatgccactgaagcccactcagtgccctctggtgaccacacataccattcccccggactcccacccagcaggcagctgtgaccgcagaagggcaggatgaagtgggccaaggtttgggacaggttgactgtgtaggtgacagggagggaaagatgatggccaggggaaagagcatcgtataggctaggggattgaactgtggactgattccgtgtaaataaaaataaattaacaggtagtagttcctgtcagttctgttggaagcagcccactccctcacttttactccttcctccaaccctcaatcagagctacttacagccaggcaggatggggctttccccaaagcaattggccgtttgtccagtggcagacaatggtggctacagcctttgtgcttttaagagtgggctgggattgtggagactgcccaggggcttggctttgtcagaacttgtacaatcttcttttgatgaaattatctgaactcaacatctagcacatagaatgtgttcaacaaatgcttgttgaatgaataaattatgactgcagactggctctcctgccttaaactaatttcatcccagcctagtctcctgatgtctgtgctcgttatgctatgccatgttgcttcagtcaaacaagaaacacttactgagggcatattgtttgcccatcattgtgcaatatgctgtgggacatgggatgtcgtctcagtcttcaaggaaatggaagggttaagaaatgcatatgagattattaccaatgacacctttaatttatatgatgctttaaaattatcagagcactttcatgtatttttcgtgtgactagtgaaaaagacaatgttgtacaaaattaaaatatatacagatgcaataatgtgaatagttaggatttattaaatgcattatcttcagatctttacatgtataatctcatttctttcatgcagttactctgggatactgttcccatttgatgggtaagaatattgaaaaccagaaaaattaattatcccaaggttgcatggcctttagtggcatagctaggatttgaaccaggcctgcctgactccagagctctggctagtatctatgctatacttagttgcctctctataagtataatattgggcaattataaccatttgagaacaggacaatatgtattaacctgaaaagtgttcatgatgtcagtgatagtacatggcctccttatgtatttactcaagggccccaaaagaccagaggccagaatccctagtagtcagagcagtgacaggtcagaaaaaggcagctgaggtccaatagttatgtctgtgtattgctcattctacttactgatggagccagcatgtatctcaacaactcacctagcattcatcacccatccccagcattgggaaagggtcacaattaagaccgaaaggaaacacaaagttaaatatgggttaattatgtaagcagatgccccaccacggcaggatccaatcacagccgaggggcccagaagagagcagcgtaagttatattcacatagttccccaaaggctttcaacgggggctacaggaaggtgctagaaatattgaggggcctgccattactcacctagagctcactctctggagaagaggaaaaggaagaagctatttccgctgccacattctccccaatccctactatattatgctgtctttcctcttcctcctagctggctttacatgaccctaacccaaaactaccctatggccccacacgggaatgtgttcaaacgccccgacccccacccccacccccattcccaagcctccaacttagaacgtttgtgatttggcagatggtttgttaggatctgaaggatgaagagaagggtagaggtcacctggagaatgagttcaaactgccagggtcttcccttggtctttgtgcgtcaggaaggactccgagtaattattccctatgcagagacaggagagaggtcttgtttacatgagtgtgctggggcagggctggacaatccaggatatgattgtagccatcccatgtagaaagatcaaaaaccagaacgaaatgaagacagcctctcagaacctcatagaacaagcgtccaggtcatctgcttgtttggtgacttagatatacaggcttactggaactccattcactgtgacctgaagttaaataatcccaaagagaaaaagctacctggggtattggttgatgtttggggtgatagggctgaattttctgtgcatttgtccaacaaaggctttagagcacaaaaccaggttcattctccctaccaaatcttcagcttccttctcctcatccctccccaaaacaagaactgtgatttaattccgtacgttgcggatgtcactgctgacctatgtagctggagtactaatcaggcatctgacctgcactgtcatcccctgcctggacttttgcgatggactctttgggggaaaaactaacgctttttaattattgtgaaagcatcatgtgtgtattgtagaagttttaggaaaaaaaggacaaaatccaatccataagcttaccacccaagacaaacgtgtattcttttgaatataccttttagttctttttggtgtaaatgtacacacgcacacacagttgtggatttttttaaacaaaaactggatacactgaatatactctttaataacttttcaagtgtgtatttatattttagaatatgtaatcctacacagatacaaaattcaaaaagtacaaactgctctgtagtcagaagtaaatcttctccctaccccgtctgccagcatctagtttccctctaatttattttgcatcctagtggagatgcttacacattgtcaaacatatgtatatattcttttatcacacacaaatggcagcatattggacactttttgttttttgctccttctgttccttcacttaataatatcacgaacattttcggcatatcaaactttctcaacagcatcttcattgtatggatggaccctttttttatcatcaatcctcaaatagtgattatttcatttgttcccaatcttcattgtaaatagtgttgcaactgacattcttgtagctaaattttgcacatgtctataacgatttccttaggataaactccaagaagagacttgcttggctatttttaagaattttgatacatgttgccaaccaccctccagaaagtttgtaccaaaacgctctcctatttggatcctagagagtaccctgtttcctgcaccctaacactaggtatcatcacttatcaaatctttcccaatttggtagctgggataatagtatgtcaatgttattttaactttctttgattcttcgcgaataacattttcatatgcttattgaccatttgtacttctttctttgtgaattttctatttatttgatattggtatgtttattatcaatttgtaattttattaagaatattatttttgtcaagaaatgctgcaaatatgctttccaagtgctttgctttcaaattttgtttatggtgctttttgacatacataaattcttaattctgc

SEQ ID NO: 1226 - DNA, 576 bp, Homo sapiens
  Genbank Accession No. H04627
  unsure (1)..(576): n = a or c or g or t
caagccctcccttgatccatagctttgtttctaaagtgccttggaatgcacctatagcagatgaagatcttttgcccatctcagcacatcccaatgctacacctgctctgtcttcagaaaacttcacttggtctttggtcaatgacaccgtgaaaactcctgataacagttccattacagttagcatcctctcttcagaaccaacttctccatctgtgacccccttgatagtggaaccaagtggatggcttaccacaaacagtgatagcttcactgggtttaccccttatcaagaaaaaacaactctacagcctaccttaaaattcaccaataattcaaaactctttccaaatacgtcagatccccaaaaaganaatagaatacaggatagtattcggggccattttaggtgctattctgggtgtctcattgcttactcttgtggggctacttgttgtgtnggaaaaagggaaacgtattcattttccatcggcgactttatgacggcaggaatganccagttctgcggttaggcaattcaccnggaccttatggtgtgagtttngggattctagc

SEQ ID NO: 1227 - DNA, 517 bp, Homo sapiens
  Genbank Accession No. H04885
  unsure (1)..(517): n = a or c or g or t
gaggtcgtgacaggctcagcnggtggtctggaggggactcggaaataaattgtagcagctttcctgccgctggccctccccctgccaccctgtcgggtttccctgtttgggggtgggagcgtggaggagcccctggcagttggtggccagtgtagggctggccaggtnctggaggacatgcataccccagcactggtgagtggcaggaccacggggaggtggcacaggcctccctggagcnggattatctcggccccgccccccttcatttgggctcccgctgtgggcctggcctgggctgtgagcacagcttgccccnacctccggccatggctgtgnctggtgggtncgccggatgggagcccggggctcttgcttcctttncccgggaagttggttgcttccgggtngggaggnacagcattggnacaagaggggttttntttccanaggctgttcaagcaaagttnaagttgattccctgacaaagaagcatntgttttcccggngaacttgc

SEQ ID NO: 1228 - DNA, 443 bp, Homo sapiens
  Genbank Accession No. H05391
  unsure (1)..(443): n = a or c or g or t
caactagactctgtgtgtgtattcaggaaaaatgaaaataaatttttaaaaattgggagtggaatgggcagattagggggaacaaagtcattttggtcatggaacatccatttgcttaaccaaggagacttgcttctatctgaggaatttcccacttagtagaaagaaacactcttccctgggaatgtttgtttctgtctctctcaatgctactctctttcatattctcatttgctcaccctttcacttagagccaccgttttctcatcccattctatgaacttatttccaaattctcctaactattcctgagttttgaagtatttgttttgtaccctctctgcttccggttttttgtttggggtgggctttttnggagataggggtcttgtggatgttggcccacaatgggtctcgaggccccggggntaaagtgatccctc

SEQ ID NO: 1229 - DNA, 526 bp, Homo sapiens
  Genbank Accession No. H07125
  unsure (1)..(526): n = a or c or g or t
tttttttttccagacagagtcacgctcttgtcacccagtgcagtggcgcaatcatagctcactgcagccttgagctcctgggctcaagtgatcctcctgcctcagcctcccaagtagctgagactgaaggcacatgacagcatgcccggctaattttttatttttttgaaatgggtctggctggtctcaaactcctgggctcaagtgatcttcttgcctcagcctcccaaagtgctgggattataggtgtgagccaccacacgtggcccggaatttagcttttaagaagaaatctctaaaggaattttttttttaagttagtccccaaaagtggggggaaatgggagttcagaagtcacgagtttagggtcaaagtaaatccaacatgtttccagattcccctattcttcattaagatatggcntttttcagtgggcccagcccagccagtttaaggcacacacagccttgacctgaccggggttccattcccagttgccccagggtttccnggtggtcagcacca

SEQ ID NO: 1230 - DNA, 430 bp, Homo sapiens
  Genbank Accession No. H07855
  unsure (1)..(430): n = a or c or g or t
tttttttttttttttttaatattgctgagaatgtagggtaagggacactcccatgcactgcaggttagttgtcaggctggtaacactgttggaaggatgatttgatcacaacttaaaatgaaggtagcctatgatccactcttagacttcttgaaattcttcaaatcaggcaagcctaggttgactggaaaaacagacaatgatgtaaaccaaacaacgtaataataataaaaaaaatctttttaaggaacagtgtttcttcccaggggacatagttcagagctttcctctccagcttcactttctctggggagaagccattaactgtgggtggggttccacaccggggaagggcagtctggaccnggggaccacgggtgtctcgccatgggtgaacatggccccacgtnggttttgggcccaatgttct

SEQ ID NO: 1231 - DNA, 531 bp, Homo sapiens
  Genbank Accession No. H09620
  unsure (1)..(531): n = a or c or g or t
tttttttttttntttttaagcacatgggaggagtgactttattcacaataggtaaaataaacataattaatttttaaaaggagaacaaatgaaattaagatagataattgcaataatcaataatattgttggtttaattcataaattaaagttcaagcctgatgccataactcataggtcttatatttatttttcccttatcctgttaaaagatgtgtgaggcagcccgagatataatttttgcctattcttttctcatccatgaggcatgaaatatcagccctaccgagtaatgtgggagcaaatctattccagttaaaacttacagtgatttaagggacagacaggatgtatattcacaatatttgtggcacaattacacccggggtcaatatgcaaatggggcaaatcctncaatatnctttttcaaataggggtgagtgtncaggttcctttttaaggggtaggtggaccaantattccccaaactccttaattatttcccnaacccatancattttncactaagtt

SEQ ID NO: 1232 - DNA, 601 bp, Homo sapiens
  Genbank Accession No. H10808
  unsure (1)..(601): n = a or c or g or t
accacccttttgaaggggacacctggntcctgcggttggggctgcaggtgtgcctgacatttgcaaaagatattccagtctttcgatgttcagaattgaaaatgtggagatagaaaagcttcaaacagactcctaaaaggagggtttctttcctgaagactccaagaaaatgagtgtgcagatgagttaggcttgacaacctcaactctggggagcaggcaggcngtctgaggaagataagggcccacgccccactcacctgggcacctgttcggtggtcccggggcatcacggtctgcagctctgggcccccagccccactgtgaagtcagtcctgcatgctggccgaggcccggccacctcccgatgcctccagagtcagtgggaaggagtcagcccttcccagacttccccgccacctncagcaggagcagctcagtttgttgctctnggagcttcgttttgcaaacccaaaaaggctgtgattttgaagccaaacgnttagatgcggctgcgagtntgttttgtggcaaagnaaactntggaatgcttttggtgtctgtataagggcaaacggttcattacctttgntctttacacg

SEQ ID NO: 1233 - DNA, 481 bp, Homo sapiens
  Genbank Accession No. H11652
  unsure (1)..(481): n = a or c or g or t
ttttttttctttctccacacgtttacttttaaaaaataattgtacaaaacagaatgaattcttaaggcatatcagaaatgctgagtcccaggccggggcctgccagaccagggctgggactctgcagttgggagcttgtccagctgccccctctaatgcttttctcctccaggacacagggagcctccggaagcacagtagtccccgtgtgtcaccttaggctgacctctgtccccaggggtgacgtaatgctgtcactgtcttgaattcttcatcgtttaacagggagcccagtgttttcactttgcacattgggtatctggtcttgcctgtcctaccctgaacctgggttccctgggccatgtaacacccagggcagctctgatgcccctgggtaacttgggaggagcttcccagggaagtccaagcntgcgccaggaatctctggctttcaaagttttcaaaggttggagcggctgcc

SEQ ID NO: 1234 - DNA, 55 bp, Homo sapiens
  Genbank Accession No. H12458
ctgcgtagtacagtgccaccgctgccgtgtgcgcaaggagctcagcctctgcctg

SEQ ID NO: 1235 - DNA, 562 bp, Homo sapiens
  Genbank Accession No. H15288
  unsure (1)..(562): n = a or c or g or t
tttttttttggctttgaacactcaatttaatttaaaacaggcacaagtgcaaacaattcacaaaaatttctagggaagatgcttttgttttgaaaactctgacccttaaaaaaaagtccttgcaatttctttgcccccaggtaggtcactagggagcagaagaatctaaaaatattatctagatagaaagggtccagacacctgaagttctttcctgggaattccatctcacagcagccctgaaagtggggcagggccgaggaggacaaggagacagcagtctntggaggcagctggggcagatggtttgcacacatggatgcctgtgaccttgacatgatggaaacccggagtgggttcgccttctctcccagatagggttctgaagagaacaatgggtccctgatgacctgggttattgagataaacttgaaaaggtaacacagtttgccattcnttaacattccngtttttgggccttcacgatgcacagtacaggggaagttcagaagnctcctgagttcccggggtttttagatttagctnggccattcattggcag

SEQ ID NO: 1236 - DNA, 473 bp, Homo sapiens
  Genbank Accession No. H17938
  unsure (1)..(473): n = a or c or g or t
ttttttttacatactagatttattaaagtgaccataagtgccgaagcggttttctaatggaaagcagactggattcacaacacagaagcagaattggtggaacaggctttcgggaactttcttcccctggtcacacggcagatcggtccccaaggacaggtgctcagccaggacttttgctttaagaaggatttgtctggagaaaggactagagagaaatccagctcagatgtattgctcattcctcttcagaaggactgggtgggaatggagcaggggctagaggaatctgggaagctaattcttttagggctttttccaacagaggggaagcagagggacttctggggtctgggaagttgggagcttacggaggcgacagtggcaggcagctgggctcttgttcggggctcccggaaggtttgcaggggtttgagcccagagtgagagccacaggttncgggcgggacaan

SEQ ID NO: 1237 - DNA, 401 bp, Homo sapiens
  Genbank Accession No. H18887
  unsure (1)..(401): n = a or c or g or t
gttgttattctttttctgtttgttgcttttatcatacagaagcagtgcttacattgaattaaactaatatactcatcttttttgttttaatgcgctttgctttcttcttttcccttaaacgatccctttgaatgtctcctgatgctataattttggnaatatctagcacttaaaccaatttgaacaagaaatggtttgtacagaaagttattgtcaataatgccactaataccacaaatctttcatgttcttgattatcttttgaaaggtgatgtttgtgtcttacatctgctcttctttctcattctgcagaagggatatttcaggcatttggctatttttcaggtattcattctattttgtcggngtatggcaggnttgctctccccccgtggtattat

SEQ ID NO: 1238 - DNA, 560 bp, Homo sapiens
  Genbank Accession No. H23482
  unsure (1)..(560): n = a or c or g or t
ttttttttctatacaacgtttttaatgaataagatatcattaagaatttatattctaaacaaacaatttaaataaattttggtatttactaacttaagtattcaagaacctggtttgaagagtccaacagactgaaagtctgcttttcaagagaactatgatcgtctatcaatggagagattttcgtatttctatattctaatagttcacgatccttgcttgatgtcagtaattcattatcgactataccaatagttgcatcttccaccagaatatttgcttgatatgctccaatcggaatttcaggcaatccaatgtaggtcatgatctgccactactgaaccttgcaagnggataaaggactttcttgttcactgggattctcttatgtaggggcttaaggtggggacattttggatagggcttttcagtctaaccccagtgttgtctctcaggggcagcacatccnctttcncgtaatatagnctatggcacaagggcccacccttcaggcttgaaaacggccntccttcccccatttttcccttgncttaaaactt

SEQ ID NO: 1239 - DNA, 517 bp, Homo sapiens
  Genbank Accession No. H24861
  unsure (1)..(517): n = a or c or g or t
ctaatactggnataaagtaactaatgtttggagccaacatttgttccttgtgtcagcaaaaggatattcacattccatgatccctggctgagaattctgcctctagtctttcttacccagctgttgtctatccttgttcaattataaatactgctaagggcatttttaaaatacgatcttgtagtccttaaatttgaatccgtcagcacggtcactcataggaaaatgatcaaacaagcaagccagtcatgatttgactccttcccatctcatttcttactgccttacgctcatcctgaggtccaccttngtctcttaaaaacaccatgtgttnctcatgcctccatgtcttttcacacactgnttccatttggctctttcctncccacattnacattggaaactttttcaagcctgcagtcggaaacattgnttgtttttggataggcngcctgntggacatncctgctcaattncccagtncctacaggggnttccataggtctttgntgtggtt

SEQ ID NO: 1240 - DNA, 529 bp, Homo sapiens
  Genbank Accession No. H24953
  unsure (1)..(529): n = a or c or g or t
ggctggagtgcagtgtcgtgatcttggctcaactgcaacctccacctctcaggtttaagtgattctcatgcctcagcctcctaagtagctgggactacaggcacgcaccaccacgctcggctaatttttgtatttttagtagagacaggttttcaccatgttggccaggctggtttcaaactcctggcctcaagtgatccacctgcctcggcctcccaaagtgctgggattacaggcatgagccaccatgcctgggcctttcatccatctttaaacaaattcaatgaccatctaggagacagatgtgaccaaagtgttacaaatttctatgcattttctatgaattgctctgtgcagttcacacatggggtttcattcaccccgcaggctngtgaacttcctnttcccgtagggntgcaggtactcaggntttcagcaactacggngacccaaaaggtctaaaggggggcttgtttaaanttagggccctctcaaaaaattggttnccatcttttaaccanaccggttt

SEQ ID NO: 1241 - DNA, 462 bp, Homo sapiens
  Genbank Accession No. H28004
  unsure (1)..(462): n = a or c or g or t
tttaaatatatttttatttatttatatatatntttgcacacacacgcgaatcttatttttcctgtttctctggagaattctgactaatgcacccccattcaccatccaggcttttgaggagaaagataccaatcttagcagcagaggacactctggatagagctaggagtttgttgcagagtctgacaaaagttccctctgcagaagggatggaaggatagccttgggggttgatttaggactgggtgtatgacatgggggaaaagaaatccctgggggagctaaatgaggggaagtggaccccttatgatagtttatcagagcaatctaagaaatcatgtaggcctctaaggaaagcatcaagaatcaatgcaatttgattaattgacttaaaatatgttgaactttttcagcccccnttgtgtatttttgggngccatactccgtgcaaccattttcatc

SEQ ID NO: 1242 - DNA, 416 bp, Homo sapiens
  Genbank Accession No. H28581
  unsure (1)..(416): n = a or c or g or t
acacccagactcagtgacttttatttttcatttccctaaaagtttcccaaatatganttaaattgtcaaggataagaaatggattagccagatagtaacctacctagcgatttctctttcaaaacctttgagcaacctaccagtattattttcaaagcctctaattctacataatttatgcctgataaatttaatttagaagtccaaagtatcacgaagtcattcaactttttttttaagtctcacatgacggcgcagagccctgggcatggggggggaagctgcctgcagagntcgcgggctgtgccccgtgcattccaccggaggccacggagggctttcttcattcctgccttccttcggtcacctctctnttttaaggnaaaagggntaaggttaaatatcacattaccnaa

SEQ ID NO: 1243 - DNA, 519 bp, Homo sapiens
  Genbank Accession No. H30385
  unsure (1)..(519): n = a or c or g or t
ttttttttttttttttgggagcaggggttttattgtaaagaggncccattgtacagagcaaagtttgtttctgaacacggggggtctgggtggtgggacccanaggtccagagctgggtgaaggatgaggggtggcatcgncccatccaggncagtgggcagggcagggtaggactaaacggctgcctcccagttcccttccctgcccctcattactgggtaagagggagccaggntatttccacggatccaggngaatatagcaggagaccctcaccaccccacaccatgccccaaggatacgggaggtgccccantntggcttttgcagtcggccanntcccagcctcctcgaggagcagcctggccacacctttttcccctggagcctggaacagntggctttgggttaggaggntggaagaccccnttaccctttccagggaactnaagggacagcccgttgttcctngtaaacccnttaggnacagttaccattgcttttctntgggnttggta

SEQ ID NO: 1244 - DNA, 398 bp, Homo sapiens
  Genbank Accession No. H40296
  unsure (1)..(398): n = a or c or g or t
ggagcgggctatatactatcctcgacattcagggcccagccggcacctgaaactgccctggggatgggcctctcctggccaggccggggcaaacgcctcagcctcccctccccgggtccacatcgggggctggagagggagtggcctctctccactccagggtgctgccttaaagaaaatgggggaccatgcccacctgggcgggcctctggaggggtctgcctgtctggccgtctggctctcgagctcccccaacttctttagtattagtaagtcaggaagaaaaggggcaaagcaggaaaatgcctcccagagccccttncccggagctnggacttttgggggatnggggctngtatttnctagaaacggggcccatttgaattctnggggaccct

SEQ ID NO: 1245 - DNA, 418 bp, Homo sapiens
  Genbank Accession No. H40456
  unsure (1)..(418): n = a or c or g or t
tggcgtgcatcaatnnanccagctacttgggaggtggaggtgagaggattacttgagcccagggggtcgaggctgcagtgaactttgatggcaccactgcactccatcctaggcaacagagcaagaccctgtctgaagaaaagaagggcagaattaaacaacttatattttattttgcaaattcacaaatataggataaaaaaatgggctgggatgcaaataggaaaagaaatactgtcttttcaaaaaaggaacaaaggattaaaagtagatcttatggaaggaaagataaaagggtcaacatttaaatctaggngaaaagccntttgttaccaggggggattttttttgtggccaggtatgggggggggttccccaaaccggtttttttaaaancccgttttttcaantttttttt

SEQ ID NO: 1246 - DNA, 446 bp, Homo sapiens
  Genbank Accession No. H40497
  unsure (1)..(446): n = a or c or g or t
cgcgcgtctcggctgccnngntgtacaccgcgccggaaagtggggctccgagggggcgcactcaaaaccctgcctttcctttacttttacttttttttttttttctttggaagagagaagaacagagtgttcgattctgccctatttatgtttctactcgggaacaaacgttggttgtgtgtgtgtgtgttttcttgtgttggttttttaaagaaatgggaagaagaaaaaaaaattctccgcccctttcctcgatctcgctccccccttcggttctttcgaccgggtcccccctccctttttttgttctgttttgttttgttttgctacgagtccacattcctgtttgtaatccttgggttcgnccggttttctgttttcagtaaagtctcgttacggcaaaacctcgtgccgaatttttggggctcgaggggcaaaatttccca

SEQ ID NO: 1247 - DNA, 476 bp, Homo sapiens
  Genbank Accession No. H45299
  unsure (1)..(476): n = a or c or g or t
ngctggctgtaactncacgttcggacacggaggannatgnntttccgagaagaatnagcggttacncgggtcctcaggctcttcaaagagcttggaatgcttgtcacacagggcagctgccgcnatgtcgcagagccgcagggagcccttgctgctgctgtagacgaagaggttgcagtggtgcggatggaactcagatgctgtgatcacctccgtaaggncctccatgttggccggcttgatgtccacgatgttgaagctcctgtcggtgatggccaggtgccagaggttgatgcgcaggtcatccgccgacatgtaggtctcgcagtcactgttgacggagatggagttgatgtggtaggtgtggccattggcaaagatcctccgagggctcacctccaccattcagatcccatgggtttcagcactgggcacctgcagtgacgtnaccgtggacaggnccttaagttttccct

SEQ ID NO: 1248 - DNA, 485 bp, Homo sapiens
  Genbank Accession No. H45983
  unsure (1)..(485): n = a or c or g or t
gagacagattgnnngctctattgcccaggctggagtgcagtggtgccatctcggcttactgcaacctccacctcctgggctcaagcgatcctcctgcctcagcctgagtagctgggactacaggcgcacaccaccatgcctggctaatttttgtattttttgtagagacgggatgtcatcatgttgcccaggctgtctcaaacttgtgagctcaagtgatttgcccttcttggcctcccaaagtgctgggattacagacaggcatcagccaccgtgcctgggcccaaaattatggactttaaggaaactnttgggagatattttnctgtggtttcatgataatctgggctatactctgggtaggaatacccacgaattttccacatcaagggcagtaataataacagtttttagaagttttaaacattcaacaccggatttctcaggttaaatgttctagggnaaagggaccccgcaggngtctt

SEQ ID NO: 1249 - DNA, 580 bp, Homo sapiens
  Genbank Accession No. H50153
  unsure (1)..(580): n = a or c or g or t
gctaaatacaatatgcaaaagatgatggcaggtccccgactaaagaagattaatgtgttcagttttcactggttaagtgaattataattttaaatattccattcttatttatgtctttatgataattcagactattttattttgaacctgttttctactctggcaaagaaagataggcagaactattagtgttccatatacattatggaatagataaagcttgagagataaatgacctaagttttccttccagagagactcttccattttctctcattacaaaaccagaagatcagctatgtgggggccatcagctcccagcctaaggtcctataaacccgaaggcttgaaggcaatcagtacctctgcttttcaaaggtaaatggcatttcattttnctttggatttcagttattaggcaagtattatattttccattaatattcttggacatttaccngagganttaatacttcatggcntaaatcttttactggccacntttcctcattcatttgggttatcatttcggttaatgggggnaaattaattaagggtttggattggcacnatttttaaa

SEQ ID NO: 1250 - DNA, 529 bp, Homo sapiens
  Genbank Accession No. H53229
  unsure (1)..(529): n = a or c or g or t
cgtnttagacctcagtcggcgctgtgagggcactgtccgcccacctgctcggctggctgagctaggtcagtggagagaagctggggccactcacacagcacagcaggccacagtctacagagtacgccaggtagagcggttagagtggcagccgctggagaaagggttatagaaacacatccctgactctttggttatgtcccacgtcctctgtgtctccttccccttccctactctccttcctttctgcctccctgtctcccttggaagtccctgttgtcagtgcatttcagtgcattgacgtgtcctaaacactgatctccacacaccttcttttatcttccacctgatagggcaggccccagaccccttttttccnaggtttgttcttgcccacacaagcccacnggttagttgggaacccagataccatttcnttcagaacntttttgcngttcnttggggtaggagcaatggttnccagaactaaaccagtggtggaacaacattggtccggtttttagaggat

SEQ ID NO: 1251 - DNA, 504 bp, Homo sapiens
  Genbank Accession No. H62656
  unsure (1)..(504): n = a or c or g or t
aatttcttaataactcctacaacattcccccctgtggagatgccacactaactgctgttagggagttttgggcgacgactccttctggctacttcttgttgcaaaagggcgtcgaatggggaagagcagctagggctcctcctggggtcaatctaagggtcctcagaagaatgatgtgtctatgtgtggttctgtttacagcaccatttggagtttgattgcttctagatgagaagaaacaatttgagttatagtattgtgtatacagggtccaaatatcaatacaagacacataagcaagagagggcttaataaaggggttaaccaattccataaaggaagactgggatttatttaaaggggccttgtaggccactcggggatccatnattttggntttgnttttaagtacttgttggntttcntttaaccagggggctttattccgaaggcggctgtttcctttgaaaactgcttcacttaaccccattanaagtnctagtt

SEQ ID NO: 1252 - DNA, 331 bp, Homo sapiens
  Genbank Accession No. H77843
  unsure (1)..(331): n = a or c or g or t
tgtagttattttatatttnaatacatatttatncataattttngcttatgtgccaagcatcttcaacctttattataacaacctgtggggtatttataaatatctttatgtaaggaagagaaattgtggctcaaaaagtgaagtgaactgctcaagatgacatacctaaaactaacaaagccagggntttaagacaattctggnttgggnccaaatctcatgccatttccgttgtaccaaatgggcaccatgtgaacataattttccatcatcatctccaagtgttcaataaatatttgctgaatttaattgtggctggaattntttgagg

SEQ ID NO: 1253 - DNA, 418 bp, Homo sapiens
  Genbank Accession No. H78699
  unsure (1)..(418): n = a or c or g or t
aaaagancagttcagcacaggctactgtagaatgtcttaccccaccatattgtaatggtatgcacaaaaggcctaaaatcagagctatatatctaggaacaagacagatatgttggatgctgttgtacatgcaccaataatatttgaaaacaagacaaactatttcagtgaccataattgcctaccatagactccagagangatcagcattttaganttaganacacacttgantagatggnnaagnnacagctgttctacctgtgacaagagcaccagtattgngtgatgaggncannngngggngnntntattcngggnnntgtttggcncttttgttcnnggctnggnncccnctgttgggnngngcngcgtntggggctggtgtcttgtccgttgttaggcgtttgtttgcttt

SEQ ID NO: 1254 - DNA, 395 bp, Homo sapiens
  Genbank Accession No. H89231
  unsure (1)..(395): n = a or c or g or t
gatagccagaacctgtctttttctgaatatagttgctcagttaattttttcttctgcataagaaatcatctcgaatgttcttatgtgatatgtaaagtggggaaagtggaagataaacatataacccattggattctcttttccaatatctagattagatcctgtgctgaaagagaaaccaagaaaaaagatgacattccagaagaagacaaaggaaatgtcaaacaatgtggaaatcaattatggtaaaggaaattttcaggagcnttccaagaggcaccaactttaaaattaaggtaaaggaaggacngttaaaatttccttaaaaagggctccggaaagatgggattttttgcctggagacgctttcnggggancgggtagcnttttttttt

SEQ ID NO: 1255 - DNA, 650 bp, Homo sapiens
  Genbank Accession No. H92987
  unsure (1)..(650): n = a or c or g or t
gtgagggaaaaaaactcatatttcaatgattcccaagatcgttaagatataactacaatttactaatgcccaactgctcacagttttctaaacaactacaaaataaataaattgtagcaggtattttatgagaactgatacccatcaaaattgtgtatggagtccatgatggcctatcctccccagaagtcagagctcacagtgcccaacaccctcattatccagaggagaatctgaggacccatcatgccagtggagaaggctggagccagcactggcgccactttcctgagatgcccacactgattcttgtcccttctccctctctgaactctacttccagccagtttgggtcataacacaaaacatttaattgtattctctacatgaaaactttagttcaggaaaataaacatattaagaggttatttccctcaaatnactgagacantaaacttcacaacaggataggaanaaaatgnccaaggacactctcttgtagtctagggaaaatgcnagaacagtgcttttaaaatgattctaatgagactacagcataaaagtttttccaattagtttcagatttctccaactggcctactgggattaaacttttaataattcnctaacntattcnatttctgcatccg

SEQ ID NO: 1256 - DNA, 592 bp, Homo sapiens
  Genbank Accession No. H95265
  unsure (1)..(592): n = a or c or g or t
atgaaagaggcttttaatgaaaatactgtacagtttatgtgaggcaaaggcagggggccttgtccaggaagggaagaggcccaagaggcttcctgtccccttggggcaagcagancaaatgcttgggctcgggccaactngcctgccctgcagggtccagggaggtcctgatgagtcctgccccttcccttccagagggcctgcctggcagccagcagcagggtgtttggagcacctgttcccacacaagggtccttttagtccattccaacaaggtgactccgaagcagccctgaaggcttggggagggctcctgcctggcaagtgggccttggcacgagtagagggcagaggccgcccctgggttgaggaacatcataagccaggcgccgccccgttgcaagtaanttgtgtcctggccggcgacgaagccccgcagcagctcggcctcaaccccaaacaccaggctctcaaattcaacttcagntcttctgcgccgggaagggtccggtcaaaagacttggctcgcccganggcacacaaccctcagcttcgggaattnacttggtttaatnttaccctaaaaganaag

SEQ ID NO: 1257 - DNA, 445 bp, Homo sapiens
  Genbank Accession No. H97871
  unsure (1)..(445): n = a or c or g or t
aatggggtctcactctgtcgtccaggctgcagtggagtgatgtgatcacagctcactacagcctcaaattcctgggctcaagcaatcctcctgtctcaacctcctgaatagctgagaccacaggtgttcacagccacgcccagctaatttttattttttgtagagacgggtctcactacgttgcccagattggtcctgaactcctgggctcaagcaatcctcccgccttggccttccaaagtgctgggattacaggcatgagcaccacacccagcctgctaatggtttggataaggtttgccccattgaaactcatgctcgaacaatcgattggctaacgaggtcgatgacgccaggcacaagatgctggggcctanccgcggtagtggaaggggaagccgtgcgtttctgtttccaaggcatctgtgagcccatggagtataca

SEQ ID NO: 1258 - DNA, 584 bp, Homo sapiens
  Genbank Accession No. H98105
  unsure (1)..(584): n = a or c or g or t
tccagatcagcacaaagtttattagccatttctgctcagaagagcccctttctgaacaggactgttcctctgacataacagacaagaaacagccacctgtgcagggcctttcctttatatctcaagctacatcaggagaacatcttggagcaatgtcagttgccccctgggttccctgggaatagctaaggtgtgagattgtccagagtcctatgacagaccttcaaggttttaagttccacagacttggactttgtcaggtccacaaccaacgaatagaaaccttcctttcaggtaaacaacatattgtacaaaaaagggaggattgataacataatagagaaagagctaagacccatttgcttctcctctgtaaaaacaccaaactttatccaatactataaaanagaaattcctgctgggnacagtgggctcacgcctggtaatcccagcactctggggaggccgaggtggacagatcacttgaggtcaggagttcgagaccaggcctgaccaacatggagaancccgtctctactaaaaattcaaaattagctgggcatggtggtgcagattgtaatccc

SEQ ID NO: 1259 - DNA, 623 bp, Homo sapiens
  Genbank Accession No. H98970
  unsure (1)..(623): n = a or c or g or t
tctcacaaaatgctcactttcctgagctatattaaacaccttataacaggtgtatgtgtaactgaagaccctaaaatgtcaagtttacatttttttttaaatgcatagagaatataacatttcagaaaacctattagtacttcttggatattataacatataggttttgtttcctttagactgtaaactgtttaatacgtataactggttatttcacatccgaaccacattaaaaaaaattcggagatatgactgctattacactaaggaaacaagtggaattttctgaccaaaactcattcatgggtcttccgataaacaatctttacatatactgactgaagatatcaaatttctgtgccacaaaatagtagaattatatcagaactacagcaaataaaactttaattataatacatttgcctgaaattaaggtgctattcatcatgcagtttttaccaagtgggcatcatgtcgggaaaccacaccctaccaagatgcttggacacttcccagtgaatctgctccaaactatacctttggtcnggaattagtacctcctccataatggntaattgagataggcggcnccacacatcntcacaactccaccaaggccctac

SEQ ID NO: 1260 - DNA, 1374 bp, Homo sapiens
  Genbank Accession No. J00068
accgcagcggacagcgccaagtgaagcctcgcttccctcccgcggcgaccagggcccgagccgagagtagcagttgtagctacccgcccagaaactagacacaatgtgcgacgaagacgagaccaccgccctcgtgtgcgacaatggctccggcctggtgaaagccggcttcgccggggatgacgcccctagggccgtgttcccgtccatcgtgggccgcccccgacaccagggcgtcatggtcggtatgggtcagaaagattcctacgtgggcgacgaggctcagagcaagagaggtatcctgaccctgaagtaccctatcgagcacggcatcatcaccaactgggatgacatggagaagatctggcaccacaccttctacaacgagcttcgcgtggctcccgaggagcaccccaccctgctcaccgaagcccccctcaatcccaaggccaaccgcgagaagatgacccagatcatgtttgagaccttcaacgtgcccgccatgtacgtggccatccaggccgtgctgtccctctacgcctccggcaggaccaccggcatcgtgctggactccggcgacggcgtcacccacaacgtgcccatttatgagggctacgcgctgccgcacgccatcatgcgcctggacctggcgggccgcgatcttaccgactacctgatgaagatcctcactgagcgtggctactccttcgtgaccacagctgagcgcgagatcgtgcgcgacatcaaggagaagctgtgctacgtggccctggacttcgagaacgagatggcgacggccgcctcctcctcctccctggaaaagagctacgagctgccagacgggcaggtcatcaccatcggcaacgagcgcttccgctgcccggagacgctcttccagccctccttcatcggtatggagtcggcgggcattcacgagaccacctacaacagcatcatgaagtgtgacatcgacatcaggaaggacctgtatgccaacaacgtcatgtcggggggcaccacgatgtaccctgggatcgctgaccgcatgcagaaagagatcaccgcgctggcacccagcaccatgaagatcaagatcatcgccccgccggagcgcaaatactcggtgtggatcggcggctccatcctggcctcgctgtccaccttccagcagatgtggatcaccaagcaggagtacgacgaggccggcccttccatcgtccaccgcaaatgcttctagacacactccacctccagcacgcgacttctcaggacgacgaatcttctcaatgggggggcggctgagctccagccaccccgcagtcactttctttgtaacaacttccgttgctgccatcgtaaactgacacagtgttt

SEQ ID NO: 1261 - DNA, 5339 bp, Homo sapiens
  Genbank Accession No. J00124
cccagggtccgatgggaaagtgtagcctgcaggcccacacctccccctgtgaatcacgcctggcgggacaagaaagcccaaaacactccaaacaatgagtttccagtaaaatatgacagacatgatgaggcggatgagaggagggacctgcctgggagttggcgctagcctgtgggtgatgaaagccaaggggaatggaaagtgccagacccgccccctacccatgagtataaagcactcgcatccctttgcaatttacccgagcaccttctcttcactcagccttctgctcgctcgctcacctccctcctctgcaccatgactacctgcagccgccagttcacctcctccagctccatgaagggctcctgcggcatcgggggcggcatcggggcgggctccagccgcatctcctccgtcctggccggagggtcctgccgcgcccccaacacctacgggggcggcctgtctgtctcatcctcccgcttctcctctgggggagcctatgggttggggggcggctatggcggtggcttcagcagcagcagcagcagctttggtagtggctttgggggaggatatggtggtggccttggtgctggcttgggtggtggctttggtggtggctttgctggtggtgatgggcttctggtgggcagtgagaaggtgaccatgcagaacctcaatgaccgcctggcctcctacctggacaaggtgcgtgctctggaggaggccaacgccgacctggaagtgaagatccgtgactggtaccagaggcagcggcctgctgagatcaaagactacagtccctacttcaagaccattgaggacctgaggaacaaggtgggtgaatgggcagcagaaggcaccattccagctagctccttctgggaacaattcatgccccaggccgctgagaccttaagatttctctataggacagagtccaccccagatcccttctttcgaggtcttggatgccctaagactgatcagtgagaagatgctttcccttccccaggcctcctcatccccttctgatctcaaatcctcagaccatgtgagatcagtgattcctatccttacattttttagaggaagcagttgaagcttcgagaggtgctgtgaccagctgcaggtcacatagcaaattaatggcagagcaaggctggggcccttgtgcctaccttccagcacaggaggcagctacttgttctccagcacaggggaggagtgaggctctaacgggaccaggcaagacatccaaaccactcattagctcactagtctgggctgtggttgccgccgcccataagccttggtacaggctggtccctccccacagccaggcgggcatggagagcctgcagagacaattagtgtggtcccttgatgtgccctgcacagagagagcctggcaggcttgtgccctgactctagccccctcctccctgctcccacattacttgggagccctccctgctggagtctgttgggctctaatgacttgcatggattagggaaattcaagtgatgaggtggggaaatccaaccagactcaggggccaatatatcttcttattcttcccctgagtcctcttttctaatcccctgtgttagttgggttttatctcttcacaaagttccacttgaagtcccatggcctgtgagcttgaaaaggaatgtgcatatctgcagaggactggcagggctggcctgatgcagacagaagagaggtcagctcaggaaggagggctagggagcctcagattattctcctcacctggaggtggggaacttgaagccccaagacccattaggttttgcccagcaagacactggcagaattgggaccagaactcctgggctttcgattctaagcccggggctgccatctaccccctctgttgaccatgagttagcaaagtcttaggacaggcctggggcatctgttttcctttgggctgctatggtcaagttttgtgggggaaaagggggattcaggcaagaacatgaagcaagagcttaatgtaggctacagtgaagtccagcttgtgaagtccatttgacaaattacctgtgccttttccatcctgcagattctcacagccacagtggacaatgccaatgtccttctgcagattgacaatgcccgtctggccgcggatgacttccgcaccaagtgagtttgaaatggtgggccagaacatccagtgtccccagagtagggcatttttggagcagtgtttcccaaatagaactagccagtaccaggataggtgcatgaaaactccctggggtgcttataaaagaataagactcttgggccccacccttggagttttgattcagctatttatagcaggttacctgggtgattctggtccacagccaggtttcagaaccgctgctttagggagaggcactttccacttccccagctgcccttgaagtataggaaggaatcatagttggaggacttctgcattatttgttggctgaagctagaagtgcaaccccctcctgatttctgcagcaagatgaactgccttatccccagcccgcaggaatgttcatatctgagcaatcaatgggcactgtgttcaaccacgccatttttcaagattggctccttaaaccacccacaaggcaccagctctgggagaagctgcagggagaagagaacaaagccctcgctgtgatcaggatgggtgtctcataccttttctctggggtcattccaggtatgagacagagttgaacctgcgcatgagtgtggaagccgacatcaatggcctgcgcagggtgctggacgaactgaccctggccagagctgacctggagatgcagattgagagcctgaaggaggagctggcctacctgaagaagaaccacgaggaggtgagaactatatggaaaagtcagcttaaaagaaatgcagggaggctgggtacagtggtgcgtgcccatagtcccagctacttgggaggctgagacaggaggatcacttgaacacaggagtttgagtccagcctgggcaacaaggttagaccctgtccaaaaaaaaaaaaaaaaaaaaaaaaaaagagagagagagagagagagattgagagagagagagagaagggagagtcgagatagaattgtgatggtgggagggcagtattcaggcctaaggaacaccaatccgctgccatggtggaactcctgactgtggactgtccctggcttgcaggagatgaatgccctgagaggccaggtgggtggagatgtcaatgtggagatggacgctgcacctggcgtggacctgagccgcattctgaacgagatgcgtgaccagtatgagaagatggcagagaagaaccgcaaggatgccgaggaatggttcttcaccaaggtgggtgtcatttgaggtggaaggaacccagaccacctgccttctggggccttctggtgtgaatggcattctcttttttgcagacagaggagctgaaccgcgaggtggccaccaacagcgagctggtgcagagcggcaagagcgagatctcggagctccggcgcaccatgcagaacctggagattgagctgcagtcccagctcagcatggtaggaatagtgccaggaagggtggtgcacccaggactggcagggagagaacggccacactcactaatcgttgattcccttccctccctcacagaaagcatccctggagaacagcctggaggagaccaaaggtcgctactgcatgcagctggcccagatccaggagatgattggcagcgtggaggagcagctggcccagctccgctgcgagatggagcagcagaaccaggagtacaagatcctgctggacgtgaagacgcggctggagcaggagatcgccacctaccgccgcctgctggagggcgaggacgcccagtgagtcttggccctccccttagtccgccccccccatggcactctcacggccccaccatgtatctaatgatcctgtccttttctattttcacagcctctcctcctcccagttctcctctggatcgcagtcatccagagatggtaagaccctcctcctctgcaggcctgggctccaggccaccctctgtaccccaagcaggtctaggcattggctaggggctccgtgaggggctgagctctagtgctgtcacccagtttcccttgtgaacctccttgggtggaagaagctattttctaaaccctccttagggctaggagaggcagcccccacctcttgccttctacgtggtgtctgtggcagatcctattagctgttgtggtcagcaccatgaacaagggccctacagcggtcttcccactgagaccactccattgggtgaatatggatggaaccagccaggtgtgagctcttaggaagctctaatctgagggcaaagactctgtctctgacctttgggagccctcgtctgaaagaaatgtgttgatggtatcagtgcttgggcaacagcagggagtgaagcagtaatcaggggagagggcaatggggagccagtttgagtttcctcaccttcttggcctccttactcctgattagtccattgtctgtccacctctggtaacgtcctcttcccacctcttccccagtgacctcctccagccgccaaatccgcaccaaggtcatggatgtgcacgatggcaaggtggtgtccacccacgagcaggtccttcgcaccaagaactgaggctgcccagccccgctcaggcctaggaggccccccgtgtggacacagatcccactggaagatcccctctcctgcccaagcacttcacagctggaccctgcttcaccctcaccccctcctggcaatcaatacagcttcattatctgagttgcataattctcgcctctctctggtcattgttaggagtgggggtggggagaaagtgggagagcatctctttggagcttgtcatgcacctggctatggcccctgggactgggagaaaagtcctgggggtgggttgggctcaggtcccaggatatctttcgccatctcagaagacacagatagatgtgtgtaccaggtcatatgtggtgtctcctagggtacggagggatattcattcatttactcactcattttcatgtgtgtccattcattcaccagatattgagtgcctctatgtcaggcactatgttaggttaaggattcctgatgtttttgtgtatcagggattccttggagaatattgaaagctatagatctttccttctgccccctaccttcaaataagcatacatacatttgcatacatgtcatggggttcatgggtctcctagagctccttaccggagt

SEQ ID NO: 1262 - DNA, 12847 bp, Homo sapiens
  Genbank Accession No. J00153
ggatccccggggctctgggcggtgtgggcgtagtgaagccccacgcagccgccctcctccccggtcactgactggtcctgcaggctcttcacggtgtaccccagcaccaaggtctacttcccgcacctgagcgcctgccaggacgacgcagctgctgagccacgggagcgcatctgcggctgtggcgcggcggtgcagcacgtggacaacctgcgcgcctgagcccgctggcggacctgacgctcgttgcgcgtggacccagccaactttccggtgaggcctttccggccggggcaatggtgcatcgcctagccgggatgggggggctctgggggtccctagcggggcagaccccgtctcaccggccccttctcctgcagctgctaatccagtgtttccacgtcgtgctggcctcccacctgcaggacgagttcaccgtgcaaatgcaagcggcgtgggacaagttcctgactggtgtggccgtggtgctgaccgaaaaatacgctgagccctgtgctgcgaggccttggtctgtgcatgtcaataaacagaggcccgaaccatctgcccctgcctgtgtggtctttggggagctagcaaagcgaggtcactattgttggccagtaagctcagggacctaaagggagcctcctagaactctcaaatgcgccccacccccggaggtttgtcctcccatggcgaggagtgcgatggggcagagggagcagtgtgatatggcgggggtagagagggtggccttcgacttcaaacccttgactcgggcttcgaaccatactcgttcgcaaagcagttccccattcatgcatttattcagttcattccttccctccatccccatttcctgctgggacctgtagatgctaatcctggccctttttgcagagagatgcagaaactgaggtcccagagccaaatgtgcaacctaattcgttggccagagcagagggccgcagacctgttcctttccccttccttcccccatggacacttcctcagtggcaaacctgcgctagcctggttagccctccctgtgaccctgcagccctggggatgaggtcgggaggaagacctcagtggccacaatttggcagacagagaggtttagtcttccagcctgctcaatgacaagctgtgcgaccctgggctgtcccagagctctaggcctttacctatcgaatagaaaaacagcgtccaactcatgagatttttgaaataatttttgaaatcataacacagggtgggtgcctgcagggacgttgccaccccacccctccacccagccccagctgccgtgtctcaatctctgcaggtgcccaggccaaggcattcccttccccaggctccctcttctccctccccaaggattgggaagggaatcttagggctccaccccaggcttttcagacaaagaataggggctcaggaaagattgggaccttggagttctccaatccctaatagggttgggtgtgggttgggcatcctgggtgtgtgtggggagcacctggaccaggcctggcacccaggtctgacctggcagtcagcaatgaggtctgaagagagctgctggaagtggagccctgactgtgagtcggccaaactccccccagcagtcagtgccacagacctgttgccctgcactgcctgggaccccagcccggtagtttggagaacttggcccctcgttatctacatcccccaagtgtttttttgtttttgggggtttttttttttttttttttgctttgtttttgtttttgagataggcccttgctctgacaccccggctggagtgcagtggcaagttttggctcactgcagcctcaacctcctgggttcaagcgattctcctgcctctgtctcccgtgtagctgggattacaggcatgggccgccattcctggctaatttatgtatttttaatagagacacagtttcaccatgttgatcaggctggtctcaaactcctgacctcaagtgatctgccctcctggtctcccaaagtgctgggatgacaggcgtgagccaccacacccagcccccgcaactgtttacatggataattaacaagctttttgtcccaggcagagtttggtgtgaaagcagcttatgtttcactttggaaaaactgtgctcttctccccatccaggaagctgcctgggtctgggccatatgtggataccttatgggtataagctgctcaggaccctgtgtggaagctcaggacaatgccagcgggaaggctaccatgtggagagctgtctctgtttgggcaggactaagagacgcagggaaccttgggaacctgtctactctcactcactcctcctcccctttccttccaggcacctctgcaacttgccagccaatgaccctgcatcccaggcataagagctcctactctcccccacctttcacttttgagcttacacagactcagaaattaagctgccgtggtgctgtctcctgaggacaaggctaacaccaaggcggtctgggagaaagttggcgaccacactgctggctatgccacggaggccctggagaggcaagaaccctcctctccctgctcacaccttgggtccaacgcccactccagggctccactggccacccctaactattcttaccctggacccagcccccagcccctcactctttgcttccccctgaagcatgttcctgaccttcctctcacttggccctgagttatggctcagcccagatcaagaaacaatgcaagtaggtggccgacacgctgaccaatgccgtggtccacttagatgacatgcccaatgatgtgtctgaggtgaggaagctgcatgtccacgagctgtgggtggacccaggcaacatcagggagagctttgggctgggaggaatctagggtgtgggggcagctggccttcctcataggacagaccctcccacgcgttcagggaggtggagcacaggtggcagtagtatctgcatcccctgactctctctccacagttcctgggtaaatgcctgctggtgacctaggcctgccacacccttcccggtttacccatgtggtgcctccatggacaaattatttgcttttgtgagtgctgtgttgacctaaaaacaccattaagctagagcattggtggtcatgccccctgcctgctgggcctcccaccaggcccgcctcccctccctgccccagcacttcctgatctttgaatgaagtccgagtaggcagcagcctgtgtgtgcctgggttctctctgtcccggaatgtgccaacagtggaggtgtttacctgtctcagaccaaggacctctctgcagctgcatggggctggggagggagaactgcagggagtatgggaggggaagctgaggtgggcctgctcaagagaaggtgctgaaccatcccctgtcctgagaggtgccaggcctgcaggcagtggctcagaagctggggaggagagaggcatccagggttctactcagggagtcccagcatcgccaccctcctttgaaatctccctggttgaacccagttaacatacgctctccatcaaaacaaaacgaaacaaaacaaactagcaaaataggctgtccccagtgcaagtgcaggtgccagaacatttctctcattcccaccccttcctgccagagggtaggtggctggagtgagggtgctggccctactcacacttcctgtgtcatggtgaccctctgagagcagcccagtcagtggggaaggaggaaggggctgggatgctcacagccggcagcccacacctagggagactcttcagcagagcaccttgcggccttactcctgcacgtctcctgcagtttgtaaggtgcattcagaactcactgtgtgcccagccctgagctcccagctaattgccccacccagggcctctgggacctcctggtgcttctgcttcctgtgctgccagcaacttctggaaacgtccctgtccccggtgctgaagtcctggaatccatgctgggaagttgcacagcccatctggctctcagccagcctaggaacacgagcagcacttccagcccagcccctgccccacagcaagcctccccctccacactcacagtactgaattgagctttgggtagggtggagaggaccctgtcaccgcttttcttctggacatggacctctctgaattgttggggagttccctccccctctccaccacccactcttcctgtgcctcacagcccagagcattgttatttcaacagaaacactttaaaaaataaactaaaatccgacaggcacggtggctcacacctgtaatcccagtactttgggaggctgaggcgagaggatcacctgaggtcgggagtttgagaccagcctgaccaatatggagaaaccccagttatactaaaaatacaaaattagctgggtgtggtggcgcatgcctgtaatcctagctactaggaaggctgaggcaggagaatcgcttgaacccgggaggtggaggttgaggtgagccgagatcacgccattgcactccagcctgggcaacaagagcaaaactccgtctcaaaaaataaataaataaataaataaataaactaaaatctatccatgctttcacacacacacacacacacacacacacacaccttttttgtgttactaaagtaggagagtgtctctctttcctgtctcctcacacccacccccagaagagaccaaaatgaagggtttggaactcacgccatgggccccatcccatgctgagggaacacagctacatctacaactactgccacagcgtctctttttggacacccctaccatcatactgtagatacccgtgtacaaccttcctattctcagtgaagtgtctcccctgcatccctttcagccagttcattcagctctgctcgcccattccacagtctcactgattattactatgtttccatcatgatccccccaaaaaatcatgactttatttttttatttttattattattattatttttttttttttttttgagacggagtctcgctctgtgacccaggctggagtgcagtggcaaatctcggctcactgcaagctccacctcgcaggttcacgccattctcctccctcagcctcccgagtcgctgagtagctgggctacagcgccccccactagtcgtggctaattttttctttttttaatagagacagagtttcactgcattagcgaggatggtctcgatctcctgacctcgcatctgccagcctcagccttccaatgtgctgggattacagcgtgagccaacgcgcccggccttatatatttatttttttgagacagagtctcgctgtgtcgtcaggctagagtgctgtggcacgatctcggctcactgcaacctccaactccctggttcaaaggattctccagcctccacctcccgagtagctgggattacaggcgtgcaccaccacaccagctaatttttgtatttttagtagagacggggtttctccatgttggtcagcctggtctcgaactcccgaccacagctgatcccacccacctcggcctcccaaagtgctgggattccaggcgtgcgccgagcctggccaaaccatcacttttcatgagcagggatgcacccactggactcctggacctcccaccctccccctcgccaagtccaccccttccttcctcaccccacatcccctcacctacattctgcaacacaggggccttctctcccctgtcctttccctacccagagccaggtttgtttatctgtttacaaccagtatttacctagcaagtcttccatcagatagcatttggagagctgggggtgtcacagtgaaccacgacctctaggccagtgggagagtcagtcacacaaactgtgagtccatgacttggggcttagccagtacccaccaccccacgcgccaccccacaaccccgggtagaggagtctgaatctggagccgcccccagcccagccccgtgctttttgcgtcctggtgtttgttccttcccggtgcctgtcactcaagcacactagtgactatcgccagagggaaagggagctgcaggaagcgaggctggagagcaggaggggctctgcgcagaaattcttttgagttcctatgggccagggcgtccgggtgcgcgcattcctctccgccccaggattgggcgaagccctccggctcgcactcgctcgcccgtgtgttccccgatcccgctggagtcgatgcgcgtccagcgcgtgccaggccggggcgggggtgcgggctgactttctccctcgctagggacgctccggcgcccgaaaggaaagggtggcgctgcgctccggggtgcacgagccgacagcgcccgaccccaacgggccggccccgccagcgccgctaccgccctgcccgggcgagcgggatgggcgggagtggagtggcgggtggagggtggagacgtcctggcccccgccccgcgtgcacccccaggggaggccgagcccgccgcccggccccgcgcaggccccgcccgggactcccctgcggtccaggccgcgccccgggctccgcgccagccaatgagcgccgcccggccgggcgtgcccccgcgccccaagcataaaccctggcgcgctcgcggcccggcactcttctggtccccacagactcagagagaacccaccatggtgctgtctcctgccgacaagaccaacgtcaaggccgcctggggtaaggtcggcgcgcacgctggcgagtatggtgcggaggccctggagaggtgaggctccctcccctgctccgacccgggctcctcgcccgcccggacccacaggccaccctcaaccgtcctggccccggacccaaaccccacccctcactctgcttctccccgcaggatgttcctgtccttccccaccaccaagacctacttcccgcacttcgacctgagccacggctctgcccaggttaagggccacggcaagaaggtggccgacgccctgaccaacgccgtggcgcacgtggacgacatgcccaacgcgctgtccgccctgagcgacctgcacgcgcacaagcttcgggtggacccggtcaacttcaaggtgagcggcgggccgggagcgatctgggtcgaggggcgagatggcgccttcctctcagggcagaggatcacgcgggttgcgggaggtgtagcgcaggcggcggctgcgggcctgggccgcactgaccctcttctctgcacagctcctaagccactgcctgctggtgaccctggccgcccacctccccgccgagttcacccctgcggtgcacgcctccctggacaagttcctggcttctgtgagcaccgtgctgacctccaaataccgttaagctggagcctcggtagccgttcctcctgcccgatgggcctcccaacgggccctcctcccctccttgcaccggcccttcctggtctttgaataaagtctgagtgggcggcagcctgtgtgtgcctgggttctctctgtcccggaatgtgccaacaatggaggtgtttacctgtctcagaccaaggacctctctgcagctgcatggggctggggagggagaactgcagggagtatgggaggggaagctgaggtgggcctgctcaagagaaggtgctgaaccatcccctgtcctgagaggtgccaggcctgcaggcagtggctcagaagctggggaggagagaggcatccagggttctactcagggagtcccagcatcgccaccctcctttgaaatctccctggttgaacccagttaacatacgctctccatcaaaacaaaacgaaacaaaacaaactagcaaaataggctgtccccagtgcaagtgcaggtgccagaacatttctctcattcccaccccttcctgccagagggtaggtggctggagtgagggtgctggccctactcacacttcctgtgtcacggtgaccctctgagagcagcccagtcagtggggaaggaggaaggggctgggatgctcacagccggcagcccacacctagggagactcttcagcagagcaccttgcggccttactcctgcacgtctcctgcagtttgtaaggtgcattcagaactcactgtgtgcccagccctgagctcccagctaattgccccacccagggcctctgggacctcctggtgcttctgcttcctgtgctgccagcaacttctggaaacgtccctgtccccggtgctgaagtcctggaatccatgctgggaagttgcacagcccatctggctctcagccagcctaggaacatgagcagcacttccaacccagtccctgccccacagcaagcctccccctccacactcacagtactggattgagctttggggagggtggagaggaccctgtcaccgctttccttctggacatggacctctctgaattgttggggagttccctccccctctccaccacccgctcttcctgcgcctcacagcccagagcattgttatttcagcagaaacactttaaaaaataaactaaaatccgacaggcacggtggctcacgcctgtaatcccagcactttgggaggccgaggtgggaggatcacctgaggtcgggagtttgagaccaccctgatcaacatgtagaaaccccatctatactaaaaatacaaaatcagccgggcatggtggcccatgcctgtaaacccacctactccggaggctgaggcaggagaatcattttaaccaaggaggcagaggttgcagtgagctaagatcacaccattgcactccagcctggaaaacaacagcgaaactccgcctcaaaaaaaaaaaagcccccacatcttatcttttttttttccttcaggctgtgggcagagtcagaaagtcagaagagggtggcagacagggaggggaaatgagaagatccaacgggggaagcattgctaagctggtcggagctacttccttctctgcccaaggcagcttaccctggcttgctcctggacacccagggcagggcctgagtaagggcctggggagacagggcagggagcaggctgaagggtgctgacctgatgcactcctcaaagcagatcttctgccagacccccaggaaatgacttatcagtgatttctcaggctgttttctcctcagtaccatccccccaaaaaacatcacttttcatgcacagggatgcacccactggcactcctgcacctcccacccttccccagaagtccaccccttccttcctcaccctgcaggagctggccagcctcatcaccccaacatctccccacctccattctccaaccacagggcccttgtctcctctgtcctttcccctccccgagccaagcctcctccctcctccacctcctccacctaatacatatccttaagtctcacctcctccaggaagccctcagactaaccctggtccccttgaatgcctcgtccacacctccagacttcctcagggcctgtgatgaggtctgcacctctgtgtgtacttgtgtgatggttagaggactgcctacctcccagaggaggttgaatgctccagccggttccagctattgctttgtttacctgtttaaccagtatttacctagcaagtcttccatcagatagcatttggagagctgggggtgtcacagtgaaccacgacctctaggccagtgggagagtcagtcacacaaactgtgagtccatgacttggggcttagccagcacccaccaccccacgcgccaccccacaaccccgggtagaggagtctgaatctggagccgcccccagcccagccccgtgctttttgcgtcctggtgtttattccttcccggtgcctgtcactcaagcacactagtgactatcgccagagggaaagggagctgcaggaagcgaggctggagagcaggaggggctctgcgcagaaattcttttgagttcctatgggccagggcgtccgggtgcgcgcattcctctccgccccaggattgggcgaagccctccggctcgcactcgctcgcccgtgtgttccccgatcccgctggagtcgatgcgcgtccagcgcgtgccaggccggggcgggggtgcgggctgactttctccctcgctagggacgctccggcgcccgaaaggaaagggtggcgctgcgctccggggtgcacgagccgacagcgcccgaccccaacgggccggccccgccagcgccgctaccgccctgcccgggcgagcgggatgggcgggagtggagtggcgggtggagggtggagacgtcctggcccccgccccgcgtgcacccccaggggaggccgagcccgccgcccggccccgcgcaggccccgcccgggactcccctgcggtccaggccgcgccccgggctccgcgccagccaatgagcgccgcccggccgggcgtgcccccgcgccccaagcataaaccctggcgcgctcgcggcccggcactcttctggtccccacagactcagagagaacccaccatggtgctgtctcctgccgacaagaccaacgtcaaggccgcctggggtaaggtcggcgcgcacgctggcgagtatggtgcggaggccctggagaggtgaggctccctcccctgctccgacccgggctcctcgcccgcccggacccacaggccaccctcaaccgtcctggccccggacccaaaccccacccctcactctgcttctccccgcaggatgttcctgtccttccccaccaccaagacctacttcccgcacttcgacctgagccacggctctgcccaggttaagggccacggcaagaaggtggccgacgccctgaccaacgccgtggcgcacgtggacgacatgcccaacgcgctgtccgccctgagcgacctgcacgcgcacaagcttcgggtggacccggtcaacttcaaggtgagcggcgggccgggagcgatctgggtcgaggggcgagatggcgccttcctcgcagggcagaggatcacgcgggttgcgggaggtgtagcgcaggcggcggctgcgggcctgggccctcggccccactgaccctcttctctgcacagctcctaagccactgcctgctggtgaccctggccgcccacctccccgccgagttcacccctgcggtgcacgcctccctggacaagttcctggcttctgtgagcaccgtgctgacctccaaataccgttaagctggagcctcggtggccatgcttcttgccccttgggcctccccccagcccctcctccccttcctgcacccgtacccccgtggtctttgaataaagtctgagtgggcggcagcctgtgtgtgcctgagttttttccctcagaaacgtgccagcatgggcgtggacagcagctgggacacacatggctagaacctctctgcagctggatagggtaggaaaaggcaggggcgggaggaggggatggaggagggaaagtggagccaccgcgaagtccagctggaaaaacgctggaccctagagtgctttgaggatgcatttgctctttcccgagttttattcccagacttttcagattcaatgcaggtttgctgaaataatgaatttatccatctttacgtttctgggcactcttgtgccaagaactggctggctttctgcctgggacgtcactggtttcccagaggtcctcccacatatgggtggtgggtaggtcagagaagtcccactccagcatggctgcattgatcccccatcgttcccactagtctccgtaaaacctcccagatacaggcacagtctagatgaaatcaggggtgcggggtgcaactgcaggccccaggcaattcaataggggctctactttcacccccaggtcaccccagaatgctcacacaccagacactgacgccctggggctgtcaagatcaggcgtttgtctctgggcccagctcagggcccagctcagcacccactcagctcccctgaggctggggagcctgtcccattgcgactggagaggagagcggggccacagaggcctggctagaaggtcccttctccctggtgtgtgttttctctctgctgagcaggcttgcagtgcctggggtatcagagggagggttcccggagctggtagccataaagccctggccctcaactgataggaatatcttttattccctgagcccatgaatcacccttggtaaacacctatggcaggccctctgcctgcgtttgtgatgtccttcccgcagcctgtgggtacagtatcaactgtcaggaagacggtgtcttcgttatttcatcaggaagaatggaggtctgacctaaaggtagaaatatgtcaaatgtacagcagagggctggttggagtgcagcgctttttacaattaattgatcagaaccagttataaatttatcatttccttctccactcctgctgcttcagttgactaagcctaagaaaaaattataaaaattggccgggcgcggtggctcacacctgtaattgcagcactttgccaggcttaggcaggtggatcacctgaagtcaggggttcgagaccagcctagccaacatagtgaaaccctgtctctactaaaaagacaaaaattgtccaggtgtgatgactcatgcctgtaaacctggcactttgggaggcggaggttgtagtgagtcaagatcgcgccatcgcactccagcttgggcaacaagagcgaaactctgtctcaaaaaaaaatttaatctaatttaatttaatttaaaaattagcacggtggttgggcacagtggcctcacgcctgtaatcccagcactttgggaagccaaggtgggcagatcacaaggtcaggggaattc

SEQ ID NO: 1263 - DNA, 6453 bp, Homo sapiens
  Genbank Accession No. J00277
ggatcccagcctttccccagcccgtagccccgggacctccgcggtgggcggcgccgcgctgccggcgcagggagggcctctggtgcaccggcaccgctgagtcgggttctctcgccggcctgttcccgggagagcccggggccctgctcggagatgccgccccgggcccccagacaccggctccctggccttcctcgagcaaccccgagctcggctccggtctccagccaagcccaaccccgagaggccgcggccctactggctccgcctcccgcgttgctcccggaagccccgcccgaccgcggctcctgacagacgggccgctcagccaaccggggtggggcggggcccgatggcgcgcagccaatggtaggccgcgcctggcagacggacgggcgcggggcggggcgtgcgcaggcccgcccgagtctccgccgcccgtgccctgcgcccgcaacccgagccgcacccgccgcggacggagcccatgcgcggggcgaaccgcgcgcccccgcccccgccccgccccggcctcggccccggccctggccccgggggcagtcgcgcctgtgaacggtgagtgcgggcagggatcggccgggccgcgcgccctcctcgcccccaggcggcagcaatacgcgcggcgcgggccgggggcgcggggccggcgggcgtaagcggcggcggcggcggcgggtgggtggggccgggcggggcccgcgggcacaggtgagcgggcgtcgggggctgcggcgggcgggggccccttcctccctggggcctgcgggaatccgggccccacccgtggcctcgcgctgggcacggtccccacgccggcgtacccgggagcctcgggcccggcgccctcacacccgggggcgtctgggaggaggcggccgcggccacggcacgcccgggcacccccgattcagcatcacaggtcgcggaccaggccgggggcctcagccccagtgccttttccctctccgggtctcccgcgccgcttctcggccccttcctgtcgctcagtccctgcttcccaggagctcctctgtcttctccagctttctgtggctgaaagatgcccccggttccccgccgggggtgcggggcgctgcccgggtctgccctcccctcggcggcgcctagtacgcagtaggcgctcagcaaatacttgtcggaggcaccagcgccgcggggcctgcaggctggcactagcctgcccgggcacgccgtggcgcgctccgccgtggccagacctgttctggaggacggtaacctcagccctcgggcgcctccctttagcctttctgccgacccagcagcttctaatttgggtgcgtggttgagagcgctcagctgtcagccctgcctttgagggctgggtcccttttcccatcactgggtcattaagagcaagtgggggcgaggcgacagccctcccgcacgctgggttgcagctgcacaggtaggcacgctgcagtccttgctgcctggcgttggggcccagggaccgctgtgggtttgcccttcagatggccctgccagcagctgccctgtggggcctggggctgggcctgggcctggctgagcagggccctccttggcaggtggggcaggagaccctgtaggaggaccccgggccgcaggcccctgaggagcgatgacggaatataagctggtggtggtgggcgccggcggtgtgggcaagagtgcgctgaccatccagctgatccagaaccattttgtggacgaatacgaccccactatagaggtgagcctagcgccgccgtccaggtgccagcagctgctgcgggcgagcccaggacacagccaggatagggctggctgcagcccctggtcccctgcatggtgctgtggccctgtctcctgcttcctctagaggaggggagtccctcgtctcagcaccccaggagaggagggggcatgaggggcatgagaggtaccagggagaggctggctgtgtgaactccccccacggaaggtcctgagggggtccctgagccctgtcctcctgcaggattcctaccggaagcaggtggtcattgatggggagacgtgcctgttggacatcctggataccgccggccaggaggagtacagcgccatgcgggaccagtacatgcgcaccggggagggcttcctgtgtgtgtttgccatcaacaacaccaagtcttttgaggacatccaccagtacaggtgaaccccgtgaggctggcccgggagcccacgccgcacaggtggggccaggccggctgcgtccaggcaggggcctcctgtcctctctgcgcatgtcctggatgccgctgcgcctgcagcccccgtagccagctctcgctttccacctctcagggagcagatcaaacgggtgaaggactcggatgacgtgcccatggtgctggtggggaacaagtgtgacctggctgcacgcactgtggaatctcggcaggctcaggacctcgcccgaagctacggcatcccctacatcgagacctcggccaagacccggcaggtgaggcagctctccaccccacagctagccagggacccgccccgccccgccccagccagggagcagcactcactgaccctctcccttgacacagggcagccgctctggctctagctccagctccgggaccctctgggaccccccgggacccatgtgacccagcggcccctcgcactgtaggtctcccgggacggcagggcagtgagggaggcgagggccggggtctgggctcacgccctgcagtcctgggccgacacagctccggggaaggcggaggtccttggggagagctgccctgagccaggccggagcggtgaccctggggcccggcccctcttgtccccagagtgtcccacgggcacctgttggttctgagtcttagtggggctactggggacacgggccgtagctgagtcgagagctgggtgcagggtggtcaaaccctggccagacctggagttcaggagggccccgggccaccctgacctttgaggggctgctgtagcatgatgcgggtggccctgggcacttcgagatggccagagtccagcttcccgtgtgtgtggtgggcctggggaagtggctggtggagtcgggagcttcgggccaggcaaggcttgatcccacagcagggagcccctcacccaggcaggcggccacaggccggtccctcctgatcccatccctcctttcccagggagtggaggatgccttctacacgttggtgcgtgagatccggcagcacaagctgcggaagctgaaccctcctgatgagagtggccccggctgcatgagctgcaagtgtgtgctctcctgacgcaggtgagggggactcccagggcggccgccacgcccaccggatgaccccggctccccgcccctgccggtctcctggcctgcggtcagcagcctcccttgtgccccgcccagcacaagctcaggacatggaggtgccggatgcaggaaggaggtgcagacggaaggaggaggaaggaaggacggaagcaaggaaggaaggaagggctgctggagcccagtcaccccgggaccgtgggccgaggtgactgcagaccctcccagggaggctgtgcacagactgtcttgaacatcccaaatgccaccggaaccccagcccttagctcccctcccaggcctctgtgggcccttgtcgggcacagatgggatcacagtaaattattggatggtcttgatcttggttttcggctgagggtgggacacggtgcgcgtgtggcctggcatgaggtatgtcggaacctcaggcctgtccagccctgggctctccatagcctttgggagggggaggttgggagaggccggtcaggggtctgggctgtggtgctctctcctcccgcctgccccagtgtccacggcttctggcagagagctctggacaagcaggcagatcataaggacagagagcttactgtgcttctaccaactaggagggcgtcctggtcctccagagggaggtggtttcaggggttggggatctgtgccggtggctctggtctctgctgggagccttcttggcggtgagaggcatcacctttcctgacttgctcccagcgtgaaatgcacctgccaagaatggcagacatagggaccccgcctcctgggccttcacatgcccagttttcttcggctctgtggcctgaagcggtctgtggaccttggaagtagggctccagcaccgactggcctcaggcctctgcctcattggtggtcgggtagcggccagtagggcgtgggagcctggccatccctgcctcctggagtggacgaggttggcagctggtccgtctgctcctgccccactctcccccgcccctgccctcaccctacccttgccccacgcctgcctcatggctggttgctcttggagcctggtagtgtcactggctcagccttgctgggtatacacaggctctgccacccactctgctccaaggggcttgccctgccttgggccaagttctaggtctggccacagccacagacagctcagtcccctgtgtggtcatcctggcttctgctgggggcccacagcgcccctggtgcccctcccctcccagggcccgggttgaggctgggccaggccctctgggacggggacttgtgccctgtcagggttccctatccctgaggttgggggagagctagcagggcatgccgctggctggccagggctgcagggacactcccccttttgtccagggaataccacactcgcccttctctccagcgaacaccacactcgcccttctctccaggggacgccacactcccccttctgtccaggggacgccacactcccccttctctccaggggacgccacactcgcccttctctccaggggacgccacactcgcccttctctccaggggacgccacactcgcccttctgtccaggggacgccacactcgcccttctctccaggggacgccacactcgcccttctctccaggggacgccacactcccccttctgtccaggggacgccacactcccccttctctccaggggacgccacactcccccttctctccaggggacgccacactcgcccttctctccaggggacgccacactcccccttctgtccaggggacgccacactcgcccttctctccaggggacgccacactcgcccttctctccaggggacgccacactcccccttctctccaggggacgccacactcccccttctctccaggggacgccacactcccccttctgtccaggggacgccacactcgcccttctctccaggggacgccacactcccccttctctccaggggacgccacactcccccttctctccaggggacgccacactcccccttctgtccaggggacgccacactcgcccttctctccaggggacgccacactcgcccttctctccaggggacgccacactcgcccttctctccaggggacgccacacttgcccttctgtccagggaatgccacactcccccttctccccagcagcctccgagtgaccagcttccccatcgatagacttcccgaggccaggagccctctagggctgccgggtgccaccctggctccttccacaccgtgctggtcactgcctgctgggggcgtcagatgcaggtgaccctgtgcaggaggtatctctggacctgcctcttggtcattacggggctgggcagggcctggtatcagggccccgctggggttgcagggctgggcctgtgctgtggtcctggggtgtccaggacagacgtggaggggtcagggcccagcacccctgctccatgctgaactgtgggaagcatccaggtccctgggtggcttcaacaggagttccagcacgggaaccactggacaacctggggtgtgtcctgatctggggacaggccagccacaccccgagtcctagggactccagagagcagcccactgccctgggctccacggaagccccctcatgccgctaggccttggcctcggggacagcccagctaggccagtgtgtggcaggaccaggcccccatgtgggagctgaccccttgggattctggagctgtgctgatgggcaggggagagccagctcctccccttgagggagggtcttgatgcctggggttacccgcagaggcctgggtgccgggacgctccccggtttggctgaaaggaaagcagatgtggtcagcttctccactgagcccatctggtcttcccggggctgggccccatagatctgggtccctgtgtggcccccctggtctgatgccgaggatacccctgcaaactgccaatcccagaggacaagactgggaagtccctgcagggagagcccatccccgcaccctgacccacaagagggactcctgctgcccaccaggcatccctccagggatcc

SEQ ID NO: 1264 - DNA, 330 bp, Homo sapiens
  Genbank Accession No. J00287
cttttctccagagcgaggggagctgcatcagtggcttccagggcatgaacctccccaccgaatctggagagctttggatcctgggtgatgtcttcatccgccagtactttaccgtcttcgacagggcaaacaaccaggtcggcctggcccccgtggcttaagcctaagtctcttcagccacctcccaggaagatctggcctctgtcctgtgcccactttagatgtatctaattctcctgactgttcttcccaggggagtgtggaggtcttggccctgttccctgtcctaccaataacgtagaataaaaacataacccactgaaacaggtt

SEQ ID NO: 1265 - DNA, 2133 bp, Homo sapiens
  Genbank Accession No. J03040
cgggagagcgcgctctgcctgccgcctgcctgcctgccactgagggttcccagcaccatgagggcctggatcttctttctcctttgcctggccgggagggccttggcagcccctcagcaagaagccctgcctgatgagacagaggtggtggaagaaactgtggcagaggtgactgaggtatctgtgggagctaatcctgtccaggtggaagtaggagaatttgatgatggtgcagaggaaaccgaagaggaggtggtggcggaaaatccctgccagaaccaccactgcaaacacggcaaggtgtgcgagctggatgagaacaacacccccatgtgcgtgtgccaggaccccaccagctgcccagcccccattggcgagtttgagaaggtgtgcagcaatgacaacaagaccttcgactcttcctgccacttctttgccacaaagtgcaccctggagggcaccaagaagggccacaagctccacctggactacatcgggccttgcaaatacatccccccttgcctggactctgagctgaccgaattccccctgcgcatgcgggactggctcaagaacgtcctggtcaccctgtatgagagggatgaggacaacaaccttctgactgagaagcagaagctgcgggtgaagaagatccatgagaatgagaagcgcctggaggcaggagaccaccccgtggagctgctggcccgggacttcgagaagaactataacatgtacatcttccctgtacactggcagttcggccagctggaccagcaccccattgacgggtacctctcccacaccgagctggctccactgcgtgctcccctcatccccatggagcattgcaccacccgctttttcgagacctgtgacctggacaatgacaagtacatcgccctggatgagtgggccggctgcttcggcatcaagcagaaggatatcgacaaggatcttgtgatctaaatccactccttccacagtaccggattctctctttaaccctccccttcgtgtttcccccaatgtttaaaatgtttggatggtttgttgttctgcctggagacaaggtgctaacatagatttaagtgaatacattaacggtgctaaaaatgaaaattctaacccaagacatgacattcttagctgtaacttaactattaaggccttttccacacgcattaatagtcccatttttctcttgccatttgtagctttgcccattgtcttattggcacatgggtggacacggatctgctgggctctgccttaaacacacattgcagcttcaacttttctctttagtgttctgtttgaaactaatacttaccgagtcagactttgtgttcatttcatttcagggtcttggctgcctgtgggcttccccaggtggcctggaggtgggcaaagggaagtaacagacacacgatgttgtcaaggatggttttgggactagaggctcagtggtgggagagatccctgcagaatccaccaaccagaacgtggtttgcctgaggctgtaactgagagaaagattctggggctgtcttatgaaaatatagacattctcacataagcccagttcatcaccatttcctcctttacctttcagtgcagtttcttttcacattaggctgttggttcaaacttttgggagcacggactgtcagttctctgggaagtggtcagcgcatcctgcagggcttctcctcctctgtcttttggagaaccagggctcttctcaggggctctagggactgccaggctgtttcagccaggaaggccaaaatcaagagtgagatgtagaaagttgtaaaatagaaaaagtggagttggtgaatcggttgttctttcctcacatttggatgattgtcataaggtttttagcatgttcctccttttcttcaccctcccctttgttcttctattaatcaagagaaacttcaaagttaatgggatggtcggatctcacaggctgagaactcgttcacctccaagcatttcatgaaaaagctgcttcttattaatcatacaaactctcaccatgatgtgaagagtttcacaaatctttcaaaataaaaagtaatgacttagaaactgaaaaaaaaaaaaaaaaaaaaaaaaaaaaaa

SEQ ID NO: 1266 - DNA, 5416 bp, Homo sapiens
  Genbank Accession No. J03464
gtgtcccatagtgtttccaaacttggaaagggcgggggagggcgggaggatgcggagggcggaggtatgcagacaacgagtcagagtttccccttgaaagcctcaaaagtgtccacgtcctcaaaaagaatggaaccaatttaagaagccagccccgtggccacgtcccttcccccattcgggccctcctctgcgcccccgcaggctcctcccagctgtggctgcccgggcccccagccccagccctcccattggtggaggcccttttggaggcaccctagggccagggaaacttttgccgtataaatagggcagatccgggatttgttattttagcaccacggcagcaggaggtttcggctaagttggaggtactggccacgactgcatgcccgcgcccgccatgtgatacctccgccggtgacccagggctctgcgacacaaggagtcgcatgtctaagtgctagacatgctcagctttgtggatacgcggactttgttgctgcttgcagtaaccttatgcctagcaacatgccaatctttacaagaggaaactgtaagaaagggcccagccggagatagaggaccacgtggagaaaggggtccaccaggccccccaggcagagatggtgaagatggtcccacaggccctcctggtccacctggtcctcctggcccccctggtctcggtgggaactttgctgctcagtatgatggaaaaggagttggacttggccctggaccaatgggcttaatgggacctagaggcccacctggtgcagctggagccccaggccctcaaggtttccaaggacctgctggtgagcctggtgaacctggtcaaactggtcctgcaggtgctcgtggtccagctggccctcctggcaaggctggtgaagatggtcaccctggaaaacccggacgacctggtgagagaggagttgttggaccacagggtgctcgtggtttccctggaactcctggacttcctggcttcaaaggcattaggggacacaatggtctggatggattgaagggacagcccggtgctcctggtgtgaagggtgaacctggtgcccctggtgaaaatggaactccaggtcaaacaggagcccgtggtcttcctggtgagagaggacgtgttggtgcccctggtccagctggtgcccgtggaagtgatggaagtgtgggtcccgtaggtcctgctggtcctaatgggtctgctggccctccaggtttcccaggtgcccctggtcccaagggtgaaattggagctgttggtaacgctggtcctactggacccgccggtccccgtggtgaagtgggtcttccaggcctctccggccccgttggacctcctggtaatcctggagcaaacggccttactggtgccaagggtgctgctggccttcccggcgttgctggggctcccggcctccctggaccccgcggtattcctggccctcctggtgctgccggtactactggtgccagaggacttgttggtgagcctggtccagctggctccaaaggagagagcggtaacaagggtgagcccggctccgctggtccccaaggtcctcctggtcccagtggtgaagaaggaaagagaggccctaatggggaagctggatctgccggccctccaggacctcctgggctgagaggtagtcctggttctcgtggtcttcctggagctgatggcagagctggcgtcatgggccctcctggtagtcgtggtgcaagtggccctgctggagtccgaggacctaatggagatgctggtcgccctggggagcctggtctcatgggacccagaggtcttcctggttcccctggaaatatcggccccgctggaaaagaaggtcctgtcggcctccctggcatcgacggcaggcctggcccaattggccccgttggagcaagaggagagcctggcaacattggattccctggacccaaaggccccactggtgaccctggcaaaaacggtgataaaggtcatgctggtcttgctggtgctcggggtgctccaggtcctgatggaaacaatggtgctcagggacctcctggaccacagggtgttcaaggtggaaaaggtgaacagggtcccgctggtcctccaggcttccagggtctgcctggcccctcaggtcccgctggtgaagttggcaaaccaggagaaaggggtctccatggtgagtttggtctccctggtcctgctggtccaagaggggaacgcggtcccccaggtgagagtggtgctgccggtcctactggtcctattggaagccgaggtccttctggacccccagggcctgatggaaacaagggtgaacctggtgtggttggtgctgtgggcactgctggtccatctggtcctagtggactcccaggagagaggggtgctgctggcatacctggaggcaagggagaaaagggtgaacctggtctcagaggtgaaattggtaaccctggcagagatggtgctcgtggtgctcatggtgctgtaggtgcccctggtcctgctggagccacaggtgaccggggcgaagctggggctgctggtcctgctggtcctgctggtcctcggggaagccctggtgaacgtggcgaggtcggtcctgctggccccaacggatttgctggtccggctggtgctgctggtcaaccgggtgctaaaggagaaagaggaggcaaagggcctaagggtgaaaacggtgttgttggtcccacaggccccgttggagctgctggcccagctggtccaaatggtccccccggtcctgctggaagtcgtggtgatggaggcccccctggtatgactggtttccctggtgctgctggacggactggtcccccaggaccctctggtatttctggccctcctggtccccctggtcctgctgggaaagaagggcttcgtggtcctcgtggtgaccaaggtccagttggccgaactggagaagtaggtgcagttggtccccctggcttcgctggtgagaagggtccctctggagaggctggtactgctggacctcctggcactccaggtcctcagggtcttcttggtgctcctggtattctgggtctccctggctcgagaggtgaacgtggtctacctggtgttgctggtgctgtgggtgaacctggtcctcttggcattgccggccctcctggggcccgtggtcctcctggtgctgtgggtagtcctggagtcaacggtgctcctggtgaagctggtcgtgatggcaaccctgggaacgatggtcccccaggtcgcgatggtcaacccggacacaagggagagcgcggttaccctggcaatattggtcccgttggtgctgcaggtgcacctggtcctcatggccccgtgggtcctgctggcaaacatggaaaccgtggtgaaactggtccttctggtcctgttggtcctgctggtgctgttggcccaagaggtcctagtggcccacaaggcattcgtggcgataagggagagcccggtgaaaaggggcccagaggtcttcctggcttcaagggacacaatggattgcaaggtctgcctggtatcgctggtcaccatggtgatcaaggtgctcctggctccgtgggtcctgctggtcctaggggccctgctggtccttctggccctgctggaaaagatggtcgcactggacatcctggtacggttggacctgctggcattcgaggccctcagggtcaccaaggccctgctggcccccctggtccccctggccctcctggacctccaggtgtaagcggtggtggttatgactttggttacgatggagacttctacagggctgaccagcctcgctcagcaccttctctcagacccaaggactatgaagttgatgctactctgaagtctctcaacaaccagattgagacccttcttactcctgaaggctctagaaagaacccagctcgcacatgccgtgacttgagactcagccacccagagtggagcagcggttactactggattgaccccaaccaaggatgcactatggaagccatcaaagtatactgtgatttccctaccggcgaaacctgtatccgggcccaacctgaaaacatcccagccaagaactggtataggagctccaaggacaagaaacacgtctggctaggagaaactatcaatgctggcagccagtttgaatataatgttgaaggagtgacttccaaggaaatggctacccaacttgccttcatgcgcctgctggccaactatgcctctcagaacatcacctaccactgcaagaacagcattgcatacatggatgaggagactggcaacctgaaaaaggctgtcattctacagggctctaatgatgttgaacttgttgctgagggcaacagcaggttcacttacactgttcttgtagatggctgctctaaaaagacaaatgaatggggaaagacaatcattgaatacaaaacaaataagccatcacgcctgcccttccttgatattgcacctttggacatcggtggtgctgaccatgaattctttgtggacattggcccagtctgtttcaaataaatgaactcaatctaaattaaaaaagaaagaaatttgaaaaaactttctctttgccatttcttcttcttcttttttaactgaaagctgaatccttccatttcttctgcacatctacttgcttaaattgtgggcaaaagagaaaaagaaggattgatcagagcattgtgcaatacagtttcattaactccttcccccgctcccccaaaaatttgaatttttttttcaacactcttacacctgttatggaaaatgtcaacctttgtaagaaaaccaaaataaaaattgaaaaataaaaaccataaacatttgcaccacttgtggcttttgaatatcttccacagagggaagtttaaaacccaaacttccaaaggtttaaactacctcaaaacactttcccatgagtgtgatccacattgttaggtgctgacctagacagagatgaactgaggtccttgttttgttttgttcataatacaaaggtgctaattaatagtatttcagatacttgaagaatgttgatggtgctagaagaatttgagaagaaatactcctgtattgagttgtatcgtgtggtgtattttttaaaaaatttgatttagcattcatattttccatcttattcccaattaaaagtatgcagattatttgcccaaagttgtcctcttcttcagattcagcatttgttctttgccagtctcattttcatcttcttccatggttccacagaagctttgtttcttgggcaagcagaaaaattaaattgtacctattttgtatatgtgagatgtttaaataaattgtgaaaaaaatgaaataaagcatgtttggttttccaaaagaacatat

SEQ ID NO: 1267 - DNA, 1032 bp, Homo sapiens
  Genbank Accession No. J03909
ggagggtgggcagcactcgctttattgtccagcattccacatggatagtcgccacacctttgcccctgctgcgatgaccctgtcgccacttctgctgttcctgccaccgctgctgctgctgctggacgtccccacggcggcggtgcaggcgtcccctctgcaagcgttagacttctttgggaatgggccaccagttaactacaagacaggcaatctatacctgcgggggcccctgaagaagtccaatgcaccgcttgtcaatgtgaccctctactatgaagcactgtgcggtggctgccgagccttcctgatccgggagctcttcccaacatggctgttggtcatggagatcctcaatgtcacgtcggtgccctacggaaacgcacaggaacaaaatgtcagtggcaggtgggagttcaagtgccagcttggagaagaggagtgcaaattcaacaaggtggaggcctgcgtgttggatgaacttgacatggagctagccttcctgaccatgtctggcatggcatggaagagtttgaggacatggagagaagtctgccactatgcctgcagctctacgccccagggctgtcgccagaactatcatggagtgtgcaatgggggaccgcggcatgcagctcatgcacgccaacgcccagcggacagatgctctccagccaccgcacgagtatgtgccctgggtcaccgtcaatgggaaacccttggaagatcagacccagctccttacccttgtctgccagttgtaccagggcaagaagccggatgtctgcccttcctcaaccagctccctccggagtgtttgcttcgagtgttggccggtgggctgcggagagctcatggaaggcgagtgggaactcggctgcctgcctttttttctgatccagaccctcggcacctgctacttaccaactggaaaattttatgcatcccatgaagcccagatacacaaaattccacccctagatcaagaatcctgctccactaagaatggtgctaaagtaaaactagtttaat

SEQ ID NO: 1268 - DNA, 1977 bp, Homo sapiens
  Genbank Accession No. J04162
cactccagtgtggcatcatgtggcagctgctcctcccaactgctctgctacttctagtttcagctggcatgcggactgaagatctcccaaaggctgtggtgttcctggagcctcaatggtacagggtgctcgagaaggacagtgtgactctgaagtgccagggagcctactcccctgaggacaattccacacagtggtttcacaatgagaacctcatctcaagccaggcctcgagctacttcattgacgctgccacagtcgacgacagtggagagtacaggtgccagacaaacctctccaccctcagtgacccggtgcagctagaagtccatgtcggctggctgttgctccaggcccctcggtgggtgttcaaggaggaagaccctattcacctgaggtgtcacagctggaagaacactgctctgcataaggtcacatatttacagaatggcaaagacaggaagtattttcatcataattctgacttccacattccaaaagccacactcaaagatagcggctcctacttctgcagggggcttgttgggagtaaaaatgtgtcttcagagactgtgaacatcaccatcactcaaggtttggcagtgtcaaccatctcatcattctctccacctgggtaccaagtctctttctgcttggtgatggtactcctttttgcagtggacacaggactatatttctctgtgaagacaaacatttgaagctcaacaagagactggaaggaccataaacttaaatggagaaaggaccctcaagacaaatgacccccatcccatgggagtaataagagcagtggcagcagcatctctgaacatttctctggatttgcaaccccatcatcctcaggcctctctacaagcagcaggaaacatagaactcagagccagatcctttatccaactctcgatttttccttggtctccagtggaagggaaaagcccatgatcttcaagcagggaagccccagtgagtagctgcattcctagaaattgaagtttcagagctacacaaacactttttctgtcccaaccattccctcacagtaaaacaacaatacaggctagggatggtaatcctttaaacatacaaaaattgctcgtattataaattacccagtttagaggggaaaaaagaaaataattattcctaaacaaatggataagtagaattaatgattgaggcaggaccctacagagtgtgggaactgctggggatctagagaattcagtgggaccaatgaaagcatggctgagaaatagcagggtagtccaggatagtctaagggaggtgttcccatctgagcccagagataagggtgtcttcctagaacattagccgtagtggaattaacaggaaatcatgagggtgacgtagaattgagtcttccaggggactctatcagaactggaccatttccaagtatataacgatgagccctctaatgctaggagtagcaaatggtcctaggaaggggactgaggattggggtgggggtggggtggaaaagaaagtacagaacaaaccctgtgtcactgtcccaagttaagctaagtgaacagaactatctcagcatcagaatgagaatgagaaagcctgagaagaaagaaccaaccacaagcacacaggaaggaaagcgcaggaggtgaaaatgctttcttggccagggtagtaagaattagaggttaatgcagggactgtaaaaccaccttttctgcttcaatgtctagttcctgtatagctttgttcattgcatttattaaacaaatgttgtataaccaatactaaatgtactactgagcttcactgagttacgctgtgaaactttcaaatccttcttcagtcagttccaatgaggtggggatggagaagacaattgttgcttatgaaaaaaagctttagctgtctcctgttttgtaagctttcagtgcaacatttcttggttccaataaagcattttac

SEQ ID NO: 1269 - DNA, 5793 bp, Homo sapiens
  Genbank Accession No. J04423
atactaacttgagcgaaacgggaaggtaaaaagacaaaaagttgtttttaatacctttaagtgataccagatggcattgcgccatctggcagagtgattaactaaacatcgcagtaatcgaggcgcttgccagagagtggaaatgaacgttaaacccgaccatcgccgcgctggcaccttcatcgacatcaatacgttctatatccagcgcgtgaacggtaaaaatgtagcgatgagtttcgcctttcggcggtgctgcgccatcgtacccggttttaccaaagtcggtacgcgtctgcaaaacgccgtctggcattgctaccagaccagagccaaacccttgcggtaatacgcgggtatcagcgggtaagttaacaactacccagtgccaccagccggagccggttggcgcatccgggtcgtagcaggtgacaacaaaacttttcgttcccgcaggaacatcatcccacgccagatgcggtgaaatattatcgccatcgtaacccatgccgttaaagacatgacgatgcggcaatttatcgccatcgcgcagatcgttactgatgagtttcatgaaccctcctttcttgtttgcagaaagtgtagccagaaaccctcacgcggacttctcgttattggcaaaaaaatgtttcatcctgtaccgcgcggttaaccgctgcggtcagacgctgcaactgttgcgggagaataatatagggcggcatcaggtaaatcagtttgccaaaaggccggatccagacaccctgttcgacaaagaatttttgcagcgccgccatattcaccggatgagtggtttcgaccacgccaatggcccccagtacgcgcacatcggcaaccatttcggcatcacgggcgggggcaagttgctcgcgcagctgtacttcaatatccgccacctgttgctgccagtcgccagattcgagaatcgccaggctggcgtttgctgccgcgcaggccagcggattgcccataaaagttggcccatgcataaagcaaccggcttcaccgttactgatggtttctgcaacctcgcgcgtggtgagtgtggcggaaagggtcattgtgccgccggttaaggctttaccgaggcacaaaatgtccggcgcgatttctgcatgttcacaggcaaacagtttcccggtacgaccaaatccagtggcgatctcgtcggcaatcagcaagataccttcgcgatcgcatattttgcggattcgttttaaccattccggatggtacatgcgcatcccgcctgcgccctggacaatcggctcaatgatcaccgccgcgatttcatgacgatgcgccgccatcaggcgggcaaagcccaccatatcgcgctcatcccattcgccatccatgcggctttgcggggcgggagcaaacaggttttctggcaggtagcctttccacagactgtgcattgagttatccggatcgcacaccgacatcgcgccaaaggtatcgccatgataaccattgcggaaggtcagaaaacgctggcgcgcttcgcctttggcttgccagtactgcaacgccattttcatcgccacttccaccgctacggaaccggagtccgcgagaaaaacgcactccagcgcgttgcggccgctcatcgccaccagtttgcggcacagctcaatggctggcgcatgggtgataccgccaaacatcacatgcgacatggcatcaatttgcgacttcatcgccgcattaagctgcgggtgattgtagccgtggatcgccgcccaccaggacgacataccgtcaaccaggcgtctgccgtcagacaaaatcagctcgcaaccttcggcgctcaccaccggataaaccggcagaggggaggtcatggatgtgtatgggtgccagatatggcgttggtcaaaggcaagatcgtccgttgtcataatcgacttgtaaaccaaattgaaaagatttaggtttacaagtctacaccgaattaacaacaaaaaacacgttttggagaagccccatggctcaccgcccacgctggacattgtcgcaagtcacagaattatttgaaaaaccgttgctggatctgctgtttgaagcgcagcaggtgcatcgccagcatttcgatcctcgtcaggtgcaggtcagcacgttgctgtcgattaagaccggagcttgtccggaagattgcaaatactgcccgcaaacgtcgcgctacaaaaccgggctggaagccgagcggttgatggaagttgaacaggtgctggagtcggcgcgcaaagcgaaagcggcaggatcgacgcgcttctgtatgggcgcggcgtggaagaatccccacgaacgcgatatgccgtacctggaacaaatggtgcagggggtaaaagcgatggggctggaggcgtgtatgacgctgggcacgttgagtgaatctcaggcgcagcgcctcgcgaacgccgggctggattactacaaccacaacctggacacctcgccggagttttacggcaatatcatcaccacacgcacttatcaggaacgcctcgatacgctggaaaaagtgcgcgatgccgggatcaaagtctgttctggcggcattgtgggcttaggcgaaacggtaaaagatcgcgccggattattgctgcaactggcaaacctgccgacgccgccggaaagcgtgccaatcaacatgctggtgaaggtgaaaggcacgccgcttgccgataacgatgatgtcgatgcctttgattttattcgcaccattgcggtcgcgcggatcatgatgccaacctcttacgtgcgcctttctgccggacgcgagcagatgaacgaacagactcaggcgatgtgctttatggcaggcgcaaactcgattttctacggttgcaaactgctgaccacgccgaatccggaagaagataaagacctgcaactgttccgcaaactggggctaaatccgcagcaaactgccgtgctggcaggggataacgaacaacagcaacgtcttgaacaggcgctgatgaccccggacaccgacgaatattacaacgcggcagcattatgagctggcaggagaaaatcaacgcggcgctcgatgcgcggcgtgctgccgatgccctgcgtcgccgttatccggtggcgcaaggagccggacgctggctggtggcggatgatcgccagtatctgaacttttccagtaacgattatttaggtttaagccatcatccgcaaattatccgtgcctggcagcagggggcggagcaatttggcatcggtagcggcggctccggtcacgtcagcggttatagcgtggtgcatcaggcactggaagaagagctggccgagtggcttggctattcgcgggcactgctgtttatctctggtttcgccgctaatcaggcagttattgccgcgatgatggcgaaagaggaccgtattgctgccgaccggcttagccatgcctcattgctggaagctgccagtttaagcccgtcgcagcttcgccgttttgctcataacgatgtcactcatttggcgcgattgcttgcttccccctgtccggggcagcaaatggtggtgacagaaggcgtgttcagcatggacggcgatagtgcgccactggcggaaatccagcaggtaacgcaacagcacaatggctggttgatggtcgatgatgcccacggcacgggcgttatcggggagcaggggcgcggcagctgctggctgcaaaaggtaaaaccagaattgctggtagtgacttttggcaaaggatttggcgtcagcggggcagcggtgctttgctccagtacggtggcggattatctgctgcaattcgcccgccaccttatctacagcaccagtatgccgcccgctcaggcgcaggcattacgtgcgtcgctggcggtcattcgcagtgatgagggtgatgcacggcgcgaaaaactggcggcactcattacgcgttttcgtgccggagtacaggatttgccgtttacgcttgctgattcatgcagcgccatccagccattgattgtcggtgataacagccgtgcgttacaactggcagaaaaactgcgtcagcaaggctgctgggtcacggcgattcgcccgccaaccgtacccgctggtactgcgcgactgcgcttaacgctaaccgctgcgcatgaaatgcaggatatcgaccgtctgctggaggtgctgcatggcaacggttaataaacaagccattgcagcggcatttggtcgggcagccgcacactatgagcaacatgcagatctacagcgccagagtgctgacgccttactggcaatgcttccacagcgtaaatacacccacgtactggacgcgggttgtggacctggctggatgagccgccactggcgggaacgtcacgcgcaggtgacggccttagatctctcgccgccaatgcttgttcaggcacgccagaaggatgccgcagaccattatctggcgggagatatcgaatccctgccgttagcgactgcgacgttcgatcttgcatggagcaatctcgcagtgcagtggtgcggtaatttatccacggcactccgcgagctgtatcgggtggtgcgccccaaaggcgtggtcgcgtttaccacgctggtgcagggatcgttacccgaacgtcatcaggcgtggcaggcggtggacgagcgtccgcatgctaatcgctttttaccgccagatgaaatcgaacagtcgctgaacggcgtgcattatcaacatcatattcagcccatcacgctgtggtttgatgatgcgctcagtgccatgcgttcgctgaaaggcatcggtgccacgcatcttcatgaagggcgcgacccgcgaatattaacgcgttcgcagttgcagcgattgcaactggcctggccgcaacagcaggggcgatatcctctgacgtatcatctttttttgggagtgattgctcgtgagtaaacgttattttgtcaccggaacggataccgaagtggggaaaactgtcgccagttgtgcacttttacaagccgcaaagcgagcaggctaccggacggcaggttataaaccggtcgcctctggcagcgaaaagaccccggaaggtttacgcaatagcgacgcgctggcgttacagcgcaacagcagcctgcagctggattacgcaacagtaaatccttacaccttcgcagaacccacttcgccgcacatcatcagcgcgcaagagggcagaccgatagaatcattggtaatgagcgccggattacgcgcgcttgaacaacaggctgactgggtgttagtggaaggtgctggcggctggtttacgccgctttctgacactttcacttttgcagattgggtaacacaggaacaactgccggtgatactggtagttggtgtgaaactcggctgtattaatcacgcgatgttgactgcacaggtaatacaacacgccggactgactctggcgggttgggtggcgaacgatgttacgcctccgggaaaacgtcacgctgaatatatgaccacgctcacccgcatgattccgcgccgctgctgggagagatcccctggcttgcagaaaatccagaaaatgcggcaaccggaaagtacataaaccttgccttgttgtagccattctgtatttggttaaattgcgagcgagatcgcgtcttcgattgactgcaatttaaccaattaaattctaaaataatcacgaaaaaaattttacttccgcctcatgcggcgaatgtgggaattgcccaggcggcgggggataggggctggagacagttatccactattcctgggat

SEQ ID NO: 1270 - DNA, 1447 bp, Homo sapiens
  Genbank Accession No. J04765
gaggcagcagcagcaggaggaggcagacacagcatcgtcgggaccagactcgtctcaggccagttgcagccttctcagccaaacgccgaccaaggaaaactcactaccatgagaattgcagtgatttgcttttgcctcctaggcatcacctgtgccataccagttaaacaggctgattctggaagttctgaggaaaagcagctttacaacaaatacccagatgctgtggccacatggctaaaccctgacccatctcagaagcagaatctcctagccccacagacccttccaagtaagtccaacgaaagccatgaccacatggatgatatggatgatgaagatgatgatgaccatgtggacagccaggactccattgactcgaacgactctgatgatgtagatgacactgatgattctcaccagtctgatgagtctcaccattctgatgaatctgatgaactggtcactgattttcccacggacctgccagcaaccgaagttttcactccagttgtccccacagtagacacatatgatggccgaggtgatagtgtggtttatggactgaggtcaaaatctaagaagtttcgcagacctgacatccagtaccctgatgctacagacgaggacatcacctcacacatggaaagcgaggagttgaatggtgcatacaaggccatccccgttgcccaggacctgaacgcgccttctgattgggacagccgtgggaaggacagttatgaaacgagtcagctggatgaccagagtgctgaaacccacagccacaagcagtccagattatataagcggaaagccaatgatgagagcaatgagcattccgatgtgattgatagtcaggaactttccaaagtcagccgtgaattccacagccatgaatttcacagccatgaagatatgctggttgtagaccccaaaagtaaggaagaagataaacacctgaaatttcgtatttctcatgaattagatagtgcatcttctgaggtcaattaaaaggagaaaaaatacaatttctcactttgcatttagtcaaaagaaaaaatgctttatagcaaaatgaaagagaacatgaaatgcttctttctcagtttattggttgaatgtgtatctatttgagtctggaaataactaatgtgtttgataattagtttagtttgtggcttcatggaaactccctgtaaactaaaagcttcagggttatgtctatgttcattctatagaagaaatgcaaactatcactgtattttaatatttgttattctctcatgaatagaaatttatgtagaagcaaacaaaatacttttacccacttaaaaagagaatataacattttatgtcactataatcttttgttttttaagttagtgtatattttgttgtgattatctttttgtggtgtgaataaatcttttatcttgaatgtaataag

SEQ ID NO: 1271 - DNA, 2158 bp, Homo sapiens
  Genbank Accession No. J05036
ggagagaagaaaggagggggcaagggagaagctgctggtcggactcacaatgaaaacgctccttcttttgctgctggtgctcctggagctgggagaggcccaaggatcccttcacagggtgcccctcaggaggcatccgtccctcaagaagaagctgcgggcacggagccagctctctgagttctggaaatcccataatttggacatgatccagttcaccgagtcctgctcaatggaccagagtgccaaggaacccctcatcaactacttggatatggaatacttcggcactatctccattggctccccaccacagaacttcactgtcatcttcgacactggctcctccaacctctgggtcccctctgtgtactgcactagcccagcctgcaagacgcacagcaggttccagccttcccagtccagcacatacagccagccaggtcaatctttctccattcagtatggaaccgggagcttgtccgggatcattggagccgaccaagtctctgtggaaggactaaccgtggttggccagcagtttggagaaagtgtcacagagccaggccagacctttgtggatgcagagtttgatggaattctgggcctgggatacccctccttggctgtgggaggagtgactccagtatttgacaacatgatggctcagaacctggtggacttgccgatgttttctgtctacatgagcagtaacccagaaggtggtgcggggagcgagctgatttttggaggctacgaccactcccatttctctgggagcctgaattgggtcccagtcaccaagcaagcttactggcagattgcactggataacatccaggtgggaggcactgttatgttctgctccgagggctgccaggccattgtggacacagggacttccctcatcactggcccttccgacaagattaagcagctgcaaaacgccattggggcagcccccgtggatggagaatatgctgtggagtgtgccaaccttaacgtcatgccggatgtcaccttcaccattaacggagtcccctataccctcagcccaactgcctacaccctactggacttcgtggatggaatgcagttctgcagcagtggctttcaaggacttgacatccaccctccagctgggcccctctggatcctgggggatgtcttcattcgacagttttactcagtctttgaccgtgggaataaccgtgtgggactggccccagcagtcccctaaggaggggccttgtgtctgtgcctgcctgtctgacagaccttgaatatgttaggctggggcattctttacacctacaaaaagttattttccagagaatgtagctgtttccagggttgcaacttgaattaagaccaaacagaacatgagaatacacacacacacacacatatacacacacacacacttcacacatacacaccactcccaccaccgtcatgatggaggaattacgttatacattcatattttgtattgatttttgattatgaaaatcaaaaattttcacatttgattatgaaaatctccaaacatatgcacaagcagagatcatggtataataaatccctttgcaactccactcagccctgacaacccatccacacacggccaggcctgtttatctacactgctgcccactcctctctccagctccacatgctgtacctggatcattctgaagcaaattccgagcattacatcattttgtccataaatatttctaacatccttaaatatacaatcggaattcaagcatctcccattgtcccacaaatgtttggctgtttttgtagttggattgtttgtattaggattcaagcaaggcccatatattgcatttatttgaaatgtctgtaagtctctttccatctacagagtttagcacatttgaacgttgctggttgaaatcccgaggtgtcatttgacatggttctctgaacttatctttcctataaaatggtagttagatctggaggtctgattttgtggcaaaaatacttcctaggtggtgctgggtacttcttgttgcatcctgtcaggaggcagataatgctggtgcctctctattggtaatgttaagactgctgggtgggtttggagttcttggctttaatcattcattacaaagttcagcatttt

SEQ ID NO: 1272 - DNA, 6210 bp, Homo sapiens
  Genbank Accession No. K00650
gcaggaacagtgctagtattgctcgagcccgagggctggaggttaggggatgaaggtctgcttccacgctttgcactgaattagggctagaattggggatgggggtaggggcgcattccttcgggagccgaggcttaagtcctcggggtcctgtactcgatgccgtttctcctatctctgagcctcagaactgtcttcagtttccgtacaagggtaaaaaggcgctctctgccccatcccccccgacctcgggaacaagggtccgcattgaaccaggtgcgaatgttctctctcattctgcgccgttcccgcctcccctcccccagccgcggcccccgcctccccccgcactgcaccctcggtgttggctgcagcccgcgagcagttcccgtcaatccctccccccttacacaggatgtccatattaggacatctgcgtcagcaggtttccacggcctttccctgtagccctggggggagccatccccgaaacccctcatcttggggggcccacgagacctctgagacaggaactgcgaaatgctcacgagattaggacacgcgccaaggcgggggcagggagctgcgagcgctggggacgcagccgggcggccgcagaagcgcccaggcccgcgcgccacccctctggcgccaccgtggttgagcccgtgacgtttacactcattcataaaacgcttgttataaaagcagtggctgcggcgcctcgtactccaaccgcatctgcagcgagcaactgagaagccaagactgagccggcggccgcggcgcagcgaacgagcagtgaccgtgctcctacccagctctgcttcacagcgcccacctgtctccgcccctcggcccctcgcccggctttgcctaaccgccacgatgatgttctcgggcttcaacgcagactacgaggcgtcatcctcccgctgcagcagcgcgtccccggccggggatagcctctcttactaccactcacccgcagactccttctccagcatgggctcgcctgtcaacgcgcaggtaaggctggcttcccgtcgccgcggggccgggggcttggggtcgcggaggaggagacaccgggcgggacgctccagtagatgagtagggggctcccttgtgcctggagggaggctgccgtggccggagcggtgccggctcgggggctcgggacttgctctgagcgcacgcacgcttgccatagtaagaattggttcccccttcgggaggcaggttcgttctgagcaacctctggtctgcactccaggacggatctctgacattagctggagcagacgtgtcccaagcacaaactcgctaactagagcctggcttcttcggggaggtggcagaaagcggcaatcccccctcccccggcagcctggagcacggaggagggatgagggaggagggtgcagcgggcgggtgtgtaaggcagtttcattgataaaaagcgagttcattctggagactccggagcggcgcctgcgtcagcgcagacgtcagggatatttataacaaaccccctttcaagcaagtgatgctgaagggataacgggaacgcagcggcaggatggaagagacaggcactgcgctgcggaatgcctgggaggaaaagggggagacctttcatccaggatgagggacatttaagatgaaatgtccgtggcaggatcgtttctcttcactgctgcatgcggcactgggaactcgccccacctgtgtccggaacctgctcgctcacgtcggctttccccttctgttttgttctaggacttctgcacggacctggccgtctccagtgccaacttcattcccacggtcactgccatctcgaccagtccggacctgcagtggctggtgcagcccgccctcgtctcctctgtggccccatcgcagaccagagcccctcaccctttcggagtccccgccccctccgctggggcttactccagggctggcgttgtgaagaccatgacaggaggccgagcgcagagcattggcaggaggggcaaggtggaacaggtgaggaactctagcgtactcttcctgggaatgtgggggctgggtgggaagcagccccggagatgcaggagcccagtacagaggatgaagccactgatggggctggctgcacatccgtaactgggagccctggctccaagcccattccatcccaactcagactctgagtctcaccctaagaagtactctcatagtttcttccctaagtttcttaccgcatgctttcagactgggctcttctttgttctcttgctgaggatcttattttaaatgcaagtcacacctattctgcaactgcaggtcagaaatggtttcacagtggggtgccaggaagcagggaagctgcaggagccagttctactggggtgggtgaatggaggtgatggcagacacttttactgaatgtcggtctttttttgtgattattctagttatctccagaagaagaagagaaaaggagaatccgaagggaaaggaataagatggctgcagccaaatgccgcaaccggaggagggagctgactgatacactccaagcggtaggtactctgtgggttgctcctttttaaaacttaagggaaagttggagattgagcataagggcccttgagtaagactgtgtcttatgctttcctttatccctctgtatacaggagacagaccaactagaagatgagaagtctgctttgcagaccgagattgccaacctgctgaaggagaaggaaaaactagagttcatcctggcagctcaccgacctgcctgcaagatccctgatgacctgggcttcccagaagagatgtctgtggcttcccttgatctgactgggggcctgccagaggttgccaccccggagtctgaggaggccttcaccctgcctctcctcaatgaccctgagcccaagccctcagtggaacctgtcaagagcatcagcagcatggagctgaagaccgagccctttgatgacttcctgttcccagcatcatccaggcccagtggctctgagacagcccgctccgtgccagacatggacctatctgggtccttctatgcagcagactgggagcctctgcacagtggctccctggggatggggcccatggccacagagctggagcccctgtgcactccggtggtcacctgtactcccagctgcactgcttacacgtcttccttcgtcttcacctaccccgaggctgactccttccccagctgtgcagctgcccaccgcaagggcagcagcagcaatgagccttcctctgactcgctcagctcacccacgctgctggccctgtgagggggcagggaaggggaggcagccggcacccacaagtgccactgcccgagctggtgcattacagagaggagaaacacatcttccctagagggttcctgtagacctagggaggaccttatctgtgcgtgaaacacaccaggctgtgggcctcaaggacttgaaagcatccatgtgtggactcaagtccttacctcttccggagatgtagcaaaacgcatggagtgtgtattgttcccagtgacacttcagagagctggtagttagtagcatgttgagccaggcctgggtctgtgtctcttttctctttctccttagtcttctcatagcattaactaatctattgggttcattattggaattaacctggtgctggatattttcaaattgtatctagtgcagctgattttaacaataactactgtgttcctggcaatagtgtgttctgattagaaatgaccaatattatactaagaaaagatacgactttattttctggtagatagaaataaatagctatatccatgtactgtagtttttcttcaacatcaatgttcattgtaatgttactgatcatgcattgttgaggtggtctgaatgttctgacattaacagttttccatgaaaacgttttattgtgtttttaatttatttattaagatggattctcagatatttatatttttattttatttttttctaccttgaggtcttttgacatgtggaaagtgaatttgaatgaaaaatttaagcattgtttgcttattgttccaagacattgtcaataaaagcatttaagttgaatgcgaccaaccttgtgctcttttcattctggaagtcttgtaagtttctgaaaggtattattggagaccagtttgtcaagaagggtagctgctggagggggacacaccctctgtctgatcccttatcaaagaggacaaggaaactatagagctgattttagaatattttacaaatacatgccttccattggaatgctaagattttctactgcttctggggacgggaaaccgctgtgtaacagcttttgtgggaatacattttttctgtttcagtactcgcagggggaaatatttaaattttgttgtgctaatattaaattcagatgttttgatcttaaaggaaccctttaagcaaacagaacctagctttgtacagactattttaactttttattctcacaaaatcacgtggagggttattctacttcaaagatgagcaaattgaagaatggttagaataaacaactttcttgatattccgttatcggcattagaatcttcctgctcgttatcgtatccagcaggctgaactgcctcttgatacttggttaaaaaaaattttcaggccgggcgcggtggcccatgcctgtaatcctagcactttgggaggccgaggcaggcggatcacctgaggtcgggagttcgagaccagcctgaccaacatggagaaaccccgtctttactaaaaatacaaaattagcctggtgtggtggtgcatgcctgtaatcctagctacttgagaggctgagacaggaaaatcacttgaactcgggaggcggatgttgcagcgaactgagattgcgccattgcactccagcctgggcaacaagattgaaactctgtttaaaaaaaaaagttttcactaatgtgtacatttttttgtactcttttattctcgaaagggaaggagggctattgccctatcccttattaataaatgcattgtggtttctggtttctctaataccatatgcccttcattcagtttatagtgggcggaagtgggggagaaaaagttgctcagaaatcaaaagatatctcaaacagcacaaataatggctgatcgttctgcaaacaaaaagttacataatagctcaagaaggagaagtcaacatgactctgaacaagctttaacttagaaactttatcatcttaaggaagaacgtgacctttgtccaggacgtctctggtaatggggcacttacacacacatgcacacgtacaaaccacagggaaaggagaccgcccttctgcctctgctcgcgagtatcacgcaggcaccatgcactatgttttcacacacactgggtggaagaagagcttcagcgccagtcttctaatgctttggtgataatgaaaatcactgggtgcttatggggtgtcatattcaatcgagttaaaagttttaattcaaaatgacagttttactgaggttgatgttctcgtctatgatatctctgcccctcccataaaaatggacatttaaaagcaacttaccgctctttagatcactcctatatcacacaccacttggggtgctgtttctgctagacttgtgatgacagtggccttaggatccctgtttgctgttcaaagggcaaatattttatagcctttaaatatacctaaactaaatacagaattaatataactaacaaacacctggtctgaaataacaaggtgatctaccctggaaggaacccagctggtgggccaggagcggtggctcacacctgtaattccagcactttgggaggctgagacaggaggatcactggagtccaggagtttgagaccagcctgggcaacatggcaaaacccagtgtgcttctgttgtcccagctacactactcaggaggctgaggcaggagtatgacttgagcctgggagggggaggttgcagagaactgatattgcaccaccactgcactccagcctgggtgacacagcaaaaccctatctcaaaaaaaaaaaaaaaaaaaaggaacccagctggttcctgtaggtgtgcaataataacaaccagaggaagaaaaggaagacgatttcccagatgaagaagggcagctggaccttcggac

SEQ ID NO: 1273 - DNA, 2657 bp, Homo sapiens
  Genbank Accession No. L05144
tgggaacacaaacttgctggcgggaagagcccggaaagaaacctgtggatctcccttcgagatcatccaaagagaagaaaggtgacctcacattcgtgccccttagcagcactctgcagaaatgcctcctcagctgcaaaacggcctgaacctctcggccaaagttgtccagggaagcctggacagcctgccccaggcagtgagggagtttctcgagaataacgctgagctgtgtcagcctgatcacatccacatctgtgacggctctgaggaggagaatgggcggcttctgggccagatggaggaagagggcatcctcaggcggctgaagaagtatgacaactgctggttggctctcactgaccccagggatgtggccaggatcgaaagcaagacggttatcgtcacccaagagcaaagagacacagtgcccatccccaaaacaggcctcagccagctcggtcgctggatgtcagaggaggattttgagaaagcgttcaatgccaggttcccagggtgcatgaaaggtcgcaccatgtacgtcatcccattcagcatggggccgctgggctcacctctgtcgaagatcggcatcgagctgacggattcgccctacgtggtggccagcatgcggatcatgacgcggatgggcacgcccgtcctggaagcactgggcgatggggagtttgtcaaatgcctccattctgtggggtgccctctgcctttacaaaagcctttggtcaacaactggccctgcaacccggagctgacgctcatcgcccacctgcctgaccgcagagagatcatctcctttggcagtgggtacggcgggaactcgctgctcgggaagaagtgctttgctctcaggatggccagccggctggcagaggaggaagggtggctggcagagcacatgctgattctgggtataaccaaccctgagggtgagaagaagtacctggcggccgcatttcccagcgcctgcgggaagaccaacctggccatgatgaaccccagcctccccgggtggaaggttgagtgcgtcggggatgacattgcctggatgaagtttgacgcacaaggtcatttaagggccatcaacccagaaaatggctttttcggtgtcgctcctgggacttcagtgaagaccaaccccaatgccatcaagaccatccagaagaacacaatctttaccaatgtggccgagaccagcgacgggggcgtttactgggaaggcattgatgagccgctagcttcaggcgtcaccatcacgtcctggaagaataaggagtggagctcagaggatggggaaccttgtgcccaccccaactcgaggttctgcacccctgccagccagtgccccatcattgatgctgcctgggagtctccggaaggtgttcccattgaaggcattatctttggaggccgtagacctgctggtgtccctctagtctatgaagctctcagctggcaacatggagtctttgtgggggcggccatgagatcagaggccacagcggctgcagaacataaaggcaaaatcatcatgcatgacccctttgccatgcggcccttctttggctacaacttcggcaaatacctggcccactggcttagcatggcccagcacccagcagccaaactgcccaagatcttccatgtcaactggttccggaaggacaaggaaggcaaattcctctggccaggctttggagagaactccagggtgctggagtggatgttcaaccggatcgatggaaaagccagcaccaacgtcacgcccataggctacatccccaaggaggatgccctgaacctgaaaggcctggggcacatcaacatgatggagcttttcagcatctccaaggaattctgggacaaggaggtggaagacatcgagaagtatctggtggatcaagtcaatgccgacctcccctgtgaaatcgagagagagatccttgccttgaagcaaagaataagccagatgtaatcagggcctgagaataagccagatgtaatcagggcctgagtgctttacctttaaaatcattaaattaaaatccataaggtgcagtaggagcaagagagggcaagtgttcccaaattgacgccacctaataatcatcaccacaccgggagcagatctgaaggcacactttgatttttttaaggataagaaccacagaacactgggtagtagctaatgaaattgagaagggaaatcttagcatgcctccaaaaattcacatccaatgcatactttgttcaaatttaaggttactcaggcattgatcttttcagtgttttttcacttagctatgtggattagctagaatgcacaccaaaaagatacttgagctgtatatatatatgtgtgtgtgtgtgtgtgtgtgtgtgtgtgtgcatgtatgtgcacatgtgtctgtgtgatatttggtatgtgtatttgtatgtactgttattcaaaatatatttaatacctttggaaaatcttgggcaagatgacctactagttttccttgaaaaaaagttgctttgttattaatattgtgcttaaattatttttatacaccattgttccttacctttacataattgcaatatttcccccttactacttcttggaaaaaaattagaaaatgaagtttatagaaaag

SEQ ID NO: 1274 - DNA, 3115 bp, Homo sapiens
  Genbank Accession No. L06419
ccaccatatcggtcccgtatttcacattgataaggtcctgtttcatttctcgtgacattgggtagaatgaggatcctgttttcaatgggtcgctttaccctgggactgacagggaggctctgaccatttagccaccaaatgtaggtgtagttctcactcttaggttcaccccgcggccgatcgtcccccatacctcggccatgcggcccctgctgctactggccctgctgggctggctgctgctggccgaagcgaagggcgacgccaagccggaggacaaccttttagtcctcacggtggccactaaggagaccgagggattccgtcgcttcaagcgctcagctcagttcttcaactacaagatccaggcgcttggcctaggggaggactggaatgtggagaaggggacgtcggcaggtggagggcagaaggtccggctgctgaagaaagctctggagaagcacgcagacaaggaggatctggtcattctcttcacagacagctatgacgtgctgtttgcatcggggccccgggagctcctgaagaagttccggcaggccaggagccaggtggtcttctctgctgaggagctcatctacccagaccgcaggctggagaccaagtatccggtggtgtccgatggcaagaggttcctgggctctggaggcttcatcggttatgcccccaacctcagcaaactggtggccgagtgggagggccaggacagcgacagcgatcagctgttttacaccaagatcttcttggacccggagaagagggagcagatcaatatcaccctggaccaccgctgccgtatcttccagaacctggatggagccttggatgaggtcgtgctcaagtttgaaatgggccatgtgagagcgaggaacctggcctatgacaccctcccggtcctgatccatggcaacgggccaaccaagctgcagttgaactacctgggcaactacatcccgcgcttctggaccttcgaaacaggctgcaccgtgtgtgacgaaggcttgcgcagcctcaagggcattggggatgaagctctgcccacggtcctggtcggcgtgttcatcgaacagcccacgccgtttgtgtccctgttcttccagcggctcctgcggctccactacccccagaaacacatgcgacttttcatccacaaccacgagcagcaccacaaggctcaggtggaagagttcctggcacagcatggcagcgagtaccagtctgtgaagctggtgggccctgaggtgcggatggcgaatgcagatgccaggaacatgggcgcagacctgtgccggcaggaccgcagctgcacctactacttcagcgtggatgctgacgtggccctgaccgagcccaacagcctgcggctgctgatccaacagaacaagaatgtcattgccccgctgatgacccggcatgggaggctgtggtcgaacttctggggggctctcagtgcagatggctactatgcccgttccgaggactacgtggacattgtgcaggggcggcgtgttggtgtctggaatgtgccctatatttcaaacatctacttgatcaagggcagtgccctgcggggtgagctgcagtcctcagatctcttccaccacagcaagctggaccccgacatggccttctgtgccaacatccggcagcaggatgtgttcatgttcctgaccaaccggcacacccttggccatctgctctccctagacagctaccgcaccacccacctgcacaacgacctctgggaggtgttcagcaaccccgaggactggaaggagaagtacatccaccagaactacaccaaagccctggcagggaagctggtggagacgccctgcccggatgtctattggttccccatcttcacggaggtggcctgtgatgagctggtggaggagatggagcactttggccagtggtctctgggcaacaacaaggacaaccgcatccagggtggctacgagaacgtgccgactattgacatccacatgaaccagatcggctttgagcgggagtggcacaaattcctgctggagtacattgcgcccatgacggagaagctctaccccggctactacaccagggcccagtttgacctggcctttgtcgtccgctacaagcctgatgagcagccctcactgatgccacaccatgatgcctccaccttcaccatcaacatcgccctgaaccgagtcggggtggattacgagggcgggggctgtcggttcctgcgctacaactgttccatccgagccccaaggaagggctggaccctcatgcaccctggacgactcacgcattaccatgaggggctccccaccaccaggggcacccgctacatcgcagtctccttcgtcgatccctaattggccaggcctgaccctcttggacctttcttctttgccgacaaccactgcccagcagcctctgggacctcggggtcccagggaacccagtccagcctcctggctgttgacttcccattgctcttggagccaccaatcaaagagattcaaagagattcctgcaggccagaggccggaacacacctttatggctggggctctccgtggtgttctggacccagcccctggagacaccattcacttttactgctttgtagtgactcgtgctctccaacctgtcttcctgaaaaaccaaggcccccttcccccacctcttccatggggtgagacttgagcagaacaggggcttccccaagttgcccagaaagactgtctgggtgagaagccatggccagagcttctcccaggcacaggtgttgcaccagggacttctgcttcaagttttggggtaaagacacctggatcagactccaagggctgccctgagtctgggacttctgcctccatggctggtcatgagagcaaaccgtagtcccctggagacagccactccagagaacctcttgggagacagaagaggcatctgtgcacagctcgatcttctacttgcctgtggggaggggagtgacaggtccacacaccacactgggtcaccctgtcctggatgcctctgaagagagggacagaccgtcagaaactggagagtttctattaaaggtcatttaaaccac

SEQ ID NO: 1275 - DNA, 692 bp, Homo sapiens
  Genbank Accession No. L07493
ttccccgagccgcagtcttggaccataatcatggtggacatgatggacttgcccaggtcgcgcatcaacgccggcatgctagctcaattcatcgacaagcctgtctgcttcgtagggaggctggaaaagattcatcccaccggaaaaatgtttattctttcagatggagaaggaaaaaatggaaccatcgagttgatggaaccccttgatgaagaaatctctggaattgtggaagtggttggaagagtaaccgccaaggccaccatcttgtgtacatcttatgtccagtttaaagaagatagccatccttttgatcttggactttacaatgaagctgtgaaaattatccatgacttccctcagttttatcctttagggattgtgcaacatgattgatcttgatggattttcatacgattgtaaatgagctatattaaagtctattaaaggaagcccttcttgtttgagggagagatttctgtgctttctcatatttaatttgctgtttttaagatattccaacctagagtttttgatggaactgatatattgacagttctcaccgaagcccttttataaagaattgctactccaatatatggtcagattagatgcaagaataaagcagttgtccgagtctaagtttctattttattaataaaaactaaaatggtacgtacaaaaaaaaaacc

SEQ ID NO: 1276 - DNA, 3311 bp, Homo sapiens
  Genbank Accession No. L09708
ggatccttccaccttgcctaccaaagtggggatgaaagtttgtctggggcattgcagttttagacaggaagaccagggaaggcctcactgagaaggtgacatttgagccaagacttaaaaaggtacgaaagtgagccatgtggaagtcttggggggaggagtgaactaggcagaggcacagctgggcaaagggcctgaggtgtgaccatgcctatggatttgaggaacttcaaagaggctgtgtgctgcaggagagtgaagggcagggagtggcaggaaatgaaggcagacaggtagcagtggggaggacgcaggggtccagctcatgtaggtcttgattggacacagtgagtttcagatgacagcctcctgtctcatggggtagccccaaagccacaggagtctggtgatttccctcttccccaccagacatctatgccatcggggtgggcaagctggatgtggactggagagaactgaatgagctagggtccaagaaggatggtgagaggcatgccttcattctgcaggacacaaaggctctgcaccaggtctttgaacatatgctgggtgagtgagctttgccctccttggtgtggggaggatggtgaggagcccgccaaaggcccgttttgggaacctggacacagtgcccctcacttgcctccttccccatctgatcctcacacccacagatgtctccaagctcacagacaccatctgcggggtggggaacatgtcagcaaacgcctctgaccaggagaggacaccctggcatgtcactattaaggtaccaggaaggaggggcagggcttggattccagaggtaaaagcggccatgggccagacatactgcaatctctgaaaatcacctgttcccctgcagcccaagagccaagagacctgccggggggccctcatctccgaccaatgggtcctgacagcagctcattgcttccgcgatggcaacgaccactccctgtggagggtcaatgtgggtaaggcaggggatgcaccagcctcctgatccgtgaagccacagatcctaccacctcacccagcctctggcccctgcaggagccctggtctagcctaatctagtgtatcatttccaggagaccccaaatcccagtggggcaaagaattccttattgagaaggcggtgatctccccagggtttgatgtctttgccaaaaagaaccagggaatcctggagttctatggtgatgacatagctctgctgaagctggcccagaaagtaaagatgtccacccatgccaggtgcctggagtcttggatgggagggtgccctgcagggaagagtgctctggagatccctggaagagactactggggacaggctggtgtgacccttgctcttctccccaggcccatctgccttccctgcacgatggaggccaatctggctctgcggagacctcaaggcagcacctgtagggaccatggtgagtgctgggacttatggtgcttgagagctggggccggggtttgggggtgataacaaggactaggctgcagtccccaagccaggaacctggattctgggtaaaaggaccagcaccaacatccccttctcttgactatagagaatgaactgctgaacaaacagagtgttcctgctcattttgtcgccttgaatgggagcaaactgaacattaaccttaagatgggagtggaggtgagggtctcaggttggggatgctgggatccccctgtgacagctcccagaatgtctctcttccttctccaggtctggctgctttctctctctgacgcgggtcacccctcctcccaagcctcacaaacctgctaggtgtccctgggtctgcttattctttttttgttgttattgagatggagtcttgctctgtctcccaggctggagtgcagtggcacgacctcagctcactgcaacttctgcctcctgggttcaagcgattctcctacttcagcctcccgagtagctgagattacaggtgcccaccaccacaccagctaatttttgtatttttagtagagacgggacttcgccatgttggccaggatggtcttgaactcctgacctcaagtgatctgcctgcctcaacctcccaaagtgctgagattacaggcgtgagccactgcaccccacccgggtctgcttattctacccttctctctggttccacccctgctgcagtggacaagctgtgccgaggttgtctcccaagaaaaaaccatgttccccaacttgacagatgtcagggaggtggtgacagaccagttcctatgcagtgggacccaggaggatgagagtccctgcaagggtgagtccctcaccatgcctggattcccaaggggaaggccacctgtgtctctgtggccagcatgcatgccagaacaccagtccactgccctagatgacactgtctcctgtcaccctttgctggcaggagaatctgggggagcagttttccttgagcggagattcaggttttttcaggtgagaaggtagaagcttgcaggacccaggggttacaggatctcagccttgttggggggatgagggaggcctttgagggatctagggaggttggggcttacagttggggctgtggcagcctcccagccagttctctccttttctccaggtgggtctggtgagctggggtctttacaacccctgccttggctctgctgacaaaaactcccgcaaaagggcccctcgtagcaaggtcccgccgccacgagactttcacatcaatctcttccgcatgcagccctggctgaggcagcacctgggggatgtcctgaattttttacccctctagccatggccactgagccctctgctgccctgccagaatctgccgcccctccatcttctacctctgaatggccacccttagaccctgtgatccatcctctctcctagctgagtaaatccgggtctctaggatgccagaggcagcgcacacaagctgggaaatcctcagggctcctaccagcaggactgcctcgctgccccacctcccgctccttggcctgtccccagattccttccctggttgacttgactcatgcttgtttcactttcacatggaatttcccagttatgaaattaataaaaatcaatggtttccacatctctcagtgcctctatctggaggccaggtagggctggccttgggggagggggaggccagaatgactccaagagctacaggaaggcaggtcagagaccccactggacaaacagtggctggactctgcaccataacacacaatcaacaggggagtgagctggatcc

SEQ ID NO: 1277 - DNA, 2309 bp, Homo sapiens
  Genbank Accession No. L10343
  unsure (1)..(2309): n = a or c or g or t
tttgtcttcaagagtttttcgagaccagggaagaaggaaggaaatgcccagtttgatcgtgggagtggtaaaatgataaagtagatctgggtggggtttgtagcaccagagcataatggagaaacaccttggttttgtaatcaagactggatctaccagtgacttgctgaataacttcggtgattcctttctcttcttgggtctcactgtatttcaaaacatgaagaatttcattgtaatgttacctaataagtgagccagcacttctactctgtgagaaagtaggaaaactcttgggacaatcagagatgatgtgatgtaatgtccattagttcttcctgtgaataatcctgagggaaagcccccaggtccctcccagaatggggtggatatttcccaatacagctaaggaattatcccttgtaaataccacagacccgccctggagccaggccaagctggactgcataaagattggtatggccttagctcttagccaaacaccttcctgacaccatgagggccagcagcttcttgatcgtggtggtgttcctcatcgctgggacgctggttctagaggcagctgtcacgggaggtgagtgaacaggtgacctgctgggctgggttggactaaggggagaccctctggacaccctgggccaggacagggagcactactgaagcagtaggcagcactggagcccagatttcagctttctgttctttgccatcatattcagaaaaaataggactttggctggtggactccacgtgctttccacctcagtgactgagatatcaggactgtttgtggaagtaatgttggtatgtggccttggcctcagatgtcaatacctgtgcagaatgtgcaataaaataatgaactccaggattttaaaccttgggtgtggacacagtccccgtttctctgccccataaaagcactggagtaatcagtactctaaaaggaggttaagaaacaacaagccttcaggaatcatgttgtttgaggacccccattttataaggagggaaccaaaaatgtagaaatgagtgagcaattgccaaggtaattcccagagccaggatggggctcaagtctcctagtatgtggctcagggttctttcctactccaatgcacttcctaacaaatgacaatgtgtcctcttcactgctgggtgtcaccccagtctgaccactgctcctgagagacttggagtggaggaagggggaagaaacaaatactcaagggaactctggtcctgtagaccaccccaaaaaaggaagagccttccaagagtgtagctcccagaggtgtaccttccctactcaggccatggtttgaggatgctgcagtaagcagtggatggacccagacccagaggaaagacatggcagctgaagcagaggcttactgggtataaatgtgggctcgtttcttcttttaacagttcctgttaaaggtcaagacactgtcaaaggccgtgttccattcaatggacaagatcccgttaaaggacaagtttcagttaaaggtcaagataaagtcaaagcgcaagagccagtcaaaggtccagtctccactaagcctggctcctgccccattatcttgatccggtgcgccatgttgaatccccctaaccgctgcttgaaagatactgactgcccaggaatcaagaagtgctgtgaaggctcttgcgggatggcctgtttcgttccccagtgaggtgagcactagctggagaacgaggagacccctgaagacacaaaagaaggctgagcggtggggaagcatcccaggttggtgggagggaggttgtgggaggtgacagaaagactgggagactgaggggtctgagaggctataaccagagtgcctagaaggatgatctgtcttcctcactgcctctgagtgctttgatgtgctgactctcacctctgatactcttctcttccacagagggagccggtccttgctgcacctgtgccgtccccagagctacaggccccatctggtcctaagtccctgctgcccttccccttcccacactgtccattcttcctcccattcaggatgcccacggctggagctgcctctctcatccactttccaataaagacttccttctgctccacttgtttctggttcctatgacttctgggctcctggatgctttggggaaatggatgtagaattgggacttcttctctccagtgaagaggggaaacggtcccatggtgaaagagagcaggnnggaggaaacaaggaggcacatgctagggcttcatattacaatccaataatcag

SEQ ID NO: 1278 - DNA, 2619 bp, Homo sapiens
  Genbank Accession No. L10386
cctttagaggagcctgagaagaggcagaggaagggcgaaacatggctgctctaggagtccagagtatcaactggcagaaggccttcaaccgacaagcgcatcacacagacaagttctccagccaggagctcatcttgcggagaggccaaaacttccaggtcttaatgatcatgaacaaaggccttggctctaacgaaagactggagttcattgacaccacagggccttacccctcagagtcggccatgacgaaggctgtgtttccactctccaatggcagtagtggtggctggagtgcggtgcttcaggccagcaatggcaatactctgactatcagcatctccagtcctgccagcgcacccataggacggtacacaatggccctccagatcttctcccagggcggcatctcctctgtgaaacttgggacgttcatactgctttttaacccctggctgaatgtggatagcgtctttatgggtaaccatgctgagagagaagagtatgttcaggaagatgccggcatcatctttgtgggaagcacaaaccgaattggcatgattggctggaactttggacagtttgaagaagacattctcagcatctgcctctcaatcttggataggagtctgaatttccgccgtgacgctgctactgatgtggccagcagaaatgaccccaaatacgttggccgggtgctgagtgccatgatcaatagcaatgatgacaatggtgtgcttgctgggaattggagcggcacttacaccggtggccgggacccaaggagctgggacggcagcgtggagatcctcaaaaattggaaaaaatctggcttcagcccagtccgatatggccagtgctgggtctttgctgggaccctcaacacagcgctgcggtctttggggattccttcccgggtgatcaccaacttcaactcagctcatgacacagaccgaaatctcagtgtggatgtgtactacgaccccatgggaaaccccctggacaagggtagtgatagcgtatggaatttccatgtctggaatgaaggctggtttgtgaggtctgacctgggccccccgtacggtggatggcaggtgttggatgctaccccgcaggaaagaagccaaggggtgttccagtgcggccccgcttcggtcattggtgttcgagagggtgatgtgcagctgaacttcgacatgccctttatcttcgcggaggttaatgccgaccgcatcacctggctgtacgacaacaccactggcaaacagtggaagaattccgtgaacagtcacaccattggcaggtacatcagcaccaaggcggtgggcagcaatgctcgcatggacgtcacggacaagtacaagtacccagaaggctctgaccaggaaagacaagtgttccaaaaggctttggggaaacttaaacccaacacgccatttgccgcgacgtcttcgatgggtttggaaacagaggaacaggagcccagcatcatcgggaagctgaaggtcgctggcatgctggcagtaggcaaagaagtcaacctggtcctactgctcaaaaacctgagcagggatacgaagacagtgacagtgaacatgacagcctggaccatcatctacaacggcacgcttgtacatgaagtgtggaaggactctgccacaatgtccctggaccctgaggaagaggcagaacatcccataaagatctcgtacgctcagtatgagaggtacctgaagtcagacaacatgatccggatcacagcggtgtgcaaggtcccagatgagtctgaggtggtggtggagcgggacatcatcctggacaaccccaccttgaccctggaggtgctgaacgaggctcgtgtgcggaagcctgtgaacgtgcagatgctcttctccaatccactggatgagccggtgagggactgcgtgctgatggtggagggaagcggcctgctgttgggtaacctgaagatcgacgtgccgaccctagggcccaaggagcggtcccgggtccgttttgatatcctgccctcccggagtggcaccaagcaactgctcgccgacttctcctgcaacaagttccctgcaatcaaggccatgttgtccatcgacgtagccgaatgaagggcgctggtggcctcccgtacaaacttggacaacacggagcagggagagctcaccatggaatgaaccccccgcccatgctgtccggcctgggaaaccctctccatctcccaaggctgccagacatggactccgggctccagcacatccccctctcctctcccccaggttggggctgggtccaccctgtcctatgacttgatcacttttgcacattccctggccgtttctccccagagctgcctgctctgtgagccccacagccctgctcattcctcacgcccttcaatgctgcaggatggactggcccctgacccagggactctccaaacgggatacaggagagaagctggtctagactgtttgctgatccccaacctgcacggggcattcctgcttctctctcaggccaccacagagggcaggggatggttagtcacctgccccagcactcacaccctaactcaaaataaatgttaaataagtgcgatcacac

SEQ ID NO: 1279 - DNA, 1669 bp, Homo sapiens
  Genbank Accession No. L11931
gctaggcagcttcgaaccagtgcaatgacgatgccagtcaacggggcccacaaggatgctgacctgtggtcctcacatgacaagatgctggcacaacccctcaaagacagtgatgttgaggtttacaacatcattaagaaggagagtaaccggcagagggttggattggagctgattgcctcggagaatttcgccagccgagcagttttggaggccctaggctcttgcttaaataacaaatactctgaggggtacccgggccagagatactatggcgggactgagtttattgatgaactggagaccctctgtcagaagcgagccctgcaggcctataagctggacccacagtgctggggggtcaacgtccagccctactcaggctcccctgcaaactttgctgtgtacactgccctggtggaaccccatgggcgcatcatgggcctggaccttccggatgggggccacctgacccatgggttcatgacagacaagaagaaaatctctgccacgtccatcttctttgaatctatgccctacaaggtgaacccagatactggctacatcaactatgaccagctggaggagaacgcacgcctcttccacccgaagctgatcatcgcaggaaccagctgctactcccgaaacctggaatatgcccggctacggaagattgcagatgagaacggggcgtatctcatggcggacatggctcacatcagcgggctggtggcggctggcgtggtgccctccccatttgaacactgccatgtggtgaccaccaccactcacaagaccctgcgaggctgccgagctggcatgatcttctacaggaaaggagtgaaaagtgtggatcccaagactggcaaagagattctgtacaacctggagtctcttatcaattctgctgtgttccctggcctgcagggaggtccccacaaccacgccattgctggggttgctgtggcactgaagcaagctatgactctggaatttaaagtttatcaacaccaggtggtggccaactgcagggctctgtctgaggccctgacggagctgggctacaaaatagtcacaggtggttctgacaaccatttgatccttgtggatctccgttccaaaggcacagatggtggaagggctgagaaggtgctagaagcctgttctattgcctgcaacaagaacacctgtccaggtgacagaagcgctctgcggcccagtggactgcggctggggaccccagcactgacgtcccgtggacttttggaaaaagacttccaaaaagtagcccactttattcacagagggatagagctgaccctgcagatccagagcgacactggtgtcagagccaccctgaaagagttcaaggagagactggcaggggataagtaccaggcggccgtgcaggctctccgggaggaggttgagagcttcgcctctctcttccctctgcctggcctgcctgacttctaaaggagcgggcccactctggacccacctggcgccacagaggaagctgcctgccggagacccccacctgagagatggatgagctgctccaaagggaactgttgacactcgggccctttgagggggtttcttttggacttttttcatgttttcttcacaaatcaaaatttgtttaagtctcattgttagtaattct

SEQ ID NO: 1280 - DNA, 5784 bp, Homo sapiens
  Genbank Accession No. L12350
acggcatccagtacagaggggctggacttggacccctgcagcagccctgcacaggagaagcggcatataaagccgcgctgcccgggagccgctcggccacgtccaccggagcatcctgcactgcagggccggtctctcgctccagcagagcctgcgcctttctgactcggtccggaacactgaaaccagtcatcactgcatctttttggcaaaccaggagctcagctgcaggaggcaggatggtctggaggctggtcctgctggctctgtgggtgtggcccagcacgcaagctggtcaccaggacaaagacacgaccttcgaccttttcagtatcagcaacatcaaccgcaagaccattggcgccaagcagttccgcgggcccgaccccggcgtgccggcttaccgcttcgtgcgctttgactacatcccaccggtgaacgcagatgacctcagcaagatcaccaagatcatgcggcagaaggagggcttcttcctcacggcccagctcaagcaggacggcaagtccaggggcacgctgttggctctggagggccccggtctctcccagaggcagttcgagatcgtctccaacggccccgcggacacgctggatctcacctactggattgacggcacccggcatgtggtctccctggaggacgtcggcctggctgactcgcagtggaagaacgtcaccgtgcaggtggctggcgagacctacagcttgcacgtgggctgcgacctcataggaccagttgctctggacgagcccttctacgagcacctgcaggcggaaaagagccggatgtacgtggccaaaggctctgccagagagagtcacttcaggggtttgcttcagaacgtccacctagtgtttgaaaactctgtggaagatattctaagcaagaagggttgccagcaaggccagggagctgagatcaacgccatcagtgagaacacagagacgctgcgcctgggtccgcatgtcaccaccgagtacgtgggccccagctcggagaggaggcccgaggtgtgcgaacgctcgtgcgaggagctgggaaacatggtccaggagctctcggggctccacgtcctcgtgaaccagctcagcgagaacctcaagagagtgtcgaatgataaccagtttctctgggagctcattggtggccctcctaagacaaggaacatgtcagcttgctggcaggatggccggttctttgcggaaaatgaaacgtgggtggtggacagctgcaccacgtgtacctgcaagaaatttaaaaccatttgccaccaaatcacctgcccgcctgcaacctgcgccagtccatcctttgtggaaggcgaatgctgcccttcctgcctccactcggtggacggtgaggagggctggtctccgtgggcagagtggacccagtgctccgtgacgtgtggctctgggacccagcagagaggccggtcctgtgacgtcaccagcaacacctgcttggggccctcgatccagacacgggcttgcagtctgagcaagtgtgacacccgcatccggcaggacggcggctggagccactggtcaccttggtcttcatgctctgtgacctgtggagttggcaatatcacacgcatccgtctctgcaactccccagtgccccagatggggggcaagaattgcaaagggagtggccgggagaccaaagcctgccagggcgccccatgcccaatcgatggccgctggagcccctggtccccgtggtcggcctgcactgtcacctgtgccggtgggatccgggagcgcacccgggtctgcaacagccctgagcctcagtacggagggaaggcctgcgtgggggatgtgcaggagcgtcagatgtgcaacaagaggagctgccccgtggatggctgtttatccaacccctgcttcccgggagcccagtgcagcagcttccccgatgggtcctggtcatgcggcttctgccctgtgggcttcttgggcaatggcacccactgtgaggacctggacgagtgtgccctggtccccgacatctgcttctccaccagcaaggtgcctcgctgtgtcaacactcagcctggcttccactgcctgccctgcccgccccgatacagagggaaccagcccgtcggggtcggcctggaagcagccaagacggaaaagcaagtgtgtgagcccgaaaacccatgcaaggacaagacacacaactgccacaagcacgcggagtgcatctacctgggtcacttcagcgaccccatgtacaagtgcgagtgccagacaggctacgcgggcgacgggctcatctgcggggaggactcggacctggacggctggcccaacctcaatctggtctgcgccaccaacgccacctaccactgcatcaaggataactgcccccatctgccaaattctgggcaggaagactttgacaaggacgggattggcgatgcctgtgatgatgacgatgacaatgacggtgtgaccgatgagaaggacaactgccagctcctcttcaatccccgccaggctgactatgacaaggatgaggttggggaccgctgtgacaactgcccttacgtgcacaaccctgcccagatcgacacagacaacaatggagagggtgacgcctgctccgtggacattgatggggacgatgtcttcaatgaacgagacaattgtccctacgtctacaacactgaccagagggacacggatggtgacggtgtgggggatcactgtgacaactgccccctggtgcacaaccctgaccagaccgacgtggacaatgaccttgttggggaccagtgtgacaacaacgaggacatagatgacgacggccaccagaacaaccaggacaactgcccctacatctccaacgccaaccaggctgaccatgacagagacggccagggcgacgcctgtgaccctgatgatgacaacgatggcgtccccgatgacagggacaactgccggcttgtgttcaacccagaccaggaggacttggacggtgatggacggggtgatatttgtaaagatgattttgacaatgacaacatcccagatattgatgatgtgtgtcctgaaaacaatgccatcagtgagacagacttcaggaacttccagatggtccccttggatcccaaagggaccacccaaattgatcccaactgggtcattcgccatcaaggcaaggagctggttcagacagccaactcggaccccggcatcgctgtaggttttgacgagtttgggtctgtggacttcagtggcacattctacgtaaacactgaccgggacgacgactatgctggcttcgtctttggttaccagtcaagcagccgcttctatgtggtgatgtggaagcaggtgacgcagacctactgggaggaccagcccacgcgggcctatggctactccggcgtgtccctcaaggtggtgaactccaccacggggacgggcgagcacctgaggaacgcgctgtggcacacggggaacacgccggggcaggtgcgaaccttatggcacgaccccaggaacattggctggaaggactacacggcctataggtggcacctgactcacaggcccaagaccggctacatcagagtcttagtgcatgaaggaaaacaggtcatggcagactcaggacctatctatgaccaaacctacgctggcgggcggctgggtctatttgtcttctctcaagaaatggtctatttctcagacctcaagtacgaatgcagagatatttaaacaagatttgctgcatttccggcaatgccctgtgcatgccatggtccctagacacctcagttcattgtggtccttgcggcttctctctctagcagcacctcctgtcccttgaccttaactctgatggttcttcacctcctgccagcaaccccaaacccaagtgccttcagaggataaatatcaatggaactcagagatgaacatctaacccactagaggaaaccagtttggtgatatatgagactttatgtggagtgaaaattgggcatgccattacattgctttttcttgtttgtttaaaaagaatgacgtttacatataaaatgtaattacttattgtatttatgtgtatatggagttgaagggaatactgtgcataagccattatgataaattaagcatgaaaaatattgctgaactacttttggtgcttaaagttgtcactattcttgaattagagttgctctacaatgacacacaaatcccgctaaataaattataaacaagggtcaattcaaatttgaagtaatgttttagtaaggagagattagaagacaacaggcatagcaaatgacataagctaccgattaactaatcggaacatgtaaaacagttacaaaaataaacgaactctcctcttgtcctacaatgaaagccctcatgtgcagtagagatgcagtttcatcaaagaacaaacatccttgcaaatgggtgtgacgcggttccagatgtggatttggcaaaacctcatttaagtaaaaggttagcagagcaaagtgcggtgctttagctgctgcttgtgccgttgtggcgtcggggaggctcctgcctgagcttccttccccagctttgctgcctgagaggaaccagagcagacgcacaggccggaaaaggcgcatctaacgcgtatctaggctttggtaactgcggacaagttgcttttacctgatttgatgatacatttcattaaggttccagttataaatattttgttaatatttattaagtgactatagaatgcaactccatttaccagtaacttattttaaatatgcctagtaacacatatgtagtataatttctagaaacaaacatctaataagtatataatcctgtgaaaatatgaggcttgataatattaggttgtcacgatgaagcatgctagaagctgtaacagaatacatagagaataatgaggagtttatgatggaaccttaatatataatgttgccagcgattttagttcaatatttgttactgttatctatctgctgtatatggaattcttttaattcaaacgctgaaaacgaatcagcatttagtcttgccaggcacacccaataatcagtcatgtgtaatatgcacaagtttgtttttgtttttgttttttttgttggttggtttttttgctttaagttgcatgatctttctgcaggaaatagtcactcatcccactccacataaggggtttagtaagagaagtctgtctgtctgatgatggatagggggcaaatctttttcccctttctgttaatagtcatcacatttctatgccaaacaggaacgatccataactttagtcttaatgtacacattgcattttgataaaattaattttgttgtttcctttgaggttgatcgttgtgttgttttgctgcactttttacttttttgcgtgtggagctgtattcccgagacaacgaagcgttgggatacttcattaaatgtagcgactgtcaacagcgtgcaggttttctgtttctgtgttgtggggtcaaccgtacaatggtgtgggaatgacgatgatgtgaatatttagaatgtaccatattttttgtaaattatttatgtttttctaaacaaatttatcgtataggttgatgaaacgtcatgtgttttgccaaagactgtaaatatttatttatgtgttcacatggtcaaaatttcaccactgaaaccctgcacttagctagaacctcatttttaaagattaacaacaggaaataaattgtaaaaaaggttttct

SEQ ID NO: 1281 - DNA, 2388 bp, Homo sapiens
  Genbank Accession No. L15702
tcctgccccaggcccagcttctctcctgccttccaacgccatggggagcaatctcagcccccaactctgcctgatgccctttatcttgggcctcttgtctggaggtgtgaccaccactccatggtctttggcccagccccagggatcctgctctctggagggggtagagatcaaaggcggctccttccgacttctccaagagggccaggcactggagtacgtgtgtccttctggcttctacccgtaccctgtgcagacacgtacctgcagatctacggggtcctggagcaccctgaagactcaagaccaaaagactgtcaggaaggcagagtgcagagcaatccactgtccaagaccacacgacttcgagaacggggaatactggccccggtctccctactacaatgtgagtgatgagatctctttccactgctatgacggttacactctccggggctctgccaatcgcacctgccaagtgaatggccggtggagtgggcagacagcgatctgtgacaacggagcggggtactgctccaacccgggcatccccattggcacaaggaaggtgggcagccagtaccgccttgaagacagcgtcacctaccactgcagccgggggcttaccctgcgtggctcccagcggcgaacgtgtcaggaaggtggctcttggagcgggacggagccttcctgccaagactccttcatgtacgacacccctcaagaggtggccgaagctttcctgtcttccctgacagagaccatagaaggagtcgatgctgaggatgggcacggcccaggggaacaacagaagcggaagatcgtcctggacccttcaggctccatgaacatctacctggtgctagatggatcagacagcattggggccagcaacttcacaggagccaaaaagtgtctagtcaacttaattgagaaggtggcaagttatggtgtgaagccaagatatggtctagtgacatatgccacataccccaaaatttgggtcaaagtgtctgaagcagacagcagtaatgcagactgggtcacgaagcagctcaatgaaatcaattatgaagaccacaagttgaagtcagggactaacaccaagaaggccctccaggcagtgtacagcatgatgagctggccagatgacgtccctcctgaaggctggaaccgcacccgccatgtcatcatcctcatgactgatggattgcacaacatgggcggggacccaattactgtcattgatgagatccgggacttgctatacattggcaaggatcgcaaaaacccaagggaggattatctggatgtctatgtgtttggggtcgggcctttggtgaaccaagtgaacatcaatgctttggcttccaagaaagacaatgagcaacatgtgttcaaagtcaaggatatggaaaacctggaagatgttttctaccaaatgatcgatgaaagccagtctctgagtctctgtggcatggtttgggaacacaggaagggtaccgattaccacaagcaaccatggcaggccaagatctcagtcattcgcccttcaaagggacacgagagctgtatgggggctgtggtgtctgagtactttgtgctgacagcagcacattgtttcactgtggatgacaaggaacactcaatcaaggtcagcgtaggaggggagaagcgggacctggagatagaagtagtcctatttcaccccaactacaacattaatgggaaaaaagaagcaggaattcctgaattttatgactatgacgttgccctgatcaagctcaagaataagctgaaatatggccagactatcaggcccatttgtctcccctgcaccgagggaacaactcgagctttgaggcttcctccaactaccacttgccagcaacaaaaggaagagctgctccctgcacaggatatcaaagctctgtttgtgtctgaggaggagaaaaagctgactcggaaggaggtctacatcaagaatggggataagaaaggcagctgtgagagagatgctcaatatgccccaggctatgacaaagtcaaggacatctcagaggtggtcacccctcggttcctttgtactggaggagtgagtccctatgctgaccccaatacttgcagaggtgattctggcggccccttgatagttcacaagagaagtcgtttcattcaagttggtgtaatcagctggggagtagtggatgtctgcaaaaaccagaagcggcaaaagcaggtacctgctcacgcccgagactttcacatcaacctctttcaagtgctgccctggctgaaggagaaactccaagatgaggatttgggttttctataaggggtttcctgctggacaggggcgtgggattgaattaaaacagctgcgacaac

SEQ ID NO: 1282 - DNA, 2052 bp, Homo sapiens
  Genbank Accession No. L16895
gtattagaaggcaaagcaaaactcccaatggataaatcagtgcctggtgttctgaagtgggaaaaaatagactaacttcagtaggatttatgtattttgaaaaagagaacagaaaacaacaaaagaatttttgtttggactgttttcaataacaaagcacataactggattttgaacgcttaagtcatcattacttgggaaatttttaatgtttattatttacatcactttgtgaattaacacagtgtttcaattctgtaattacatatttgactctttcaaagaaatccaaatttctcatgttccttttgaaattgtagtgcaaaatggtcagtattatctaaatgaatgagccaaaatgactttgaactgaaacttttctaaagtgctggaactttagtgaaacataataataatgggtttatatatgtcatagcatagatgaatttagaaacaatgctcctactgtttaaatacatatggacacatctggtgctgagaaagaaacaaacacattaccattggtgtcaagaaatattactatatagcagagaaatggcaatacatgtactcagatagttacatccctatataaaaagtatgtttacatttaaaaaattagtagataacttccttctttcaagtgcacaatttcattttgacttgagtcaacttttgttttggaacaaattaagtaagggagctgcccaatctgtctgatatttcttgaggctgccctctatatttatctttcccatgggcagagatgttgtaagtgggattcttaatatcaccattcttgggactggtatacataaggcagccgtgaaactggaaagtcattttgatgactgatgtgatacatccagaggtaaaatgcatttaaacatattaaagtatttgccaaagatacaattttcttgctgacataaaaatcacacaaacaagtcccccccaaaccacaactgtctctcaaatagcttaaagaaattgaaaaacattttaggatttttcaagttttctagattttaaaaagatgttcagctatagaggaatgttaaaaattttatattatctagaacacaggaacatcatcctgggttattcaggaatcagtcacacatgtgtgtgtgtctgagatatagctaaattagcaaagcacatagtattacatacttgaggggttggtgaacaaaggaaaaatatactttctgcaaaaccaaggactgttgctgcgtaatgagacagctgtgatttcatttgaaactgtgaaaccatgtgccataatagaattttgagaattttgcttttacctaaattcaagaaaatgaaattacacttttaagttagtggtgcttagcataattttcctatataacagtataaaatctcaagtaaaattttccagtgccagaacatgttaggtggaattttaaaagtgcctcggcatcctgtattacatgtcatagaattgtaaagtcaacatcaattactagtaatcattctgcactcactgggtgcatagcatggttagaggggctagagatggacagtcatcaactggcggatatagcggtacatatatccttagccaccagggcacaagcttacagtagacaatacagacagagcttttgttgagctgtaactgagctatggaatagcttctttgatgtacctctttgccttaaattgctttttagttctaagattgtagaatgatcctttcaaattgtaatcttttctaacagagatattttaatatagttgctttcttaaaaaacaaaaaaactactgtcagtattaatactgagccagactggcatctacagatttcagatctatcattttattgattcttaagcttgtattaaaaactaggcaatatcatcatggatacataggagaagacacatttacaatcattcattgggccttttatctgtctatccatccatcatcatttgaaggcctaatatattgccaagtactcacatggtatgcattgagacataaaaaagactgtctataacctcaataagtattaaaaat

SEQ ID NO: 1283 - DNA, 1778 bp, Homo sapiens
  Genbank Accession No. L23808
tagaagtttacaatgaagtttcttctaatactgctcctgcaggccactgcttctggagctcttcccctgaacagctctacaagcctggaaaaaaataatgtgctatttggtgagagatacttagaaaaattttatggccttgagataaacaaacttccagtgacaaaaatgaaatatagtggaaacttaatgaaggaaaaaatccaagaaatgcagcacttcttgggtctgaaagtgaccgggcaactggacacatctaccctggagatgatgcacgcacctcgatgtggagtccccgatctccatcatttcagggaaatgccaggggggcccgtatggaggaaacattatatcacctacagaatcaataattacacacctgacatgaaccgtgaggatgttgactacgcaatccggaaagctttccaagtatggagtaatgttacccccttgaaattcagcaagattaacacaggcatggctgacattttggtggtttttgcccgtggagctcatggagacttccatgcttttgatggcaaaggtggaatcctagcccatgcttttggacctggatctggcattggaggggatgcacatttcgatgaggacgaattctggactacacattcaggaggcacaaacttgttcctcactgctgttcacgagattggccattccttaggtcttggccattctagtgatccaaaggctgtaatgttccccacctacaaatatgtcgacatcaacacatttcgcctctctgctgatgacatacgtggcattcagtccctgtatggagacccaaaagagaaccaacgcttgccaaatcctgacaattcagaaccagctctctgtgaccccaatttgagttttgatgctgtcactaccgtgggaaataagatctttttcttcaaagacaggttcttctggctgaaggtttctgagagaccaaagaccagtgttaatttaatttcttccttatggccaaccttgccatctggcattgaagctgcttatgaaattgaagccagaaatcaagtttttctttttaaagatgacaaatactggttaattagcaatttaagaccagagccaaattatcccaagagcatacattcttttggttttcctaactttgtgaaaaaaattgatgcagctgtttttaacccacgtttttataggacctacttctttgtagataaccagtattggaggtatgatgaaaggagacagatgatggaccctggttatcccaaactgattaccaagaacttccaaggaatcgggcctaaaattgatgcagtcttctattctaaaaacaaatactactatttcttccaaggatctaaccaatttgaatatgacttcctactccaacgtatcaccaaaacactgaaaagcaatagctggtttggttgttagaaatggtgtaattaatggtttttgttagttcacttcagcttaataagtatttattgcatatttgctatgtcctcagtgtaccactacttagagatatgtatcataaaaataaaatctgtaaaccataggtaatgattatataaaatacataatatttttcaattttgaaaactctaattgtccattcttgcttgactctactattaagtttgaaaatagttaccttcaaagcaagataattctatttgaagcatgctctgtaagttgcttcctaacatccttggactgagaaattatacttacttctggcataactaaaattaagtatatatattttggctcaaataaaattg

SEQ ID NO: 1284 - DNA, 3018 bp, Homo sapiens
  Genbank Accession No. L24203
ctcctcacaggtgtgtctctagtcctcgtggttgcctgccccactccctgccgagacgcctgccagaaaggtcacctatcctgaaccccagcaagcctgaaacagctcagccaagcaccctgcgatggaagctgcagatgcctccaggagcaacgggtcgagcccagaagccagggatgcccggagcccgtcgggccccagtggcagcctggagaatggcaccaaggctgacggcaaggatgccaagaccaccaacgggcacggcggggaggcagctgagggcaagagcctgggcagcgccctgaagccaggggaaggtaggagcgccctgttcgcgggcaatgagtggcggcgacccatcatccagtttgtcgagtccggggacgacaagaactccaactacttcagcatggactctatggaaggcaagaggtcgccgtacgcagggctccagctgggggctgccaagaagccacccgttacctttgccgaaaagggcgacgtgcgcaagtccattttctcggagtcccggaagcccacggtgtccatcatggagcccggggagacccggcggaacagctacccccgggccgacacgggccttttttcacggtccaagtccggctccgaggaggtgctgtgcgactcctgcatcggcaacaagcagaaggcggtcaagtcctgcctggtgtgccaggcctccttctgcgagctgcatctcaagccccacctggagggcgccgccttccgagaccaccagctgctcgagcccatccgggactttgaggcccgcaagtgtcccgtgcatggcaagacgatggagctcttctgccagaccgaccagacctgcatctgctacctttgcatgttccaggagcacaagaatcatagcaccgtgacagtggaggaggccaaggccgagaaggagacggagctgtcactgcaaaaggagcagctgcagctcaagatcattgagattgaggatgaagctgagaagtggcagaaggagaaggaccgcatcaagagcttcaccaccaatgagaaggccatcctggagcagaacttccgggacctggtgcgggacctggagaagcaaaaggaggaagtgagggctgcgctggagcagcgggagcaggatgctgtggaccaagtgaaggtgatcatggatgctctggatgagagagccaaggtgctgcatgaggacaagcagacccgggagcagctgcatagcatcagcgactctgtgttgtttctgcaggaatttggtgcattgatgagcaattactctctccccccacccctgcccacctatcatgtcctgctggagggggagggcctgggacagtcactaggcaacttcaaggacgacctgctcaatgtatgcatgcgccacgttgagaagatgtgcaaggcggacctgagccgtaacttcattgagaggaaccacatggagaacggtggtgaccatcgctatgtgaacaactacacgaacagcttcgggggtgagtggagtgcaccggacaccatgaagagatactccatgtacctgacacccaaaggtggggtccggacatcataccagccctcgtctcctggccgcttcaccaaggagaccacccagaagaatttcaacaatctctatggcaccaaaggtaactacacctcccgggtctgggagtactcctccagcattcagaactctgacaatgacctgcccgtcgtccaaggcagctcctccttctccctgaaaggctatccctccctcatgcggagccaaagccccaaggcccagccccagacttggaaatctggcaagcagactatgctgtctcactaccggccattctacgtcaacaaaggcaacgggattgggtccaacgaagccccatgagctcctggcggaaggaacgaggcgccacacccctgctcttcctcctgaccctgctgctcttgccttctaagctactgtgcttgtctgggtgggagggagcctggtcctgcacctgccctctgcagccctctgccagcctcttgggggcagttccggcctctccgacttccccactggccacactccattcagactcctttcctgccttgtgacctcagatggtcaccatcattcctgtgctcagaggccaacccatcacaggggtgagataggttggggcctgccctaacccgccagcctcctcctctcgggctggatctgggggctagcagtgagtacccgcatggtatcagcctgcctctcccgcccacgccctgctgtctccaggcctatagacgtttctctccaaggccctatcccccaatgttgtcagcagatgcctggacagcacagccacccatctcccattcacatggcccacctcctgcttcccagaggactggccctacgtgctctctctcgtcctacctatcaatgcccagcatggcagaacctgcagtggccaagggctgcagatggaaacctctcagtgtcttgacatcaccctacccaggcggtgggtctccaccacagccactttgagtctgtggtccctggagggtggcttctcctgactggcaggatgaccttagccaagatattcctctgttccctctgctgagataaagaattcccttaacatgatataatccacccatgcaaatagctactggcccagctaccatttaccatttgcctacagaatttcattcagtctacactttggcattctctctggcgatggagtgtggctgggctgaccgcaaaaggtgccttacacactgcccccaccctcagccgttgccccatcagaggctgcctcctccttctgattaccccccatgttgcatatcagggtgctcaaggattggagaggagacaaaaccaggagcagcacagtggggacatctcccgtctcaacagccccaggcctatgggggctctggaaggatgggccagcttgcaggggttggggagggagacatccagcttgggctttcccctttggaataaaccattggtctgtc

SEQ ID NO: 1285 - DNA, 1443 bp, Homo sapiens
  Genbank Accession No. L24564
gtggctgcagcagcagcggcggcggaaaccctaaagtccgagtccggactacgagtgcgtggcctcctaatccggatcctagtcctgagcgtgtctgtgtgcgagtggacggtcccggacgcgatgaccctgaacggcggcggcagcggagcgggcgggagccgcggtgggggccaggagcgcgagcgccgtcggggcagcacaccctggggccccgccccgccgctgcaccgccgcagcatgccggtggacgagcgcgacctgcaggcggcgctgaccccgggtgccctgacggcggccgcggccgggacggggacccagggtcccaggctggactggcccgaggactccgaggactcgctcagctcagggggcagcgactcagacgagagcgtttacaaggtgctgctgctgggggcgcccggcgtgggcaagagcgccctggcgcgcatcttcggcggtgtggaggacgggcctgaagcagaggcagcagggcacacctatgatcgctccattgtagtggacggagaagaggcatcactcatggtctacgacatttgggagcaggacgggggccgctggttgcccggccactgcatggccatgggggatgcctatgtcattgtgtactcagtgacggacaagggcagcttcgagaaggcctcagaactgcgggtccagctgcggcgtgcacggcaaacagatgatgtgcccatcatcctcgtgggcaacaagagcgacctggtgcgctctcgtgaggtctcggtggatgagggccgggcctgcgcggtggtctttgactgcaagttcattgagacatcagcggcattgcaccacaatgtccaggcgctgtttgaaggtgtcgtgcgccagatacgcctgcgcagggacagcaaagaagccaacgcacgacggcaagcaggcacccggaggcgagagagccttggcaaaaaggcgaagcgcttcttgggccgcatcgtagctcgtaacagccgcaagatggcctttcgcgccaaatccaagtcctgccacgacctctcggttctctaggtcccacccgctcccactatggtgggagacgaacggaagggttggtgggctggcccagccaactgccccgggtgcctcagagcaggctcagactctgggtccctcggagctgccagccgggcacccccaacctcatggtcatggacagatagacagtgctgccctgcgaagtggctctcaggggccagtgagggctgggcccacagagatgcatgcgcaggctcatatgcgtcccaagcagccgcagcgcagccgccgggcaggcctgcgtgccgggagaggactctgccttttttcacagcccgggtgtgcctgccctggagggaggctcttcagtgcggtagctacttgtttacatgcagatttttgtaataaaggctatttcctgataaa

SEQ ID NO: 1286 - DNA, 3457 bp, Homo sapiens
  Genbank Accession No. L26336
cctccacctcccgggttcaagcgattctcctgcctcagcctcccgagtagctgagactacaggcacgcgccaccacgcccagctaatttttgtatctttagtagagacgggctttcaccatgttggccaggatggtctcgatgtcttaacgtcgtgatccggccgcctcggcctcccaagtgctgggattacaggcgttagccactgcgcccggccccagccaggcagttttaatcgagcgctcacaaccactgagacgcagcgaagcacccaccataatatcccaggaggccgaccgccggttcagactttttcttttctttaatccccgtccaagggatccgccctcaccccccaccccagccaccccaattccctattccctccccttggacggcgccggggaaaacaagctgctcgagctttatttcttcggtgcaaccaactcagaatgaattcctccgcccctgcgtgctcagtgagtcggcaccctagcagtgaactgcatttaaaacctcaggaattgagcgaactctcccagtggctctcctcaccgggatccccttccacgcctcctccccgtgccgcgcctcagtccgcactgctcattggccgcgtgcctgccaatccgatgcacgtcggctagggcaaagaccgcgaaaaagcgcgtacacctggctctgggagcgcgcgcctaacgccagccagcagcaggaggcgcgcgaggcaccacggcctggcggccgagagtcagggaggaacctcatttacataacggccgcccctctgtctcctggcgggggccggagtcccgcccctcgtccaacttgaaatctgttgggtcacgggccagtcactccgacctaggcaagcctgtggtggagctggaagagtttgtgagggcggtcccgggagcggattgggtctgggagttcccagaggcggctataagaaccgggaactgggcgcggggagctgagttgctggtagtgcccgtggtgcttggttcgaggtggccgttagttgactccgcggagttcatctccctggttttcccgtcctaacgtcgctcgcctttcagtcaggatgtctgcccgtggcccggctatcggcatcgacctgggcaccacctattcgtgcgtcggggtcttccaacatggcaaggtggagatcatcgccaacgaccagggcaatcgcaccacccccagctacgtggccttcacggacaccgagcgcctcatcggcgacgccgccaagaaccaggtggccatgaaccccaccaacaccatcttcgacgccaagaggctgattggacggaaattcgaggatgccacagtgcagtcggatatgaaacactggccgttccgggtggtgagcgagggaggcaagcccaaagtgcaagtagagtacaagggggagaccaagaccttcttcccagaggagatatcctccatggtcctcacgaagatgaaggagatcgcggaagcctacctggggggcaaggtgcacagcgcggtcataacggtcccggcctatttcaacgactcgcagcgccaggccaccaaggacgcaggcaccatcacggggctcaatgtgctgcgcatcatcaacgagcccacggcggcggccatcgcctacggcctggacaagaagggctgcgcgggcggcgagaagaacgtgctcatctttgacctgggcggtggcactttcgacgtgtccatcctgaccatcgaggatggcatcttcgaggtgaagtccacggccggcgatacccacctgggcggtgaggacttcgacaaccgcatggtgagccacctggcggaggagttcaagcgcaagcacaagaaggacattgggcccaacaagcgcgccgtgaggcggctgcgcaccgcttgcgagcgcgccaagcgcaccctgagctcgtccacgcaggcgagcatcgagatcgactcgctctacgagggcgtggacttctatacgtccatcacgcgcgcccgcttcgaggagctcaatgccgacctctttcgcgggaccctggagccggtggagaaggcgctgcgcgacgccaagctggacaagggccagatccaggagatcgtgctggtgggcggctccactcgtatccccaagatccagaagctgctgcaggatttcttcaacggcaaggagctgaacaagagcatcaaccccgacgaggcggtggcctatggcgccgcggtgcaggcggccatcctcatcggcgacaaatcagagaatgtgcaggacctgctgctactcgacgtgaccccgttgtcgctgggcatcgagacagctggcggtgtcatgaccccactcatcaagaggaacaccacgatccccaccaagcagacgcagaccttcaccacctactcggacaaccagagcagcgtactggtgcaggtatacgagggcgaacgggccatgaccaaggacaataacctgctgggcaagttcgacctgaccgggattccccctgcgcctcgcggggtcccccaaatcgaggttaccttcgacattgacgccaatggcatccttaacgttaccgccgccgacaagagcaccggtaaggaaaacaaaatcaccatcaccaatgacaaaggtcgtctgagcaaggacgacattgaccggatggtgcaggaggcggagcggtacaaatcggaagatgaggcgaatcgcgaccgagtcgcggccaaaaacgccctggagtcctatacctacaacatcaagcagacggtggaagacgagaaactgaggggcaagattagcgagcaggacaaaaacaagatcctcgacaagtgtcaggaggtgatcaactggctcgaccgaaaccagatggcagagaaagatgagtatgaacacaagcagaaagagctcgaaagagtttgcaaccccatcatcagcaaactttaccaaggtggtcctggcggcggcagcggcggcggcggttcaggagcctccgggggacccaccatcgaagaagtggactaagcttgcactcaagtcagcgtaaacctctttgcctttctctctctctcttttttttttgtttgtttctttgaaatgtccttgtgccaagtacgagatctattgttggaagtctttggtatatgcaaatgaaaggagaggtgcaacaacttagtttaattataaaagttccaaagtttgttttttaaaaacattattcgaggtttctctttaatgcattttgcgtgtttgctgacttgagcatttttgattagttcgtgcatggagatttgtttgagatgagaaaccttaagtttgcacacctgttctgtagaagcttggaaacagtaaaatatataggagcttaaattgtttatttttatgtactactttaaaactaaactgaacattgcagtaatgttaaggacaggtatactttttgcaaacaaatgcataaatgcaaatgtaaagtaaa

SEQ ID NO: 1287 - DNA, 1986 bp, Homo sapiens
  Genbank Accession No. L42611
cgcgccaacgctcgccacagccctctcatctcctggaaccatggccagcacatccaccaccatcaggagccacagcagcagccgccggggtttcagtgccaactcagccaggctccctggggtcagccgctctggcttcagcagcatctccgtgtcccgctccaggggcagtggtggcctgggtggtgcatgtggaggagctggctttggcagccgcagcttatatggcctggggggatccaagaggatctccattggagggggcagctgtgccatcagtggcggctatggcagcagagccagaggcagctatggctttggtggcgccgggagtggatttggtttcggtggtggagccggcattggctttgatctgggtggtggagccggccttgctggtggctttgggggccctggcttccctgtgtgcccccctggaggcatccaagaggtcactgtcaaccagagtctcctgactcccctcaacctgcaaattgaccccgccatccagcgggtgcgggccgaggagcgtgagcagatcaagaccctcaacaacaagtttgcctccttcatcgacaaggtgcggttcctagagcagcagaacaaggttctggacaccaagtggaccctgctgcaggagcagggcaccaagactgtgaggcagaacctggagccgttgttcgagcagtacatcaacaacctcaggaggcagctggacaacatcgtgggggaacggggccgcctggactcggagctgagaaacatgcaggacctggtggaggacctcaagaacaaatatgaggatgaaatcaacaagcgcacagcagcagagaatgaatttgtgactctgaagaaggatgtggatgctgcctacatgaacaaggttgaactgcaagccaaggcagacactctcacagatgagatcaacttcctgagagccttgtatgatgcagagctgtcccagatgcagacccacatctcagacacatccgtggtgctatccatggacaacaaccgcaacctggacctggacagcatcatcgctgaggtcaaggcccaatacgaggagattgctcagaggagccgggctgaggctgagtcctggtaccagaccaagtacgaggagctgcaggtcacagcaggcagacatggggacgacctgcgcaacaccaagcaggagattgctgagatcaaccgcatgatccagaggctgagatctgagatcgaccatgtcaagaagcagtgtgccagcctgcaggctgccattgctgatgctgagcagcgtggggagatggccctcaaggatgctaagaacaagctggaagggctggaggatgccctgcagaaggccaagcaggacctggcccggctgctgaaggagtaccaggagctgatgaatgtcaagctggccctggacgtggagatcgccacctaccgcaagctgctggagggcgaggagtgcaggctgaatggcgaaggcattggacaagtcaacgtctctgtagtacagtccaccatctccagtggctatggcggtgccagtggtgtcggcagtggcttaggcctgggtggaggaagcagctactcctatggcagtggtcttggcattggaggtggcttcagttccagcagtggcagagccattgggggtggcctcagctctgttggaggcggcagttccaccatcaagtacaccaccacctcctcctccagcaggaagagctacaagcactaaagtgctgcctccagctctcggtcccacagtcctcaggcccttctctggctgcagagccgtcttctcaggttgcctgtcgtctcctggcctctagtcttccctgctctccgaggtagagctgggtatggatgcttagtgccctcacttctctctgtctatacctgccccatctgagcacccattgctcaccatcagatcaacctttgattttacatcataatgtattcaccactggagcttcactttgttac

SEQ ID NO: 1288 - DNA, 2518 bp, Homo sapiens
  Genbank Accession No. L76465
ccagcagtggctgcaccatgcacgtgaacggcaaagtggcgctggtgaccggcgcggctcagggcataggcagagcctttgcagaggcgctgctgcttaagggcgccaaggtagcgctggtggattggaatcttgaagcaggtgtacagtgtaaagctgccctgcatgagcaatttgaacctcagaagactctgttcatccagtgcgatgtggctgaccagcaacaactgagagacacttttagaaaagttgtagaccactttggaagactggacattttggtcaataatgctggagtgaataatgagaaaaactgggaaaaaactctgcaaattaatttggtttctgttatcagtggaacctatcttggtttggattacatgagtaagcaaaatggaggtgaaggcggcatcattatcaatatgtcatctttagcaggactcatgcccgttgcacagcagccggtttattgtgcttcaaagcatggcatagttggattcacacgctcagcagcgttggctgctaatcttatgaacagtggtgtgagactgaatgccatttgtccaggctttgttaacacagccatccttgaatcaattgaaaaagaagaaaacatgggacaatatatagaatataaggatcatatcaaggatatgattaaatactatggaattttggacccaccattgattgccaatggattgataacactcattgaagatgatgctttaaatggtgctattatgaagatcacaacttctaagggaattcattttcaagactatgatacaactccatttcaagcaaaaacccaatgaacagcttatgtgttagccatagctgaaaataagcacaaatagcttatattcagatcctatcttcatttgaatatagcttttaaatgaaatgttacagtttgaagttttccttcatgcacttggtgataaacgttttctaaatttttagttaagtatatggataaaaagttatgaactattaaaaatgtgatgtggaccaaaggctaggttgtaatcttgatagtctaaaaaatgatcaaaacaaatgattttcaaggaatattcaatattctgcctttcagaaagtgtatttatatctgtgcttcataaatattaatgttcttcagaacatcattttaaaggagatacttgaattgttatttaaatcaaaccagatgtaaaacactcacatacaagttcatactttaaaagaggaaagctacttaacaatgacaaatatttcacaataataatttttacttatataccatctttcaactgaacatttcagttcttccaagagcttcttagagtagtatattttgggggcagtcaaggaataaactacagtgtaaacatatcccagatgaaaactgctgtatggaaaaatgacagaaagtaactgattgacactgttgattcacagttcagcctcctatctgggaaagacatttctttcctctgctcactttaagaacttttaccgactccaaaaatctcaggaattaaacttttaacagttacagcaataaagaatagttagtactccaaaaatattatatttaagatgctcaacaagaaaaaaatgcaaatgtaatatttttttcaaattacttctttattgacttgtccaaatttcaaaagtgcctacccttcaataaaacttttttattctgatctccataaattacttagtcttctatgtatagctatcaaggaaataaaaccaattttgccacagccacaactgtaaatgtttttgtacccatgctgaaactcataacaacacagacataaaaatagctgtgaggttttgctttttttgttgtcagctatcttaagaatcattaaatacacctgctttgggtaaaactctttgcaagcagtaattaacactagtaacagtgaaagcacaagatttccaaatcagtcgttttctcaaaaaaatatcgtataagtgactcatcctgtctgctaactccagacctcccagcttgaagccaaatctttccatgtgagattgatatggatttcctagaagtactggaatgttgtcatatcttgccctattttaattctgctatagaaaacaattgccttcacttttaaggagtaatttgaatattaataactctggtctagattttcatataatgtattaaagacaaagtagtgaacatcaatgaacatctgatagagataaactgtaatcaggcataagcttgtttgtatgttctggcagtgactaatcagtaaatgatgtcggtttgcccagtatcacttatcttctgtatttttcctctgtcgtgtaaatagtataaccttttcatttatggacaattttttggactagtagccttcaatatacattctgctttgaattaattttttcaaatcaataaattatgtagacatttaaaatcaaatatcaagtagaattgaaaaatgtgagttacataagttaaaaacttactttaaatcttaccttctataggtagctc

SEQ ID NO: 1289 - DNA, 2384 bp, Homo sapiens
  Genbank Accession No. M10905
atcaaacagaaatgactattgaaggcttgcagcccacagtggagtatgtggttagtgtctatgctcagaatccaagcggagagagtcagcctctggttcagactgcagtaaccaacattgatcgccctaaaggactggcattcactgatgtggatgtcgattccatcaaaattgcttgggaaagcccacaggggcaagtttccaggtacagggtgacctactcgagccctgaggatggaatccatgagctattccctgcacctgatggtgaagaagacactgcagagctgcaaggcctcagaccgggttctgagtacacagtcagtgtggttgccttgcacgatgatatggagagccagcccctgattggaacccagtccacagctattcctgcaccaactgacctgaagttcactcaggtcacacccacaagcctgagcgcccagtggacaccacccaatgttcagctcactggatatcgagtgcgggtgacccccaaggagaagaccggaccaatgaaagaaatcaaccttgctcctgacagctcatccgtggttgtatcaggacttatggtggccaccaaatatgaagtgagtgtctatgctcttaaggacactttgacaagcagaccagctcagggtgttgtcaccactctggagaatgtcagcccaccaagaagggctcgtgtgacagatgctactgagaccaccatcaccattagctggagaaccaagactgagacgatcactggcttccaagttgatgccgttccagccaatggccagactccaatccagagaaccatcaagccagatgtcagaagctacaccatcacaggtttacaaccaggcactgactacaagatctacctgtacaccttgaatgacaatgctcggagctcccctgtggtcatcgacgcctccactgccattgatgcaccatccaacctgcgtttcctggccaccacacccaattccttgctggtatcatggcagccgccacgtgccaggattaccggctacatcatcaagtatgagaagcctgggtctcctcccagagaagtggtccctcggccccgccctggtgtcacagaggctactattactggcctggaaccgggaaccgaatatacaatttatgtcattgccctgaagaataatcagaagagcgagcccctgattggaaggaaaaagacagacgagcttccccaactggtaacccttccacaccccaatcttcatggaccagagatcttggatgttccttccacagttcaaaagacccctttcgtcacccaccctgggtatgacactggaaatggtattcagcttcctggcacttctggtcagcaacccagtgttgggcaacaaatgatctttgaggaacatggttttaggcggaccacaccgcccacaacggccacccccataaggcataggccaagaccatacccgccgaatgtaggtgaggaaatccaaattggtcacattcccagggaagatgtagactatcacctgtacccacacggtccggggctcaatccaaatgcctctacaggacaagaagctctctctcagacaaccatctcatgggccccattccaggacacttctgagtacatcatttcatgtcatcctgttggcactgatgaagaacccttacagttcagggttcctggaacttctaccagtgcgactctgacaggcctcaccagaggtgccacctacaacatcatagtggaggcactgaaagaccagcagaggcataaggttcgggaagaggttgttaccgtgggcaactctgtcaacgaaggcttgaaccaacctacggatgactcgtgctttgacccctacacagtttcccattatgccgttggagatgagtgggaacgaatgtctgaatcaggctttaaactgttgtgccagtgcttaggctttggaagtggtcatttcagatgtgattcatctagatggtgccatgacaatggtgtgaactacaagattggagagaagtgggaccgtcagggagaaaatggccagatgatgagctgcacatgtcttgggaacggaaaaggagaattcaagtgtgaccctcatgaggcaacgtgttacgatgatgggaagacataccacgtaggagaacagtggcagaaggaatatctcggtgccatttgctcctgcacatgctttggaggccagcggggctggcgctgtgacaactgccgcagacctgggggtgaacccagtcccgaaggcactactggccagtcctacaaccagtattctcagagataccatcagagaacaaacactaatgttaattgcccaattgagtgcttcatgcctttagatgtacaggctgacagagaagattcccgagagtaa

SEQ ID NO: 1290 - DNA, 624 bp, Homo sapiens
  Genbank Accession No. M11810
ggatccagatggcatgtcacagtatactaaatgctcactgaatccagctgcaatgcaggaagactcccctgatgtgatcatgtgtctcaccctttcaggctgaaagcaacagtacagacgatgagaccgacgatcccaggacgtatcagaaatatggttacattggaacacatgagtaccctcatttctctcatagacccagcacgctccaggcagcatccaccccacaggcagaagaggactggacctgcaccatcctctgaatgccagtgcatcttgggggaaagggctccagtgttatctggaccagttccttcattttcaggtgggactcttgatccagagaagacaaagctcctcagtgagctggtgtataatccaagacagaacccaagtctcctgactcctggccttctatgccctctatcctatcatagataacattctccacagcctcacttcattccacctattctctgaaaatattccctgagagagaacagagagatttagataagagaatgaaattccagccttgactttcttctgtgcacctgatgggagggtaatgtctaatgtattatcaataacaataaaaataaagcaaataccatttattgggtg

SEQ ID NO: 1291 - DNA, 1157 bp, Homo sapiens
  Genbank Accession No. M12529
ccccagcggaggtgaaggacgtccttccccaggagccgactggccaatcacaggcaggaagatgaaggttctgtgggctgcgttgctggtcacattcctggcaggatgccaggccaaggtggagcaagcggtggagacagagccggagcccgagctgcgccagcagaccgagtggcagagcggccagcgctgggaactggcactgggtcgcttttgggattacctgcgctgggtgcagacactgtctgagcaggtgcaggaggagctgctcagctcccaagtcacccaagaactgagggcgctgatggacgagaccatgaaggagttgaaggcctacaaatcggaactggaggaacaactgaccccggtagcggaggagacgcgggcacggctgtccaaggagctgcagacggcgcaggcccggctgggcgcggacatggaggacgtgtgcggccgcctggtgcagtaccgcggcgaggtgcaggccatgctcggccagagcaccgaggagctgcgggtgcgcctcgcctcccacctgcgcaagctgcgtaagcggctcctccgcgatcccgatgacctgcagaagcgcctggcagtgtaccaggccggggcccgcgagggcgccgagcgcggcctcagcgccatccgcgagcgcctggggcccctggtggaacagggccgcgtgcgggccgccactgtgggctccctggccggccagccgctacaggagcgggcccaggcctggggcgagcggctgcgcgcgcggatggaggagatgggcagtcggacccgcgaccgcctggacgaggtgaaggagcaggtggcggaggtgcgcgccaagctggaggagcaggcccagcagatacgcctgcaggccgaggccttccaggcccgcctcaagagctggttcgagcccctggtggaagacatgcagcgccagtgggccgggctggtggagaaggtgcaggctgccgtgggcaccagcgccgcccctgtgcccagcgacaatcactgaacgccgaagcctgcagccatgcgaccccacgccaccccgtgcctcctgcctccgcgcagcctgcagcgggagaccctgtccccgccccagccgtcctcctggggtggaccctagtttaataaagattcaccaagtttcacgc

SEQ ID NO: 1292 - DNA, 1970 bp, Homo sapiens
  Genbank Accession No. M13509
atattggagcagcaagaggctgggaagccatcacttaccttgcactgagaaagaagacaaaggccagtatgcacagctttcctccactgctgctgctgctgttctggggtgtggtgtctcacagcttcccagcgactctagaaacacaagagcaagatgtggacttagtccagaaatacctggaaaaatactacaacctgaagaatgatgggaggcaagttgaaaagcggagaaatagtggcccagtggttgaaaaattgaagcaaatgcaggaattctttgggctgaaagtgactgggaaaccagatgctgaaaccctgaaggtgatgaagcagcccagatgtggagtgcctgatgtggctcagtttgtcctcactgagggaaaccctcgctgggagcaaacacatctgaggtacaggattgaaaattacacgccagatttgccaagagcagatgtggaccatgccattgagaaagccttccaactctggagtaatgtcacacctctgacattcaccaaggtctctgagggtcaagcagacatcatgatatcttttgtcaggggagatcatcgggacaactctccttttgatggacctggaggaaatcttgctcatgcttttcaaccaggcccaggtattggaggggatgctcattttgatgaagatgaaaggtggaccaacaatttcagagagtacaacttacatcgtgttgcggctcatgaactcggccattctcttggactctcccattctactgatatcggggctttgatgtaccctagctacaccttcagtggtgatgttcagctagctcaggatgacattgatggcatccaagccatatatggacgttcccaaaatcctgtccagcccatcggcccacaaaccccaaaagcgtgtgacagtaagctaacctttgatgctataactacgattcggggagaagtgatgttctttaaagacagattctacatgcgcacaaatcccttctacccggaagttgagctcaatttcatttctgttttctggccacaactgccaaatgggcttgaagctgcttacgaatttgccgacagagatgaagtccggtttttcaaagggaataagtactgggctgttcagggacagaatgtgctacacggataccccaaggacatctacagctcctttggcttccctagaactgtgaagcatatcgatgctgctctttctgaggaaaacactggaaaaacctacttctttgttgctaacaaatactggaggtatgatgaatataaacgatctatggatccaagttatcccaaaatgatagcacatgactttcctggaattggccacaaagttgatgcagttttcatgaaagatggatttttctatttctttcatggaacaagacaatacaaatttgatcctaaaacgaagagaattttgactctccagaaagctaatagctggttcaactgcaggaaaaattgaacattactaatttgaatggaaaacacatggtgtgagtccaaagaaggtgttttcctgaagaactgtctattttctcagtcatttttaacctctagagtcactgatacacagaatataatcttatttatacctcagtttgcatatttttttactatttagaatgtagccctttttgtactgatataatttagttccacaaatggtgggtacaaaaagtcaagtttgtggcttatggattcatataggccagagttgcaaagatcttttccagagtatgcaactctgacgttgatcccagagagcagcttcagtgacaaacatatcctttcaagacagaaagagacaggagacatgagtctttgccggaggaaaagcagctcaagaacacatgtgcagtcactggtgtcaccctagataggcaagggataactcttctaacacaaaataagtgttttatgtttggaataaagtcaaccttgtttctactgtttt

SEQ ID NO: 1293 - DNA, 634 bp, Homo sapiens
  Genbank Accession No. M13755
cggctgagaggcagcgaactcatctttgccagtacaggagcttgtgccgtggcccacagcccacagcccacagccatgggctgggacctgacggtgaagatgctggcgggcaacgaattccaggtgtccctgagcagctccatgtcggtgtcagagctgaaggcgcagatcacccagaagattggcgtgcacgccttccagcagcgtctggctgtccacccgagcggtgtggcgctgcaggacagggtcccccttgccagccagggcctgggccctggcagcacggtcctgctggtggtggacaaatgcgacgaacctctgagcatcctggtgaggaataacaagggccgcagcagcacctacgaggtccggctgacgcagaccgtggcccacctgaagcagcaagtgagcgggctggagggtgtgcaggacgacctgttctggctgaccttcgaggggaagcccctggaggaccagctcccgctgggggagtacggcctcaagcccctgagcaccgtgttcatgaatctgcgcctgcggggaggcggcacagagcctggcgggcggagctaagggcctccaccagcatccgagcaggatcaagggccggaaataaaggctgttgtaagagaat

SEQ ID NO: 1294 - DNA, 2108 bp, Homo sapiens
  Genbank Accession No. M13903
tgtctttcaggttgacagtagcttctaagatgtcccagcaacacacactgccagtgaccctctcccctgccctcagtcaggagctcctcaagactgttcctcctccagtcaatacccatcaggagcaaatgaaacagccaactccactgcctcccccatgccagaaggtgcctgtcgagctcccagtggaggtcccatcaaagcaagaggaaaagcacatgactgctgtaaagggactgcctgagcaagaatgtgagcaacagcagaaggagccacaggagcaggagctgcagcaacagcactgggaacagcatgaggaatatcagaaagcagaaaacccagagcagcagcttaagcaggagaaaacacaaagggatcagcagctaaacaaacagctggaagaagagaagaagctcttagaccagcaactggatcaagagctagtcaagagagatgagcaactgggaatgaagaaagagcaactgttggagctcccagagcagcaggaggggcacctgaagcacctagagcagcaggagggacagctgaagcacccggagcagcaggaggggcagctggagctcccagagcagcaggaggggcagctggagctcccagagcagcaggaggggcagctggagctcccagagcagcaggaggggcagctggagctcccagagcagcaggaggggcagctggagctcccacagcagcaggaggggcagctggagctctctgagcagcaggaggggcagctggagctctctgagcagcaggaggggcagctggagctctctgagcagcaggagggacagctgaagcacctggagcaccaggaggggcagctggaggtcccagaggagcagatggggcagctgaagtacctggaacagcaggaggggcagctgaagcacctggatcagcaggagaagcagccagagctcccagagcagcagatggggcagctgaagcacctggagcagcaggaggggcagcctaagcatctggagcagcaggaggggcaactggagcagctggaggagcaggaggggcagctgaagcacctggagcagcaggaggggcagctggagcacctggagcaccaggaagggcagctggggctcccagagcagcaggtgctgcagctgaagcagctagagaagcagcaggggcagccaaagcacctggaggaggaggaggggcagctgaagcacctggtgcagcaggaggggcagctgaagcatctggtgcagcaggaggggcagctggagcagcaggagaggcaggtggagcacctggagcagcaggtggggcagctgaagcacctagaggagcaggagggacagctgaagcatctggagcagcagcaggggcagttggaggtcccagagcagcaggtggggcagccaaagaacctggagcaggaggagaagcaactggagctcccagagcagcaagagggccaggtgaagcacctggagaagcaggaggcacagctggagctcccagagcagcaggtaggacagccaaagcacctggaacagcaggaaaagcacctagagcacccagagcagcaggacggacaactaaaacatctggagcagcaggaggggcagctgaaggacctggagcagcagaaggggcagctggagcagcctgtgtttgccccagctccaggccaggtccaagacattcaaccagccctgcccacaaagggagaagtattgcttcctgtagagcaccagcagcagaagcaggaggtgcagtggccacccaaacataaataaccacccgcagtgtccagaggccctcagatcgtctcatacaagggaagagagagccactggctccacttatttcgggtccgctaggtggcccgtctcatctgtgaacttgactctgtccctctacatgtctctttaatggggtgagggtgggggagagagggaattattgtccagtgccaaccccaatgaccccaatcccaacctcaggtgagcggagcctctacttgagggactattgttactataggaatccttacttccccagtattgaagctgaatcagtgagtgtgtacaatgatacataataaatcttggaagtct

SEQ ID NO: 1295 - DNA, 718 bp, Homo sapiens
  Genbank Accession No. M16424
catgtcctcttgcaggcgaggtgtccaggcccaacccctcaatgtaggcttctgtgagcaggagtttgaacagacctgagccccaggcaccgaggagggtgctggctgtaggtgaatggtagtggagccaggcttccactgcatcctggccaggggacggagccccttgccttcgtgccccttgcctgcgtgcccctgtgcttggagagaaaggggccggtgctggcgctcgcattcaataaagagtaatgtggcatttttctataataaacatggattacctgtgtttaaaaaaaaaagtgtgaatggcgttagggtaagggcacagccaggctggagtcagtgtctgcccctgaggtcttttaagttgagggctgggaatgaaacctatagcctttgtgctgttctgccttgcctgtgagctatgtcactcccctcccactcctgaccatattccagacacctgccctaatcctcagcctgctcacttcacttctgcattatatctccaaggcgttggtatatggaaaaagatgtaggggcttggaggtgttctggacagtggggagggctccagacccaacctggtcacaaaagagcctctcccccatgcatactcatccacctccctcccctagagctattctcctttgggtttcttgctgctgcaattttatacaaccattatttaaatattattaaacacatattgttctct

SEQ ID NO: 1296 - DNA, 2297 bp, Homo sapiens
  Genbank Accession No. M16750
  unsure (1)..(2297): n = a or c or g or t
gcgccgcatcctggaggttgggatgctcttgtccaaaatcaactcgcttgcccacctgcgcgcccgcgcctgcaacgacctgcacgccaccaagctggcgccgggcaaggagaaggagcccctggagtcgcagtaccaggtgggcccgctactgggcagcggcggcttcggctcggtctactcaggcatccgcgtctccgacaacttgccggtggccatcaaacacgtggagaaggaccggatttccgactggggagagctgcctaatggcactcgagtgcccatggaagtggtcctgctgaagaaggtgagctcgggtttctccggcgtcattaggctcctggactggttcgagaggcccgacagtttcgtcctgatcctggagaggcccgagccggtgcaagatctcttcgacttcatcacggaaaggggagccctgcaagaggagctggcccgcagcttcttctggcaggtgctggaggccgtgcggcactgccacaactgcggggtgctccaccgcgacatcaaggacgaaaacatccttatcgacctcaatcgcggcgagctcaagctcatcgacttcgggtcgggggcgctgctcaaggacaccgtctacacggacttcgatgggacccgagtgtatagccctccagagtggatccgctaccatcgctaccatggcaggtcggcggcagtctggtccctggggatcctgctgtatgatatggtgtgtggagatattcctttcgagcatgacgaagagatcatcaggggccaggttttcttcaggcagagggtctcttcagaatgtcagcatctcattagatggtgcttggccctgagaccatcagataggccaaccttcgaagaaatccagaaccatccatggatgcaagatgttctcctgccccaggaaactgctgagatccacctccacagcctgtcgccggggcccagcaaatagcagcctttctggcaggtcctcccctctcttgtcagatgcccaggagggaagcttctgtctccagctttcccgagtaccagtgacacgtctcgccaagcaggacagtgcttgatacaggaacaacatttacaactcattccagatcccaggcccctggaggctgcctcccaacagtggggaagagtgactctccaggggtcctaggcctcaactcctcccatagatactctcttcttctcataggtgtccagcattgctggactctgaaatatcccgggggtggggggtgggggtgggtcagaaccctgccatggaactgtttccttcatcatgagttctgctgaatgccgcgatgggtcaggtaggggggaaacaggttgggatgggataggactagcaccattttaagtccctgtcacctcttccgactctttctgagtgccttctgtggggactccggctgtgctgggagaaatacttgaacttgcctcttttacctgctgcttctccaaaaatctgcctgggttttgttccctatttttctctcctgtcctccctcaccccctccttcatatgaaaggtgccatggaagaggctacagggccaaacgctgagccacctgcccttttttctcctcctttagtaaaactccgagtgaactggtcttcctttttggtttttacttaactgtttcaaagccaagacctcacacacacaaaaaatgcacaaacaatgcaatcaacagaaaagctgtaaatgtgtgtacagttggcatggtagtatacaaaaagattgtagtggatctaatttttaagaaattttgcctttaagttattttacctgtttttgtttcttgttttgaaagatgcgcattctaacctggaggtcaatgttatgtatttatttatttatttatttggttcccttcctannnnnnnnnnngctgctgccctagttttctttcctcctttcctcctctgacttggggaccttttgggggagggctgcgacgcttgctctgtttgtggggtgacgggactcaggcgggacagtgctgcagctccctggcttctgtggggcccctcacctacttacccaggtgggtcccggctctgtgggtgatggggaggggcattgctgactgtgtatataggataattatgaaaagcagttctggatggtgtgccttccagatcctctctggggctgtgttttgagcagcaggtagcctgctggttttatctgagtgaaatactgtacaggggaataaaagagatcttatttttttttttatacttggcgttttttgaataaaaaccttttgtcttaaaac

SEQ ID NO: 1297 - DNA, 1359 bp, Homo sapiens
  Genbank Accession No. M16937
ctttttggtgtaaatctggactctaattctgtaatatatcaaggaatctcgtaaaaccgacactaaaacgtccctgcctacaaatcatccggccaaattatgagttcattgtattatgcgaatgctttattttctaaatatccagcctcaagttcggttttcgctaccggagccttcccagaacaaacttcttgtgcgtttgcttccaacccccagcgcccgggctatggagcgggttcgggcgcttccttcgccggctcgatgcagggcttgtaccccggcggggggggcatggcgggccagagcgcggccggcgtctacgcggccggctatgggctcgagccgagttccttcaacatgcactgcgcgccctttgagcagaacctctccggggtgtgtcccggcgactccgccaaggcggcgggcgccaaggagcagagggactcggacttggcggccgagagtaacttccggatctacccctcgatgcgaagctcaggaactgaccgcaaacgaggccgccagacctacacccgctaccagaccctggagctggagaaggaatttcactacaatcgctacctgacgcggcggcggcgcatcgagatcgcgcacgcgctctgcctcacggaaagacagatcaagatttggtttcagaaccggcgcatgaagtggaaaaaggagaacaagaccgcgggcccggggaccaccggccaagacagggctgaagcagaggaggaagaggaagagtgagggatggagaaagggcagaggaagagacatgagaaagggagacgaagagaagcccagctctgggaactgaatcaggaaactcaaatcgaatagggaagtaaaaaaacaaaacaaaaaacaaaaaaaaacaaaaaaaaaccctatttaaatgaaaggagtttaaaaacattttttaaggagggagaaaggagaaattttggtttttcaacactgaaaaaatagtacctataggaaagtctgtcaggtttggtttttttgtacaatatgaaaaggacattatctacctgttctgtagctttctggaatttacctccccttttctatgttgctattgtaaggtctttgtaaaatcttgcagttttgtaagccctctttaatgctgtctttgtggactgtgggtctggactaaccctgtggttgcctgccctcctgtgcctccgccttcccagcagcggcaccaaggggccttagggagccccaaaacctaccactcgcgtgttccccaagcgccttgctgctgctgcttgcttcccgtcccccagccccatgctccctttacattctgtgtgtatctaaaggatggaaaaataaaacgcaattaaaaat

SEQ ID NO: 1298 - DNA, 1639 bp, Homo sapiens
  Genbank Accession No. M17017
acaaactttcagagacagcagagcacacaagcttctaggacaagagccaggaagaaaccaccggaaggaaccatctcactgtgtgtaaacatgacttccaagctggccgtggctctcttggcagccttcctgatttctgcagctctgtgtgaaggtgcagttttgccaaggagtgctaaagaacttagatgtcagtgcataaagacatactccaaacctttccaccccaaatttatcaaagaactgagagtgattgagagtggaccacactgcgccaacacagaaattattgtaaagctttctgatggaagagagctctgtctggaccccaaggaaaactgggtgcagagggttgtggagaagtttttgaagagggctgagaattcataaaaaaattcattctctgtggtatccaagaatcagtgaagatgccagtgaaacttcaagcaaatctacttcaacacttcatgtattgtgtgggtctgttgtagggttgccagatgcaatacaagattcctggttaaatttgaatttcagtaaacaatgaatagtttttcattgtaccatgaaatatccagaacatacttatatgtaaagtattatttatttgaatctacaaaaaacaacaaataatttttgaatataaggattttcctagatattgcacgggagaatatacaaatagcaaaattgggccaagggccaagagaatatccgaactttaatttcaggaattgaatgggtttgctagaatgtgatatttgaagcatcacataaaaatgatgggacaataaattttgccataaagtcaaatttagctggaaatcctggatttttttctgttaaatctggcaaccctagtctgctagccaggatccacaagtccttgttccactgtgccttggtttctcctttatttctaagtggaaaaagtattagccaccatcttacctcacagtgatgttgtgaggacatgtggaagcactttaagttttttcatcataacataaattattttcaagtgtaacttattaacctatttattatttatgtatttatttaagcatcaaatatttgtgcaagaatttggaaaaatagaagatgaatcattgattgaatagttataaagatgttatagtaaatttattttattttagatattaaatgatgttttattagataaatttcaatcagggtttttagattaaacaaacaaacaattgggtacccagttaaattttcatttcagataaacaacaaataattttttagtataagtacattattgtttatctgaaattttaattgaactaacaatcctagtttgatactcccagtcttgtcattgccagctgtgttggtagtgctgtgttgaattacggaataatgagttagaactattaaaacagccaaaactccacagtcaatattagtaatttcttgctggttgaaacttgtttattatgtacaaatagattcttataatattatttaaatgactgcatttttaaatacaaggctttatatttttaactttaagatgtttttatgtgctctccaaattttttttactgtttctgattgtatggaaatataaaagtaaatatgaaacatttaaaatataatttgttgtcaaagt

SEQ ID NO: 1299 - DNA, 339 bp, Homo sapiens
  Genbank Accession No. M18667
tgttgagcagaacaacggctactgcaccgtgggagtcgagcccacctacctgtcctcccagaacggccagcccctgtggatcctgggggatgtcttcctcaggtcctactattccgtctacgacttgggcaacaacagagtaggctttgccactgccgcctagacttgctgcctcgacacgtgggctcccctcttcctcttgaccctgcaccctcctagggcattgtatctgtctttccactctggattcagccttctttttctggactctggactttctctaataataaatagttcttctttatgttggtcatcctgttgtttttggaagggagtttt

SEQ ID NO: 1300 - DNA, 2533 bp, Homo sapiens
  Genbank Accession No. M18728
ggagctcaagctcctctacaaagaggtggacagagaagacagcagagaccatgggacccccctcagcccctccctgcagattgcatgtcccctggaaggaggtcctgctcacagcctcacttctaaccttctggaacccacccaccactgccaagctcactattgaatccacgccattcaatgtcgcagaggggaaggaggttcttctactcgcccacaacctgccccagaatcgtattggttacagctggtacaaaggcgaaagagtggatggcaacagtctaattgtaggatatgtaataggaactcaacaagctaccccagggcccgcatacagtggtcgagagacaatataccccaatgcatccctgctgatccagaacgtcacccagaatgacacaggattctataccctacaagtcataaagtcagatcttgtgaatgaagaagcaaccggacagttccatgtatacccggagctgcccaagccctccatctccagcaacaactccaaccccgtggaggacaaggatgctgtggccttcacctgtgaacctgaggttcagaacacaacctacctgtggtgggtaaatggtcagagcctcccggtcagtcccaggctgcagctgtccaatggcaacatgaccctcactctactcagcgtcaaaaggaacgatgcaggatcctatgaatgtgaaatacagaacccagcgagtgccaaccgcagtgacccagtcaccctgaatgtcctctatggcccagatgtccccaccatttccccctcaaaggccaattaccgtccaggggaaaatctgaacctctcctgccacgcagcctctaacccacctgcacagtactcttggtttatcaatgggacgttccagcaatccacacaagagctctttatccccaacatcactgtgaataatagcggatcctatatgtgccaagcccataactcagccactggcctcaataggaccacagtcacgatgatcacagtctctggaagtgctcctgtcctctcagctgtggccaccgtcggcatcacgattggagtgctggccagggtggctctgatatagcagccctggtgtattttcgatatttcaggaagactggcagattggaccagaccctgaattcttctagctcctccaatcccattttatcccatggaaccactaaaaacaaggtctgctctgctcctgaagccctatatgctggagatggacaactcaatgaaaatttaaagggaaaaccctcaggcctgaggtgtgtgccactcagagacttcacctaactagagacagtcaaactgcaaaccatggtgagaaattgacgacttcacactatggacagcttttcccaagatgtcaaaacaagactcctcatcatgataaggctcttacccccttttaatttgtccttgcttatgcctgcctctttcgcttggcaggatgatgctgtcattagtatttcacaagaagtagcttcagagggtaacttaacagagtgtcagatctatcttgtcaatcccaacgttttacataaaataagagatcctttagtgcacccagtgactgacattagcagcatctttaacacagccgtgtgttcaaatgtacagtggtccttttcagagttggacttctagactcacctgttctcactccctgttttaattcaacccagccatgcaatgccaaataatagaattgctccctaccagctgaacagggaggagtctgtgcagtttctgacacttgttgttgaacatggctaaatacaatgggtatcgctgagactaagttgtagaaattaacaaatgtgctgcttggttaaaatggctacactcatctgactcattctttattctattttagttggtttgtatcttgcctaaggtgcgtagtccaactcttggtattaccctcctaatagtcatactagtagtcatactccctggtgtagtgtattctctaaaagctttaaatgtctgcatgcagccagccatcaaatagtgaatggtctctctttggctggaattacaaaactcagagaaatgtgtcatcaggagaacatcataacccatgaaggataaaagccccaaatggtggtaactgataatagcactaatgctttaagatttggtcacactctcacctaggtgagcgcattgagccagtggtgctaaatgctacatactccaactgaaatgttaaggaagaagatagatccaattaaaaaaaattaaaaccaatttaaaaaaaaaaaagaacacaggagattccagtctacttgagttagcataatacagaagtcccctctactttaacttttacaaaaaagtaacctgaactaatctgatgttaaccaatgtatttatttctgtggttctgtttccttgttccaatttgacaaaacccactgttcttgtattgtattgcccagggggagctatcactgtacttgtagagtggtgctgctttaattcataaatcacaaataaaagccaattagctctataact

SEQ ID NO: 1301 - DNA, 7011 bp, Homo sapiens
  Genbank Accession No. M19720
cgggccgcatcagccctcctcctgtttgcgctccccagcgtgcaatttatttggggggctaccggggattgaacggagcgggcgagcgctgccaggaggtggggccggccccacctgtcgactgcccgtagtaggcagggagagggcggggtttgtcccatagggcccgccccccagtccctgggtcccgggcgcgcgacgagatataaggcagtcaggaaacaatgcgcctgcagctcgcgctcccgcgccgatcccgagagcgtccgggccgccgtgcgcgagcgagggagggcgcgcgcgcggggggggcgcgctcgtgagtgcgggccgcgctctcggcggcgcgcatgtgcgtgtgtgctggctgccgggctgccccgagccggcggggagccggtccgctccaggtggcgggcggctggagcgaggtgaggctgcgggtggccagggcacgggcgcgggtcccgcggtgcgggctggctgcaggctgccttctgggcacggcgcgcccccgcccggccccgccgggccctgggagctgcgctccgggcggcgctggcaaagtttgctttgaactcgctgcccacagtcgggtccgcgcgctgcgattggcttcccctaccactctgacccggggcccggcttcccgggacgcgaggactgggcgcaggctgcaagctggtggggttggggaggaacgagagcccggcagccgactgtgccgagggacccggggacacctccttcgcccggccggcacccggtcagcacgtccccccttccctcccgcagggagcggacatggactacgactcgtaccagcactatttctacgactatgactgcggggaggatttctaccgctccacggcgcccagcgaggacatctggaagaaattcgagctggtgccatcgccccccacgtcgccgccctggggcttgggtcccggcgcaggggacccggcccccgggattggtcccccggagccgtggcccggagggtgcaccggagacgaagcggaatcccggggccactcgaaaggctggggcaggaactacgcctccatcatacgccgtgactgcatgtggagcggcttctcggcccgggaacggctggagagagctgtgagcgaccggctcgctcctggcgcgccccgggggaacccgcccaaggcgtccgccgccccggactgcactcccagcctcgaagccggcaacccggcgcccgccgccccctgtccgctgggcgaacccaagacccaggcctgctccgggtccgagagcccaagcgactcgggtaaggacctccccgagccatccaagagggggccaccccatgggtggccaaagctctgcccctgcctgaggtcaggcattggctcttctcaagctcttgggccatctccgcctctctttggctgaagctgcccgtgtagtccccaaccgtgtctgtctggcacgtgggtgtgttggtaaacagtttggaaaagtggcgtgggagccagcctccctttgatgattattggagccccaggggacaagggatttgaggtgagggttggcgcttagagaggacaatactggggttggactgtaagggattgaagggggtaccttaagagacactccaaacctgaagtttttttgctgctgcctctttccctaggaaactcacactcccctagggggagaagaagccgagagccttttgtgcaaagccaaaaccttcgtccttttaaaaacctaggtctccagttggctttactttaaaatgccaataataaatgccctcttctcgtgcctccccaccaccacttaccactcgtgcatccctgagacagggagggaagaatgaacactccccattaacagatggaaaaactgaggcttagagatagacaatcactacaagtcagctccagctttctgccatctagccagcccctcttccccaatgctccatcccaaccaggcacctcttccttgatgtttggggtctttgtggtagcttatcttagaagcactacaccttgccttgctgtttgtcctgagatggaaaagtgtccttcttgctccccctcaatagatctccagcgtcagctgctccctggcattcaacaaatattcactggcccctactttgtggcaatctgtgggctacatgctggggtcaaggcagtagaactccaggccctcctctcccatccttgatgcaagtgcaacctcgctgagggcagactggggcatcctgtgccactaaactacattgttcttattctggcatcttagacctccacacccgtgagaaatcctggagagggtatttttgtagagtgtagactgtggctagtgacaaataaattaggaccaagaaagctcactgtagcttttaggaataacttttacacgaccatttgatagggaactggggaatggggtatggaagttttcctacacttgagagaaaaaataggataacaaaaattaaaagtctttttttcctggtccactgtgttaaggtcatttttaaccagcttgctttctacaccaagagtttatgtttgtttaatggctggaaagagaatcttgagatcaaaaaaccaataaagatgtatctctacaacggctggtggagtggtagagtggaaagagcattgctttggaagttggaacattttagtttgagatccagaacgttacaaaggtgatatgtggacttcgctgatctgggcctcagtttccccatttgcacacgatggggttggacttgattgtcctgctgatgacatttccttgtctggatagagtaagacactactctctgaaagggagaatggtgtgcttaaattatttctttcttagatagaatcttcctgagccacgaggcttaacactgaaaattaaaggtttgggatgtaggaaagcctgctgaatcattttctaacctaccctttaacctgaacctgtttgtgagcttctagttcactcacaggccacatggcctggaacaaaatgcaacagattgcaaacaatgaggcggggggtggggaaagtgattggcagcagagctcacccaataggggctaggggctgggtaagacagaattccaaacacagcgtaatcagccaatcatgggctttggggccaggagggctgaatggtcaggtttattaatggagaaataatgcgattgtccacacaatggaagccttcctgacaaaggggctcaagcttcctgatatgcaaagaagctgagaacggagctcttcctttgccgaggccgagatccattaaggtcggacttctgtgtggaggctgcaaaatgtgtggagcaggaggagacttttctcccaattgcccctctcctggttaggttaacctaagagaccttcaagccagtgaatgagaagggcgtgtccaggtgtctccaggtctctggtgttatgagccccatatctgggacattctgctgcccagtctctgcctctggtgcaggtagtttggaaatggtcgcttgtacctttgtgaagttcctgcagcttcgccgacctatgattacaaatctaaccttctagtccagggaaggaggtggggcaggcgacctataaatgatggatgactttagaaacccattgaacccaggagcaaaatgctcctaagggaaaccctttccctcccctctgtgggtgaagagggatgggttgtagccctcccttctctgaatcttcagctgaaagggatggcagaatagagaggtgggggaataataggatttataacttgtgaaaagtaacaattccccaagtgcaggctgtgctgggcaggaacaaagggcagctctgcccacagacccctcatttacaattctgatggggcatgaaagagcccgactggggaagatctttatagctaaactttgtcccaggccggtagctctttctctccaacccctccgtgggggaggggagagcctttgcagactgggggctgttggcttgggtctgccttttgttcttatctaagccttgctgtgcaaaaggaaattggagaatattttccttcttgctaatgtcccctcctttccttcactgtgcccttaccacattacaaatgaatcagctttctgctcacctcgatttgtatatatctaaattggaaaaatgtctcctaccttcccaagcaccagcgtagacagctaaagctgtagggtctatgtttgtgtttctcatgggatgtgtttcttctcttgatctcttttctcggacagagaatgaagaaattgatgttgtgacagtagagaagaggcagtctctgggtattcggaagccggtcaccatcacggtgcgagcagaccccctggatccctgcatgaagcatttccacatctccatccatcagcaacagcacaactatgctgcccgttttcctccagaaagctgctcccaagaagaggcttcagagaggggtccccaagaagaggttctggagagagatgctgcaggggaaaaggaagatgaggaggatgaagagattgtgagtcccccacctgtagaaagtgaggctgcccagtcctgccaccccaaacctgtcagttctgatactgaggatgtgaccaagaggaagaatcacaacttcctggagcgcaagaggcggaatgacctgcgttcgcgattcttggcgctgagggaccaggtgcccaccctggccagctgctccaaggcccccaaagtagtgatcctaagcaaggccttggaatacttgcaagccctggtgggggctgagaagaggatggctacagagaaaagacagctccgatgccggcagcagcagttgcagaaaagaattgcatacctcagtggctactaactgaccaaaaagcctgacagttctgtcttacgaagacacaagtttattttttaacctccctctcccctttagtaatttgcacattttggttatggtgggacagtctggacagtagatcccagaatgcattgcagccggtgcacacacaataaaggcttgcattcttggaaaccttgaaacccagctctccctcttccctgactcatgggagtgctgtatgttctctggcgcctttggcttcccagcaggcagctgactgaggagccttggggtctgcctagctcactagctctgaagaaaaggctgacagatgctatgcaacaggtggtggatgttgtcaggggctccagcctgcatgaaatctcacactctgcatgagctttaggctaggaaaggatgctcccaactggtgtctctggggtgatgcaaggacagctgggcctggatgctctccctgaggctcctttttccagaagacacacgagctgtcttgggtgaagacaagcttgcagacttgatcaacattgaccattacctcactgtcagacactttacagtagccaaggagttggaaacctttatgtattatgatgttagctgacccccttcctcccactcccaatgctgcgaccctgggaacacttaaaaagcttggcctctagattctttgtctcagagccctctgggctctctcctctgagggagggacctttctttcctcacaagggacttttttgttccattatgccttgttatgcaatgggctctacagcaccctttcccacaggtcagaaatatttccccaagacacagggaaatcggtcctagcctggggcctggggatagcttggagtcctggcccatgaacttgatccctgcccaggtgttttccgaggggcacttgaggcccagtcttttctcaaggcaggtgtaagacactcagagggagaactgtactgctgcctctttcccaccttcctcatctcaatccttgagcggcaagtttgaagttcttctggaaccatgcaaatctgtcctcctcatgcaattccaaggagcttgctggctctgcagccacctctgggccccttccagcctgccatgaatcagatatctttcccagaatctgggcgtttctgaagttttggggagagctgttgggactcatccagtgctccagaaggtggacttgcttctggggggttttaaaggagcctccaggagatatgcttagccaaccatgatggattttaccccagctggactcggcagctccaagtggaatccacgtgcagcttctagtctgggaaagtcacccaacctagcagttgtcatgtgggtaacctcaggcacctctaagcctgtcctggaagaaggaccagcagcccctccagaactctgcccaggacagcaggtgcctgctggctctgggtttggaagtttggggtgggtagggggtggtaagtactatatatggctctggaaaaccagctgctacttccaaatctattgtccataatggtttctttctgaggttgcttcttggcctcagaggaccccaggggatgtttggaaatagcctctctacccttctggagcatggtttacaaaagccagctgacttctggaattgtctatggaggacagtttgggtgtaggttactgatgtctcaactgaatagcttgtgttttataagctgctgttggctattatgctgggggagtcttttttttttatattgtatttttgtatgccttttgcaaagtggtgttaactgtttttgtacaaggaaaaaaactcttggggcaatttcctgttgcaagggtctgatttattttgaaaggcaagttcacctgaaattttgtatttagttgtgattactgattgcctgattttaaaatgttgccttctgggacatcttctaataaaagatttctcaaacatgtcagagtgggggcagcttatgccacctgagtcctcctcaaccacggaaaactatttcagggtagccacaagtgatccagagggctgcacttctctaaccatgttgctaacctggtcattccactctgggttcctgaaatgccatttcagacatgttgaaacaatgtaggctcagtactcagtgaacacggaattc

SEQ ID NO: 1302 - DNA, 623 bp, Homo sapiens
  Genbank Accession No. M19888
gaccaccagttctaagggaccatacagagtattcctctcttcacaccaggaccagccactgttgcagcatgagttcccagcagcagaagcagccctgcatcccaccccctcagcttcagcagcagcaggtgaaacagccttgccagcctccacctcaggaaccatgcatccccaaaaccaaggagccctgccaccccaaggtgcctgagccctgccaccccaaagtgcctgagccctgccagcccaaggttccagagccatgccaccccaaggtgcctgagccctgcccttcaatagtcactccagcaccagcccagcagaagaccaagcagaagtaatgtggtccacagccatgcccttgaggagccggccaccagatgctgaatcccctatcccattctgtgtatgagtcccatttgccttgcaattagcattctgtctcccccaaaaaagaatgtgctatgaagctttctttcctacacactctgagtctctgaatgaagctgaaggtcttagtaccagagctagttttcagctgctcagaattcatctgaagagagacttaagatgaaagcaaatgattcagctcccttatacccccattaaattcactttcaattcca

SEQ ID NO: 1303 - DNA, 1134 bp, Homo sapiens
  Genbank Accession No. M20469
cgcggggagccggcgtcggcggggacgggcttggcgcggaccgcacttcctctccgccaccgggcccggctccccgcggctcgggtgacagcgtcgcggccgccggacgcagcgcggggcaggcgcgggcagagccgagcgcagcggaggctccggcggaggcgcggggaaaatggctgatgactttggcttcttctcgtcgtcggagagcggtgccccggaggcggcggaggaggacccggcggccgccttcctggcccagcaggagagcgagattgcaggcatagagaacgacgagggcttcggggcacctgccggcagccatgcggcccccgcgcagccgggccccacgagtggggctggttctgaggacatggggaccacagtcaatggagatgtgtttcaggaggccaacggtcctgctgatggctacgcagccattgcccaggctgacaggctgacccaggagcctgagagcatccgcaagtggcgagaggagcagaggaaacggctgcaagagctggatgctgcatctaaggtcacggaacaggaatggcgggagaaggccaagaaggacctggaggagtggaaccagcgccagagtgaacaagtagagaagaacaagatcaacaaccggatcgctgacaaagcattctaccagcagccagatgctgatatcatcggctacgtggcatccgaggaggctttcgtgaaggaatccaaggaggagaccccaggcacagagtgggagaaggtggcccagctatgtgacttcaaccccaagagcagcaagcagtgcaaagatgtgtcccgcctgcgctcggtgctcatgtccctgaagcagacgccactgtcccgctaggtgcctgctaggtgcatggccacagagcatgggctgggcctgggcacaggaggagcagctgctttggtcggggtggagactcgcagcagctgctacccacagcctattccactcctccccatctccaggcgctgggaggggggccctcaccccatcacgcctcgctccctcctggccctctggtccagcccctcacgcctcctctcagtctactcaattgtgactgtccctcctgatgtattttttttcttggcttaaagggtgtgttgttg

SEQ ID NO: 1304 - DNA, 1051 bp, Homo sapiens
  Genbank Accession No. M20470
gtgcggtccgcgccaagccgtccccgccgacgccggctccccgcggctcgggtgacagcgtcgcggccgccggacgcagcgcggggcaggcgcgggcagagccgagcgcagcggaggctccggcggaggcgcggggaaaatggctgatgactttggcttcttctcgtcgtcggagagcggtgccccggaggcggcggaggaggacccggcggccgccttcctggcccagcaggagagcgagattgcaggcatagagaacgacgagggcttcggggcacctgccggcagccatgcggcccccgcgcagccgggccccacgagtggggctggttctgaggacatggggaccacagtcaatggagatgtgtttcaggaggccaacggtcctgctgatggctacgcagccattgcccaggctgacaggctgacccaggagcctgagagcatccgcaagtggcgagaggagcagaggaaacggctgcaagagctggatgctgcatctaaggtcacggaacaggaatggcgggagaaggccaagaaggacctggaggagtggaaccagcgccagagtgaacaagtagagaagaacaagatcaacaaccgggcatccgaggaggctttcgtgaaggaatccaaggaggagaccccaggcacagagtgggagaaggtggcccagctatgtgacttcaaccccaagagcagcaagcagtgcaaagatgtgtcccgcctgcgctcggtgctcatgtccctgaagcagacgccactgtcccgctaggtgcctgctaggtgcatggccacagagcatgggctgggcctgggcacaggaggagcagctgctttggtcggggtggagactcgcagcagctgctacccacagcctattccactcctccccatctccaggcgctgggaggggggccctcaccccatcacgcctcgctccctcctggccctctggtccagcccctcacgcctcctctcagtctactcaattgtgactgtccctcctgatgtattttttttcttggcttaaagggtgtgttgttgactc

SEQ ID NO: 1305 - DNA, 1805 bp, Homo sapiens
  Genbank Accession No. M21154
aagagactgaactgtatctgcctctatttccaaaagactcacgttcaactttcgctcacacaaagccgggaaaattttattagtcctttttttaaaaaaagttaatataaaattatagcaaaaaaaaaaaggaacctgaactttagtaacacagctggaacaatcgcagcggcggcggcagcggcgggagaagaggtttaatttagttgattttctgtggttgttggttgttcgctagtctcacggtgatggaagctgcacattttttcgaagggaccgagaagctgctggaggtttggttctcccggcagcagcccgacgcaaaccaaggatctggggatcttcgcactatcccaagatctgagtgggacatacttttgaaggatgtgcaatgttcaatcataagtgtgacaaaaactgacaagcaggaagcttatgtactcagtgagagtagcatgtttgtctccaagagacgtttcattttgaagacatgtggtaccaccctcttgctgaaagcactggttcccctgttgaagcttgctagggattacagtgggtttgactcaattcaaagcttcttttattctcgtaagaatttcatgaagccttctcaccaagggtacccacaccggaatttccaggaagaaatagagtttcttaatgcaattttcccaaatggagcaggatattgtatgggacgtatgaattctgactgttggtacttatatactctggatttcccagagagtcgggtaatcagtcagccagatcaaaccttggaaattctgatgagtgagcttgacccagcagttatggaccagttctacatgaaagatggtgttactgcaaaggatgtcactcgtgagagtggaattcgtgacctgataccaggttctgtcattgatgccacaatgttcaatccttgtgggtattcgatgaatggaatgaaatcggatggaacttattggactattcacatcactccagaaccagaattttcttatgttagctttgaaacaaacttaagtcagacctcctatgatgacctgatcaggaaagttgtagaagtcttcaagccaggaaaatttgtgaccaccttgtttgttaatcagagttctaaatgtcgcacagtgcttgcttcgccccagaagattgaaggttttaagcgtcttgattgccagagtgctatgttcaatgattacaattttgtttttaccagttttgctaagaagcagcaacaacagcagagttgattaagaaaaatgaagaaaaaacgcaaaaagagaacacatgtagaaggtggtggatgctttctagatgtcgatgctgggggcagtgctttccataaccaccactgtgtagttgcagaaagccctagatgtaatgatagtgtaatcattttgaattgtatgcattattatatcaaggagttagatatcttgcatgaatgctctcttctgtgtttaggtattctctgccactcttgctgtgaaattgaagtggatgtagaaaaaaccttttactatatgaaactttacaacacttgtgaaagcaactcaatttggtttatgcacagtgtaatatttctccaagtatcatccaaaattccccacagacaaggctttcgtcctcattaggtgttggcctcagcctaaccctctaggactgttctattaaattgctgccagaattttacatccagttacctccactttctagaacatattctttactaatgttattgaaaccaatttctacttcatactgatgtttttggaaacagcaattaaagtttttcttccatg

SEQ ID NO: 1306 - DNA, 683 bp, Homo sapiens
  Genbank Accession No. M21302
aactcctggtactctagcaccgatctgctttggagaacctgatcctgagactccagcaggatgtcttatcaacagcagcagtgcaagcagccctgccagccacctcctgtgtgccccacgccaaattgcccagagccatgtccacccccgaagtcccctgagccctgcccaccatcaaagtgtccacagccctgcccacctcagcagtgccagcagaaatatcctcctgtgacaccttccccaccctgccagccaaagtgtccacccaagagcaagtaacagcttcaggattcatcaggaccatgagaggataaggataattggctcacctcgttccacacctccacttgcatcttctcaccaaagccttccatggatgcacagggagcttctttctccttaacctgtggcctgcctgtgatgatctgtgacagcaaaagattccctttctgaggctgccatactgccactgtccaggtggagctaagaaaaggaagtcctcagctgtgccagctcccagagcttcagcagaaagagcagcagctctctccctgggaaccatcagacaattctgttgatgtgttctgtgtctgtctgtcacctggtcatgagcttctaccacctttgcaattgtcatttatcgttcactccctgaataaagtatctatgcatatatatttgta

SEQ ID NO: 1307 - DNA, 2529 bp, Homo sapiens
  Genbank Accession No. M21389
gcatcctttttgggctgctcacagcccccagcctctatggtgaagacatacttgctagcagcgtcaccaacttgctgccaagagatcagtgctgcaaggcaaggttatttctaactgagcagagcctgccaggaagaaagcgtttgcaccccacaccactgtgcaggtgtgaccggtgagctcacagctgccccccaggcatgcccagcccacttaatcattcacagctcgacagctctctcgcccagcccagttctggaagggataaaaagggggcatcaccgttcctgggtaacagagccaccttctgcgtcctgctgagctctgttctctccagcacctcccaacccactagtgcctggttctcttgctccaccaggaacaagccaccatgtctcgccagtcaagtgtgtccttccggagcgggggcagtcgtagcttcagcaccgcctctgccatcaccccgtctgtctcccgcaccagcttcacctccgtgtcccggtccgggggtggcggtggtggtggcttcggcagggtcagccttgcgggtgcttgtggagtgggtggctatggcagccggagcctctacaacctggggggctccaagaggatatccatcagcactagaggaggcagcttcaggaaccggtttggtgctggtgctggaggcggctatggctttggaggtggtgccggtagtggatttggtttcggcggtggagctggtggtggctttgggctcggtggcggagctggctttggaggtggcttcggtggccctggctttcctgtctgccctcctggaggtatccaagaggtcactgtcaaccagagtctcctgactcccctcaacctgcaaatcgaccccagcatccagagggtgaggaccgaggagcgcgagcagatcaagaccctcaacaataagtttgcctccttcatcgacaaggtgcggttcctggagcagcagaacaaggttctggacaccaagtggaccctgctgcaggagcagggcaccaagactgtgaggcagaacctggagccgttgttcgagcagtacatcaacaacctcaggaggcagctggacagcatcgtgggggaacggggccgcctggactcagagctgagaaacatgcaggacctggtggaagacttcaagaacaagtatgaggatgaaatcaacaagcgtaccactgctgagaatgagtttgtgatgctgaagaaggatgtagatgctgcctacatgaacaaggtggagctggaggccaaggttgatgcactgatggatgagattaacttcatgaagatgttctttgatgcggagctgtcccagatgcagacgcatgtctctgacacctcagtggtcctctccatggacaacaaccgcaacctggacctggatagcatcatcgctgaggtcaaggcccagtatgaggagattgccaaccgcagccggacagaagccgagtcctggtatcagaccaagtatgaggagctgcagcagacagctggccggcatggcgatgacctccgcaacaccaagcatgagatcacagagatgaaccggatgatccagaggctgagagccgagattgacaatgtcaagaaacagtgcgccaatctgcagaacgccattgcggatgccgagcagcgtggggagctggccctcaaggatgccaggaacaagctggccgagctggaggaggccctgcagaaggccaagcaggacatggcccggctgctgcgtgagtaccaggagctcatgaacaccaagctggccctggacgtggagatcgccacttaccgcaagctgctggagggcgaggaatgcagactcagtggagaaggagttggaccagtcaacatctctgttgtcacaagcagtgtttcctctggatatggcagtggcagtggctatggcggtggcctcggtggaggtcttggcggcggcctcggtggaggtcttgccggaggtagcagtggaagctactactccagcagcagtgggggtgtcggcctaggtggtgggctcagtgtggggggctctggcttcagtgcaagcagtggccgagggctgggggtgggctttggcagtggcgggggtagcagctccagcgtcaaatttgtctccaccacctcctcctcccggaagagcttcaagagctaagaacctgctgcaagtcactgccttccaagtgcagcaacccagcccatggagattgcctcttctaggcagttgctcaagccatgttttatccttttctggagagtagtctagaccaagccaattgcagaaccacattctttggttcccaggagagccccattcccagcccctggtctcccgtgccgcagttctatattctgcttcaaatcagccttcaggtttcccacagcatggcccctgctgacacgagaacccaaagttttcccaaatctaaatcatcaaaacagaatccccaccccaatcccaaattttgttttggttctaactacctccagaatgtgttcaataaaatgcttttataatat

SEQ ID NO: 1308 - DNA, 678 bp, Homo sapiens
  Genbank Accession No. M21539
agaggttctcagcctcatgactcctaaactcctggtacttgagcaccgatctgcttcggagaacctgattctgagactccagcaggatgtcttatcaacagtagcaatgtaagcagccctgccagccacctcctgtgtgccgcctgccaaagcgtccagagccatgtccacccctgaagtgccctgagccctgcccaccaccaaagtgtccacagccctgcccacctcagcagtgccagcagaaatatcctctggtgacaccttccccaccctgccagccaaagtgtccacccaagagcaagtaacagcttcggaattcatcaggaccacgaaaggatagggataattggctcacctcgttccacagctccacctgcatcttctcatcaaagccatccagggatacacagggagcttctttccccttagcctgtgatctgcccatgatgatccccgacagcaaaatgtttcctttctgaggctgccatgctgccactgtccaggtggagactgagcaaaggaagtcctcagctgtaccggcctttcagagcttctctttgggtgccatcaaagaattattttgatgtcttctgtctctgtctgtcacctggcatgagcttctactatctgtgcaattgtcacttttctttcactccctgaataaagtagctatgccta

SEQ ID NO: 1309 - DNA, 1751 bp, Homo sapiens
  Genbank Accession No. M22490
ggcagaggaggagggagggagggaaggagcgcggagcccggcccggaagctaggtgagtgtggcatccgagctgagggacgcgagcctgagacgccgctgctgctccggctgagtatctagcttgtctccccgatgggattcccgtccaagctatctcgagcctgcagcgccacagtccccggccctcgcccaggttcactgcaaccgttcagaggtccccaggagctgctgctggcgagcccgctactgcagggacctatggagccattccgtagtgccatcccgagcaacgcactgctgcagcttccctgagcctttccagcaagtttgttcaagattggctgtcaagaatcatggactgttattatatgccttgttttctgtcaagacaccatgattcctggtaaccgaatgctgatggtcgttttattatgccaagtcctgctaggaggcgcgagccatgctagtttgatacctgagacggggaagaaaaaagtcgccgagattcagggccacgcgggaggacgccgctcagggcagagccatgagctcctgcgggacttcgaggcgacacttctgcagatgtttgggctgcgccgccgcccgcagcctagcaagagtgccgtcattccggactacatgcgggatctttaccggcttcagtctggggaggaggaggaagagcagatccacagcactggtcttgagtatcctgagcgcccggccagccgggccaacaccgtgaggagcttccaccacgaagaacatctggagaacatcccagggaccagtgaaaactctgcttttcgtttcctctttaacctcagcagcatccctgagaacgaggtgatctcctctgcagagcttcggctcttccgggagcaggtggaccagggccctgattgggaaaggggcttccaccgtataaacatttatgaggttatgaagcccccagcagaagtggtgcctgggcacctcatcacacgactactggacacgagactggtccaccacaatgtgacacggtgggaaacttttgatgtgagccctgcggtccttcgctggacccgggagaagcagccaaactatgggctagccattgaggtgactcacctccatcagactcggacccaccagggccagcatgtcaggattagccgatcgttacctcaagggagtgggaattgggcccagctccggcccctcctggtcacctttggccatgatggccggggccatgccttgacccgacgccggagggccaagcgtagccctaagcatcactcacagcgggccaggaagaagaataagaactgccggcgccactcgctctatgtggacttcagcgatgtgggctggaatgactggattgtggccccaccaggctaccaggccttctactgccatggggactgcccctttccactggctgaccacctcaactcaaccaaccatgccattgtgcagaccctggtcaattctgtcaattccagtatccccaaagcctgttgtgtgcccactgaactgagtgccatctccatgctgtacctggatgagtatgataaggtggtactgaaaaattatcaggagatggtagtagagggatgtgggtgccgctgagatcaggcagtccttgaggatagacagatatacacaccacacacacacaccacatacaccacacacacacgttcccatccactcacccacacactacacagactgcttccttatagctggacttttattt

SEQ ID NO: 1310 - DNA, 3097 bp, Homo sapiens
  Genbank Accession No. M24902
ggccagaaacagctctcctcaacatgagagctgcacccctcctcctggccagggcagcaagcttagccttggcttcttgtttctgctttttttgctggctagaccgaagtgtactagccaaggagttgaagtttgtgactttggtgtttcggcatggagaccgaagtcccattgacacctttcccactgaccccataaaggaatcctcatggccacaaggatttggccaactcacccagctgggcatggagcagcattatgaacttggagagtatataagaaagagatatagaaaattcttgaatgactcctataaacatgaacaggtttatattcgaagcacagacgttgaccggactttgatgagtcgtatgacaaacctggcagccctgtttcccccagaaggtgtcagcatctggaatcctatcctactctggcagcccatcccggtgcacacagttcctctttctgaagatcagttgctatacctgcctttcaggaactgccctcgttttcaagaacttgagagtgagactttgaaatcagaggaattccagaagaggctgcacccttataaggattttatagctaccttgggaaaactttcaggattacatggccaggacctttttggaatttggagtaaagtctacgaccctttatattctgagagtgttcacaatttcactttaccctcctgggccactgaggacaccatgactaagttgagagaattgtcagaattgtccctcctgtccctctatggaattcacaagcagaaagagaaatctaggctccaagggggtgtcctggtcaatgaaatcctcaatcacatgaagagagcaactcagataccaagctacaaaaaacttatcatgtattctgcgcatgacactactgtgactggcctacagatggcgctagatgtttacaacggactccttcctccctatgcttcttgccacttgacggaattgtactttgagaagggggagtactttgtggagatgtactaccggaatgagacgcagcacgagccgtatcccctcatgctacctggctgcagccccagctgtcctctggagaggtttgctgagctggttggccctgtgatccctcaagactggtccacggaggttatgaccacaaacagccatcaaggtactgaggacagtacagattagtgtgcacagagatctctgtagaaagagtagctgccctttctcagggcagatgatgctttgagaacatactttggccattaccccccagctttgaggaaaatgggctttggatgattattttatgttttaggggacccccaacctcaggcaattccatcctcttcacccgaccctgcccccacttgccataaaacttagctaagttttgttttgtttttcagcgttaatgtaaaggggcagcagtgccaaaatataacagagataaagcttaggtcaaagttcatagagttcccatgaactatatgactggccacacaggatcttttgtatttaaggattctgagattttgcttgagcaggattagataaggctgttctttaaatgtctgaaatggaacagatttcaaaaaaaaccccacaatctagggtgggaacaaggaaggaaagatgtgaataggctgatgggcaaaaaaccaatttacccatcagttccagccttctctcaaggagaggcaaagaaaggagatacagtggagacatctggaaagttttctccactggaaaactgctactatctgtttttatatttctgttaaaatatatgaggctacagaactaaaaattaaaacctctttgtgtcccttggtcctggaacatttatgttccttttaaagaaacaaaaatcaaactttacagaaagatttgatgtatgtaatacatatagcagctcttgaagtatatatatcatagcaaataagtcatctgatgagaacaagctatttgggcacaacacatcaggaaagagagcaccacgtgatggagtttctccagaagctccagtgataagagatgttgactctaaagttgatttaaggccaggcatggtggtttacgcctataatcccagcattttgggagtccgaggtgggcagatcacttgagctcaggaggtcaagatcagcctgggcaacatggtgaaaccttgtctctacataaaatacaaaaacttagatgggcatggtggtgtgtgcctatagtccactacttgtggggctaaggcaggaggatcacttgagccccggaggtcgaggctacagtgagccaagagtgcactactgtactccagccagggcaagagagcgagaccctgtctcaataaataaataaataaataaataaataaataaataaataaataaataaaaacaaagttgattaagaaaggaagtataggctaggcacagtggctcacacctgtaatccttgcattttggaaggctgaggcaggaggatcactttaggcctggtgtgttcaagaccagcctggtcaacatagtgagacactgtctctaccaaaaaaaggaaggaagggacacatatcaaactgaaacaaaattagaaatgtaattatgttatgttctaagtgcctccaagttcaaaacttattggaatgttgagagtgtggttacgaaatacgttaggaggacaaaaggaatgtgtaagtctttaatgcccgatatcttcagaaaacctaagcaaacttacaggtcctgctgaaactgcccactctgcaagaagaaatcatgatatagctttgccatgtggcagatctacatgtctagagaacactgtgctctattaccattatggataaagatgagatggtttctagagatggtttctactggctgccagaatctagagcaaagccatccccgctcctggttggtcacagaatgactgacaaagacatcgattgatatgcttctttgtgttatttccctcccaagtaaatgtttgtccttgggtccattttctatgcttgtaactgtcttctagcagtgagccaaatgtaaaatagtgaataaagtcattattaggaagttcaaaagcattgcttttataatgaactt

SEQ ID NO: 1311 - DNA, 1412 bp, Homo sapiens
  Genbank Accession No. M26326
cggggtcgtccgcaaagcctgagtcctgtcctttctctctccccggacagcatgagcttcaccactcgctccaccttctccaccaactaccggtccctgggctctgtccaggcgcccagctacggcgcccggccggtcagcagcgcggccagcgtctatgcaggcgctgggggctctggttcccggatctccgtgtcccgctccaccagcttcaggggcggcatggggtccgggggcctggccaccgggatagccgggggtctggcaggaatgggaggcatccagaacgagaaggagaccatgcaaagcctgaacgaccgcctggcctcttacctggacagagtgaggagcctggagaccgagaaccggaggctggagagcaaaatccgggagcacttggagaagaagggaccccaggtcagagactggagccattacttcaagatcatcgaggacctgagggctcagatcttcgcaaatactgtggacaatgcccgcatcgttctgcagattgacaatgcccgtcttgctgctgatgactttagagtcaagtatgagacagagctggccatgcgccagtctgtggagaacgacatccatgggctccgcaaggtcattgatgacaccaatatcacacgactgcagctggagacagagatcgaggctctcaaggaggagctgctcttcatgaagaagaaccacgaagaggaagtaaaaggcctacaagcccagattgccagctctgggttgaccgtggaggtagatgcccccaaatctcaggacctcgccaagatcatggcagacatccgggcccaatatgacgagctggctcggaagaaccgagaggagctagacaagtactggtctcagcagattgaggagagcaccacagtggtcaccacacagtctgctgaggttggagctgctgagacgacgctcacagagctgagacgtacagtccagtccttggagatcgacctggactccatgagaaatctgaaggccagcttggagaacagcctgagggaggtggaggcccgctacgccctacagatggagcagctcaacgggatcctgctgcaccttgagtcagagctggcacagacccgggcagagggacagcgccaggcccaggagtatgaggccctgctgaacatcaaggtcaagctggaggctgagatcgccacctaccgccgcctgctggaagatggcgaggactttaatcttggtgatgccttggacagcagcaactccatgcaaaccatccaaaagaccaccacccgccggatagtggatggcaaagtggtgtctgagaccaatgacaccaaagttctgaggcattaagccagcagaagcagggtaccctttggggagcaggaggccaataaaaagttcagagttcattggatgtc

SEQ ID NO: 1312 - DNA, 559 bp, Homo sapiens
  Genbank Accession No. M28439
cctcctcttctctctcccacagtcttcacctcctcctcgtcctcttcagccgtcagacccggcccatcctcagagcagagctcatccagcttcagccagggccagagctcctagaactgagctgcctctaccacagcctcctgcccaccagctggcctcacctcctgaaggccccgggtcaggaccctgctctcctggcgcagttcccactatctcccctgctcctctgctgtgtgggctaataaactgactttctgttgatgcaaacctgtgtgatctctgttcttgaacttatgggaggggattgcagtgctttccagaaaccttctgagcctcatagcctgagagatgtgggaaatgggacaaatctcagaagatcttgaagggtcttcctggaagacctccatgctctatggaagtgggaggtgggacacaggatgggggagtgtccacacgtgttgactgacaccatggaggcattctacagaggttatttatgatattgtccttgcaactctgtgaggtgggtatggtcaggcccattttggaattgacaacc

SEQ ID NO: 1313 - DNA, 2136 bp, Homo sapiens
  Genbank Accession No. M29039
cgcgagccgcctcctccccttccccacgctcgaggaggggggcgcgggggcccggctccggcgacggccaatcggagcgcacttccgtggctgactagcgcggtataaaggcgtgtggctcaggctgagcggctgggaccttgagagcggccaggccagcctcggagccagcagggagctgggagctgggggaaacgacgccaggaaagctatcgcgccagagagggcgacgggggctcgggaagcctgacagggcttttgcgcacagctgccggctggctgctacccgcccgcgccagcccccgagaacgcgcgaccaggcacccagtccggtcaccgcagcggagagctcgccgctcgctgcagcgaggcccggagcggccccgcagggaccctccccagaccgcctgggccgcccggatgtgcactaaaatggaacagcccttctaccacgacgactcatacacagctacgggatacggccgggcccctggtggcctctctctacacgactacaaactcctgaaaccgagcctggcggtcaacctggccgacccctaccggagtctcaaagcgcctggggctcgcggacccggcccagagggcggcggtggcggcagctacttttctggtcagggctcggacaccggcgcgtctctcaagctcgcctcttcggagctggaacgcctgattgtccccaacagcaacggcgtgatcacgacgacgcctacacccccgggacagtacttttacccccgcgggggtggcagcggtggaggtgcagggggcgcagggggcggcgtcaccgaggagcaggagggcttcgccgacggctttgtcaaagccctggacgatctgcacaagatgaaccacgtgacaccccccaacgtgtccctgggcgctaccggggggcccccggctgggcccgggggcgtctacgccggcccggagccacctcccgtttacaccaacctcagcagctactccccagcctctgcgtcctcgggaggcgccggggctgccgtcgggaccgggagctcgtacccgacgaccaccatcagctacctcccacacgcgccgcccttcgccggtggccacccggcgcagctgggcttgggccgcggcgcctccaccttcaaggaggaaccgcagaccgtgccggaggcgcgcagccgggacgccacgccgccggtgtcccccatcaacatggaagaccaagagcgcatcaaagtggagcgcaagcggctgcggaaccggctggcggccaccaagtgccggaagcggaagctggagcgcatcgcgcgcctggaggacaaggtgaagacgctcaaggccgagaacgcggggctgtcgagtaccgccggcctcctccgggagcaggtggcccagctcaaacagaaggtcatgacccacgtcagcaacggctgtcagctgctgcttggggtcaagggacacgccttctgaacgtcccctgcccctttacggacaccccctcgcttggacggctgggcacacgcctcccactggggtccagggagcaggcggtgggcacccaccctgggacctaggggcgccgcaaaccacactggactccggccctcctaccctgcgcccagtccttccacctcgacgtttacaagcccccccttccacttttttttgtatgttttttttctgctggaaacagactcgattcatattgaatataatatatttgtgtatttaacagggaggggaagagggggcgatcgcggcggagctggccccgccgcctggtactcaagcccgcggggacattgggaaggggacccccgccccctgccctcccctctctgcaccgtactgtggaaaagaaacacgcacttagtctctaaagagtttattttaagacgtgtttgtgtttgtgtgtgtttgttctttttattgaatctatttaagtaaaaaaaaaattggttctttattaatttctgttgtctttttttccaagctgggagggcggggggaaaaaaaaagcactggtttgcccccagctcagtgctgttggtggctcggtcctgtatgtgtccccctcgtcggttcggcgcaggcatcttgtggtcccagcccaggagtcccacccttcccgcgtccccagat

SEQ ID NO: 1314 - DNA, 2974 bp, Homo sapiens
  Genbank Accession No. M29540
ctcagggcagagggaggaaggacagcagaccagacagtcacagcagccttgacaaaacgttcctggaactcaagctcttctccacagaggaggacagagcagacagcagagaccatggagtctccctcggcccctccccacagatggtgcatcccctggcagaggctcctgctcacagcctcacttctaaccttctggaacccgcccaccactgccaagctcactattgaatccacgccgttcaatgtcgcagaggggaaggaggtgcttctacttgtccacaatctgccccagcatctttttggctacagctggtacaaaggtgaaagagtggatggcaaccgtcaaattataggatatgtaataggaactcaacaagctaccccagggcccgcatacagtggtcgagagataatataccccaatgcatccctgctgatccagaacatcatccagaatgacacaggattctacaccctacacgtcataaagtcagatcttgtgaatgaagaagcaactggccagttccgggtatacccggagctgcccaagccctccatctccagcaacaactccaaacccgtggaggacaaggatgctgtggccttcacctgtgaacctgagactcaggacgcaacctacctgtggtgggtaaacaatcagagcctcccggtcagtcccaggctgcagctgtccaatggcaacaggaccctcactctattcaatgtcacaagaaatgacacagcaagctacaaatgtgaaacccagaacccagtgagtgccaggcgcagtgattcagtcatcctgaatgtcctctatggcccggatgcccccaccatttcccctctaaacacatcttacagatcaggggaaaatctgaacctctcctgccacgcagcctctaacccacctgcacagtactcttggtttgtcaatgggactttccagcaatccacccaagagctctttatccccaacatcactgtgaataatagtggatcctatacgtgccaagcccataactcagacactggcctcaataggaccacagtcacgacgatcacagtctatgcagagccacccaaacccttcatcaccagcaacaactccaaccccgtggaggatgaggatgctgtagccttaacctgtgaacctgagattcagaacacaacctacctgtggtgggtaaataatcagagcctcccggtcagtcccaggctgcagctgtccaatgacaacaggaccctcactctactcagtgtcacaaggaatgatgtaggaccctatgagtgtggaatccagaacgaattaagtgttgaccacagcgacccagtcatcctgaatgtcctctatggcccagacgaccccaccatttccccctcatacacctattaccgtccaggggtgaacctcagcctctcctgccatgcagcctctaacccacctgcacagtattcttggctgattgatgggaacatccagcaacacacacaagagctctttatctccaacatcactgagaagaacagcggactctatacctgccaggccaataactcagccagtggccacagcaggactacagtcaagacaatcacagtctctgcggagctgcccaagccctccatctccagcaacaactccaaacccgtggaggacaaggatgctgtggccttcacctgtgaacctgaggctcagaacacaacctacctgtggtgggtaaatggtcagagcctcccagtcagtcccaggctgcagctgtccaatggcaacaggaccctcactctattcaatgtcacaagaaatgacgcaagagcctatgtatgtggaatccagaactcagtgagtgcaaaccgcagtgacccagtcaccctggatgtcctctatgggccggacacccccatcatttcccccccagactcgtcttacctttcgggagcgaacctcaacctctcctgccactcggcctctaacccatccccgcagtattcttggcgtatcaatgggataccgcagcaacacacacaagttctctttatcgccaaaatcacgccaaataataacgggacctatgcctgttttgtctctaacttggctactggccgcaataattccatagtcaagagcatcacagtctctgcatctggaacttctcctggtctctcagctggggccactgtcggcatcatgattggagtgctggttggggttgctctgatatagcagccctggtgtagtttcttcatttcaggaagactgacagttgttttgcttcttccttaaagcatttgcaacagctacagtctaaaattgcttctttaccaaggatatttacagaaaagactctgaccagagatcgagaccatcctagccaacatcgtgaaaccccatctctactaaaaatacaaaaatgagctgggcttggtggcgcgcacctgtagtcccagttactcgggaggctgaggcaggagaatcgcttgaacccgggaggtggagattgcagtgagcccagatcgcaccactgcactccagtctggcaacagagcaagactccatctcaaaaagaaaagaaaagaagactctgacctgtactcttgaatacaagtttctgataccactgcactgtctgagaatttccaaaactttaatgaactaactgacagcttcatgaaactgtccaccaagatcaagcagagaaaataattaatttcatgggactaaatgaactaatgaggattgctgattctttaaatgtcttgtttcccagatttcaggaaactttttttcttttaagctatccactcttacagcaatttgataaaatatacttttgtgaacaaaaattgagacatttacattttctccctatgtggtcgctccagacttgggaaactattcatgaatatttatattgtatggtaatatagttattgcacaagttcaataaaaatctgctctttgtataacagaaaaa

SEQ ID NO: 1315 - DNA, 2320 bp, Homo sapiens
  Genbank Accession No. M32402
cttcctgaaaggatctggagacaccagctccacaagtcctggtgtctttaaaaggatcagcttgaggaataaggctcgtctgagagctgtgacattcatctgactctagtgaaagtccaacagccactccctttttggcctccaactgggcaccatgagggcctgcatctccctggtattggccgtgctgtgtggcctggcctgggctgaggaccacaaagagtcagagccattgccacagctggaggaagagacagaagaggccctcgccagcaacttgtactcggcacccacctcctgccagggccgctgctacgaagcctttgacaagcaccaccaatgtcactgcaatgcccgctgccaagagtttgggaactgctgcaaggattttgagagcctgtgtagtgaccacgaggtctcccacagcagtgatgccataacaaaagaggagattcagagcatctctgagaagatctacagggcagacaccaacaaagcccagaaggaagacatcgttctcaatagccaaaactgcatctccccgtcagagaccagaaaccaagtggatcgctgcccaaagccactcttcacttatgtcaatgagaagctgttctccaagcccacctatgcagccttcatcaacctcctcaacaactaccagcgggcaacaggccatggggagcacttcagtgcccaggagctggccgagcaggacgccttcctcagagagatcatgaagacagcagtcatgaaggagctctacagcttcctccatcaccagaatcgctatggctcagagcaagagtttgtcgatgacttgaagaacatgtggtttgggctctattcgagaggcaatgaagagggggactcgagtggctttgaacatgtcttctcaggtgaggtaaaaaaaggcaaggttactggcttccataactggatccgcttctacctggaggagaaggagggtctggttgactattacagtcacatctacgatgggccttgggattcttaccccgatgtgctggcaatgcagttcaactgggacggctactataaggaagtgggctctgctttcatcggcagcagccctgagtttgagtttgcactctactccctgtgcttcatcgccaggccaggcaaagtgtgccagttaagcctgggaggatatcccttagctgtccggacatatacctgggacaagtccacctatgggaatggcaagaagtacatcgccacagcctacatagtgtcttccacctaatagaacttcgagccagaaaggggcatgagggctcttgcgagactgaagtgctatcttctctggactagagagaagagggagaggactggaagggatcaccaaatctcaaagcaatgagaagcattcctaaatcccaaagtgcccacatgggaaagagataaaatgtacaaattagaaaaatgtggataaacagtcaaacctttatcctctagaattttggcaatgttgactaagaaacagagtccaagcagagaaggtaggaaccctccatagctctctgccctgatgtgtgggggaactaggaagaagtcctttgacctcaccaggcctcatgcttccctttaatgtaaagggaaggggtttgcccactttcctctttttggggttggtgagagggcaaaccctgatatttttactgtgaaggtgttttcagttgttcttaggaagaacagctgatagaaattcaagattactataatggctgttattatacacagctctgtaaactaccactcagccctgtgttggggtcctcaaagaagtaaggccacagtaatcaagcaagggcctttggttttttccagagttagatcctctcagaacagagtctgggagaactccaatgctgaatggagaagggtaataggttggttgcagtgaatgggctgggggtggggtggccttctccaggcctgagtgtttttgtgtccagctcagtatctgcaacaagaagtttcccacttgtggatgtttagtgcagccacagacttgtattttgatccccaattttttttgaaagagttctcctcataggaggatgattcagcatcagaagaagaaggaacccatagcttggtgtcattaacataattattttaagccttatccagcagccataatttgaataactctacgagaccagagagactgtagttccctattttaacctcaattatgcatttgtccccaaccccactgagaactaaatgctgtaccacagagccgggtgtgaactatggtttagaaggttcaagtttccaattaaagtcattgaag

SEQ ID NO: 1316 - DNA, 1268 bp, Homo sapiens
  Genbank Accession No. M33197
gttcgacagtcagccgcatcttcttttgcgtcgccagccgagccacatcgctcagacaccatggggaaggtgaaggtcggagtcaacggatttggtcgtattgggcgcctggtcaccagggctgcttttaactctggtaaagtggatattgttgccatcaatgaccccttcattgacctcaactacatggtttacatgttccaatatgattccacccatggcaaattccatggcaccgtcaaggctgagaacgggaagcttgtcatcaatggaaatcccatcaccatcttccaggagcgagatccctccaaaatcaagtggggcgatgctggcgctgagtacgtcgtggagtccactggcgtcttcaccaccatggagaaggctggggctcatttgcaggggggagccaaaagggtcatcatctctgccccctctgctgatgcccccatgttcgtcatgggtgtgaaccatgagaagtatgacaacagcctcaagatcatcagcaatgcctcctgcaccaccaactgcttagcacccctggccaaggtcatccatgacaactttggtatcgtggaaggactcatgaccacagtccatgccatcactgccacccagaagactgtggatggcccctccgggaaactgtggcgtgatggccgcggggctctccagaacatcatccctgcctctactggcgctgccaaggctgtgggcaaggtcatccctgagctgaacgggaagctcactggcatggccttccgtgtccccactgccaacgtgtcagtggtggacctgacctgccgtctagaaaaacctgccaaatatgatgacatcaagaaggtggtgaagcaggcgtcggagggccccctcaagggcatcctgggctacactgagcaccaggtggtctcctctgacttcaacagcgacacccactcctccacctttgacgctggggctggcattgccctcaacgaccactttgtcaagctcatttcctggtatgacaacgaatttggctacagcaacagggtggtggacctcatggcccacatggcctccaaggagtaagacccctggaccaccagccccagcaagagcacaagaggaagagagagaccctcactgctggggagtccctgccacactcagtcccccaccacactgaatctcccctcctcacagttgccatgtagaccccttgaagaggggaggggcctagggagccgcaccttgtcatgtaccatcaataaagtaccctgtgctcaacc

SEQ ID NO: 1317 - DNA, 1104 bp, Homo sapiens
  Genbank Accession No. M35252
ctctagagtcgagatccattgtgctctaaagtggatacagaaatctctgcaggcaagttgctccagagcatattgcaggacaagcctgtaacgaatagttaaattcacggcatctggattcctaatccttttccgaaatggcaggtgtgagtgcctgtataaaatattctatgtttaccttcaacttcttgttctggctatgtggtatcttgatcctagcattagcaatatgggtacgagtaagcaatgactctcaagcaatttttggttctgaagatgtaggctctagctcctacgttgctgtggacatattgattgctgtaggtgccatcatcatgattctgggcttcctgggatgctgcggtgctataaaagaaagtcgctgcatgcttctgttgtttttcataggcttgcttctgatcctgctcctgcaggtggcgacaggtatcctaggagctgttttcaaatctaagtctgatcgcattgtgaatgaaactctctatgaaaacacaaagcttttgagcgccacaggggaaagtgaaaaacaattccaggaagccataattgtgtttcaagaagagtttaaatgctgcggtttggtcaatggagctgctgattggggaaataattttcaacactatcctgaattatgtgcctgtctagataagcagagaccatgccaaagctataatggaaaacaagtttacaaagagacctgtatttctttcataaaagacttcttggcaaaaaatttgattatagttattggaatatcatttggactggcagttattgagatactgggtttggtgttttctatggtcctgtattgccagatcgggaacaaatgaatctgtggatgcatcaacctatcgtcagtcaaacccctttaaaatgttgctttggctttgtaaatttaaatatgtaagtgctatataagtcaggagcagctgtctttttaaaatgtctcggctagctagaccacagatatcttctagacatattgaacacatttaagatttgagggatataagggaaaatgatatgaatgtgtatttttactcaaaataaaagtaactgtttaaaaaaaaaaaaaaaaaaaaa

SEQ ID NO: 1318 - DNA, 10884 bp, Homo sapiens
  Genbank Accession No. M35878
ctgcagacctgggacctcaagaattgcatttgatgccgaacccagctctaatttcagagtcaaggtctctgcgagtatttaaggaacggatgtaaacctgggggattcgttttgtttccttcaattttccaatgaaatcagagatcctgttcttgggtgtcaacgcagatactagaaggaggtgatacaagagaaaggaaacagcaagcgacgattatggcacggtttcctgtaaacaaggttgagtgtagccacagcctgagcactgtgggagaagagctcataagaaaatgacggtgctgggccttcgtcaccccggggccctccattgttcttgtctttggtctctttttatttgtagaggtccaattatttatttatttagtacaagagggaacgaaattgatctttccattctaaaaggagagtatatatgtataaaaggaagctgtatagatatgggggaagaggtggacagggggaaaaggggagaggacgagagagagaaagggagggagagggacaaggagagacactgggcgagagatcgattaggagagacagaaatgatgaatgaagattaacttcacccaaggcttcgtcgctggaggggaatggaggagctcctgatttgctattactactccaaactgcaaagggctccttcaagtcacctatccacctcctaaggcaagcgtccaatttcaacagcgttcaggaaagtctcctcccgcggaggtctcaccgcttcccactccacccccacaaactctttggaaaagtgccttgaaaaatttaatcctcaatccaatcctggaccaccagcgtcctctgttggtcaccgaaggagggggtgcgcagacaaaactgaagaaactcgagtgccagagaaggccgacaggagttacagcgacctcagcgcgcaattgcgccccgaactttactgaaaagtgtttagattgcagagataagctagaatcccaacgcatcgagaatacagtaatacgaagtcgccttcaaaaaatgacaatgaaaattgcctattaaaggactatttggttaattacgtttcagcagtgcccagtttattgtctttattattcttttgtcgtgggtgtaaactccatttgaaaacataatcagggagaatacccaagacaagaagaacagttgtcatttaaaatatttgaaaagccctgccttaaggagcattcgcttgccggtccactcttaattggggacttgcggtgtagcaacacgtgagagtcttcttgcgttgagaagtaagcctggaaaggcgaaggccccggggcatcttcagatgcgtatttgtgggcccctggggatataaacagcccagcgggtgtaaattaaaccccgcagtgccttggctccctgagacccaaatgtaagtcagaaatgtcccaagacttcgcctgccaacggaattaaattttagaaagctccacgaggtacacacgaatgcggagcgctgtatgccagtttccccgacaccggctcgccgcagggagacctcaccccgagagcggaaggggtaagggcggcggggtcaaggagatcgggggtgctgagttggccaggagtgactggggtgaccgggggtgctgaggtggcctggagtgccggggtggccgggcacaccttggttcttgtagacgacaaggtgacgggctccgggcgtgagcacgaggagcaggtgcccgggcgagtctcgagctgcacgcccccgagctcggccccggctgctcagggcgaagcacgggccccgcagccgtgcctgcgccgacccgcccccctcccaacccccactcctgggcgcgcgttccggggcgtgtcctgggccaccccggcttctatatacgggccggcgcgcccgggccgcccagatgcgagcactgcggctgggcgctgaggatcagccgcttcctgcctggattccacagcttcgcgccgtgtactgtcgccccatccctgcgcgcccagcctgccaagcagcgtgccccggttgcaggcgtcatgcagcgggcgcgacccacgctctgggccgctgcgctgactctgctggtgctgctccgcgggccgccggtggcgcgggctggcgcgagctcggggggcttgggtcccgtggtgcgctgcgagccgtgcgacgcgcgtgcactggcccagtgcgcgcctccgcccgccgtgtgcgcggagctggtgcgcgagccgggctgcggctgctgcctgacgtgcgcactgagcgagggccagccgtgcggcatctacaccgagcgctgtggctccggccttcgctgccagccgtcgcccgacgaggcgcgaccgctgcaggcgctgctggacggccgcgggctctgcgtcaacgctagtgccgtcagccgcctgcgcgcctacctgctgccagcgccgccagctccaggtgagccgcccgccaggtgcgctgcgtgcagcaccgccactggcgccgaagggcctgggggttgctgggtgccgctgcgggagactccgcttttcttctcactggagataatatgtggggaaactgaaggcgctccgggaaaggtgaaggcggtcgccgagggaccctccccagccggccctctacttgctcgattctctaagtgcagagtacttgtaaattgcaaagcgctttcagtgaaaatgggtaaaggtttccggagctgaggggagcggtaccgatgtttagctgttggaaagatcctggacacaggagattctcctcgccccgcacgggtgcacacggactgcaatcccagggatgcttggggatggggggatataggcggatttggaccaaggaaggtgggtaggcacgttgtaggaaatagtacctctcttttaaaatactgactttgcacagccttttggtttgcaaagcaatgtctagtcccggtatgtccaaaaacaagtaaagtggattcgggttttgatatcttctgcggttggaaaacctgaagctgaaaaagaagtaacttcttaaggttacccagcggccacaacagagtgtaggtttgaactccgcgtgccactttcagtaccataccattcttacaactcgggccacccctgcacctgcgccgacctcaaacaaacttccaggtgcgtggtgggtgcgggcaatgtggactaagtcaatttcaatgacacggcaagggaattggaatcagtcctaggctgtctcccttcttaatctgaaatggggggggggaatgagatgttgttaaggggagccccagaagaggaaaaatgcaaacatttggcagagttaccctcttgcttagccactatcagtatcaggcagacagcgactctggtaagggcatcacattgttcccttaaaaaaaggagcgggggttgtttaaatggatttggcagctgttctttcaagcattcttagccagcctcacctagttatatgagaaataaagttcctgccttgcacagctgaaggctgggagaattctccccatcctaattcccccaactccccaacgatcacgttggacagatgtcactgggcaggcccccatctagggctagcaggatgaacagtccctttataatttatgtagctgtagagttccacgcccgggtgaagttattttctggctcggcaaggctggctctgttcacccctgagaaatgctggattcatggaaaggcaagatgcctgaaacatacactggctctggtcagctgttaaagctgctggaggcatttgtctctcggggcaaagttatgtcatttgccaagtgtcgtacattattgtgcattttggggtattcaaaaagtgatcttagaaatactgatacacatcgtcattcttgggctttagcaatcatcatgattaccaccttagtagcactgtagtataggttgatgtgagttataagattataaaaagatctaagtgacttctagaatctatttgacaaaaaaaggtaaattttcgacagtcaaaagtcacaattatctgttgcttaaatagaactgttttgtcttcatgccctagtctgcagcccaggcattaagaagaaaccaaggaaatttaagaaattactcaaggttcttagaaaagaagtataaatacgtttatttacatgttcttagagtatttacattcttagtatctcttttatctcagtatttccttgaaaaagaaagcaagctaagattaaaagaaattgaaaccaaatcctcgcaggtagggacctcctctgtgaggctctgtgctggaccctgggaatgtgtgcttcccaaggtatgaaaccccttggggaactttacagcaggacctcagtgagctgtttggcaggtgaggaaactaagacccagagaggagagggactttcctaaggccctggtgagtgacctgccagtagccacttccaggggagagcagagcatctgcagccaaatcattgcagccccaggtagctttctagatagactgtggaccagatgggccacctgagctccctgctagggttacacattatagccctgtttgtgtagtagagaaatttcatgactctcaattgtggacttaagccgatgcctccagaccttggcatggtccacaggccctgggagcatgggctctgaatgtagcctttgatccccatagcggtcttacagcccctccaagttcattctgaagaaggaatggagtgagaatcctggctgcagatccagtcttgaatttagtcatatacttaaaattccaattcaactgttaacattccagcatccattttaagcatcagactttcttcatttagcactttttattataaaagggagatctgctggagggggatttctcctaccccacccccacccagggaaggaaaagctctttggcacttagaagtctgagccgtgagtgggactttggcattgtctgcatccatgtgctgctgtgttcacccggggtgaaaaggactcacttaggcaggcaccagcaagatgcacagggtctgtgtagaccttgagttttagagatgtaacggggacctagaaaacaagccaccaacatgcttgcatgattctgagcccctgaggcaaaacgctttgcaggtaataattcagttttcccatctgagctggacaccaagctcttataagcgtgtttacctggtagcattgaggacggtactggtcaaccttggaattcccataagggcttgttacaactcagactcgtgccgccactccagcgtttccggagtggagaatgtgcatttcttccaagtccccgggctgccgctgctcccgcgggtgggaggaccacacttggagttgactgcaaaatttctgagccggcgctgcagcagcctcccgtggctcaggtctgccccctgccggtggaagatgaagcatactgccttcacctactgaggggcactgaagcgtttgtctgccttctttagttgcagctacttaggaagagcacctgtcagattgactttcaaacagataacttcttgaggtagagcaaccaccatgtagtgagtagtatgatggaataatacttcatcgaggtatttaaaaaaaaaacctcacttggattgccaactaatattgtcatttacatgtgacctggttgcaacgttaagatttttacaagactgtgatagatattgatgactctcatgtgtttgtctctcttgggcgttttaaggaaatgctagtgagtcggaggaagaccgcagcgccggcagtgtggagagcccgtccgtctccagcacgcaccgggtgtctgatcccaagttccaccccctccattcaaagataatcatcatcaagaaagggcatgctaaagacagccagcgctacaaagttgactacgagtctcagagcacagatacccagaacttctcctccgagtccaagcgggagacagaatatgtgagagcttttcctcttgttaaaggaggagggcaagacctgccaagcctgggtactcagagcctcttgagggcaattcttactcaacaaaccccagcgcctggctgatgggtgggcaacccctagcccctctgtgccctacctctctcctctccttacataaagaatattgacccttttggagaatcttatgaggatcaagctgaaataacactcttaaaagcatatgggatgtcataaagacctctgcagataatgaaaatattctcataaagatagttttatttacttcatcctctatgcttgttgacctgctattggttccatgccagcttctgtgccttactctgggaagagcaaaaaggagacagggagtgatggttagcttattcgggggactttcgtgctacatcagacataaggtatctgaggagcaaattacaggtcccacttttggtagttgtgcagcatcgtaagatttttaaagcacacattctagagtaaaaactgtgactctgttgctctggtccttcctgatccccagggtccctgccgtagagaaatggaagacacactgaatcacctgaagttcctcaatgtgctgagtcccaggggtgtacacattcccaactgtgacaagaagggattttataagaaaaagcaggtgagtgaggtcctcagtgtgttttcttcctcttctgttgacacagaggagaaacccatgtcaccagcgcccaggctcttgtggccatagctctaactctgagcctgtgcagcaccagtgcccaggacttggtgccagtctcaggaggtcagaccaagggctgctttgacttgttgctctgagtgctgctatattggccataatcctcaaccctagtgcctttccaccacccgcttcccactcctgtcctttcaatggttcacccacaggcggacaagatgctgcccagtggcaccctttataaactgcaagtggacatgttaacacatttgttaatgctgcgtcagggagtgacatttcaaacaactattatagtcagtttccaagaagtgtgacatgaggtcataccacaaaaaagcttaccctgaaatcccacaatcgtcccctttcctactgatgccttcccgatagtgagcaggttgcaatattaagattttgaaaaggctgttgctagatgttggtgactcgtgtgtctctgtctcccttgggcttttcaaggaaatgctagtgagtggggggatgactgcagcatggccagcttggagagcccagccatccccagcacataccaggtgtctgtcttggcgtggaggggatggaacttgaaatcagacactcggtccatgctggggatggccagtctctccaaactggcatgtggtcttcctccgagtcactggcatttccctagaaagtccaagtgagaagaaggcatgagagtcatcaacatcaaacaacagtcttttcaaaatctttatattgcaacatagtcccattcctggaaaaggaatggagtgagaatcctggctacacatcagccccaaatgtagtcattgcctaaaatcccaattaacctgaaaatgatcaaacaaatttaagatatagtaatattaagctgtaataaatatgcttctataggctttgtgttatgtgatggcactatttcaattggctttctaattggacaattgatactatgctatctacagaattggcctttggagacctaagtgagccacagtggcctcagggtgaccatatactaggattcatagcagtggccacagtcagaagcctaagctttcctccattgccattgctcgtttataccacgtttctgtcaaagtcatattcattcaacaaagtcatactgagaaggtgtcatgtgaggctggatgtgggctccaaagtcatagctgtgacattcgcaggcagcgggatgttctcagttccacatttggcagagaagtcagtcaagaggttctacaagggctggtgtccaccttatactcctagaaacacaaaactgcccccacccccgctttcttggagcaggaagttacacccacacgcatgcacaggcgcacactcagcgggcctaggcagcgtggctcttgtgttgccttagctgaaatttctgttgtgctttctcagcatagcagagtcacgctggcaaaccatcatgcgccctggccaccgacctgacaccagacccaggagcattcacttctctgtcttctgtttctctcccacagtgtcgcccttccaaaggcaggaagcggggcttctgctggtgtgtggataagtatgggcagcctctcccaggctacaccaccaaggggaaggaggacgtgcactgctacagcatgcagagcaagtagacgcctgccgcaagggtgagtactcaggaggggcagcctgggctccagggcctcactgtccttggaccagcctcaggggctgggcgtggccactggccttccccaggcttacagacccaggagctgcagctcagggccagaaagagcaaagcaaataggacagagccctcagaagggtgcagggagagggagaccccatcaacccaaccaaacaagtgtggggaaggaggccggccagtgcacctcagggacactctgctttatctcagatacctcacagcacctaagctatcattcatccacacacaaagtgaagattttcaaagttaggctttacccgtgagtctggaggtcatttatcttcacagagaacgtttatcgcagactgctaagatacatgttctaattaagatgtgatgtgagaacgctgaatgctcgttggagactcagttgaagtgcagctttttttctgtcaaatatataatgaatattctgttagtctgtggctaatataattttaataaagttaatttaaatctgatagaaaaatgaaattttaaacgataattttagagaatgctattatatccagtcttcttttttcttttaataaatgagggaactattgggggaaaggaataaatacattttctttcattttattaagacaaatttagtaagcagaagaaatttgcatgtttagttataagggtttcttttttccttacaagttggaaaaaataattctaatttaagggtaactctttgacaatgaacactgtgagcagcatctggtactcgttgctttgtttgaaaacatgagttgagaccccagccgcacttgcagcctagtgccattagcctgcaggctgtgctggatatctcagggcaagagtcgagcccttttgattttggggggattatttcaatatatttgctttttctttttgttttagttaatgtggagctcaaatatgccttattttgcacaaaagactgccaaggacatgaccagcagctggctacagcctcgatttatatttctgtttgtggtgaactgattttttttaaaccaaagtttagaaagaggtttttgaaatgcctatggtttctttgaatggtaaacttgagcatcttttcactttccagtagtcagcaaagagcagtttgaattttcttgtcgcttcctatcaaaatattcagagactcgagcacagcacccagacttcatgcgcccgtggaatgctcaccacatgttggtcgaagcggccgaccactgactttgtgacttaggcggctgtgttgcctatgtagagaacacgcttcacccccactccccgtacagtgcgcacaggctttatcgagaataggaaaacctttaaaccccggtcatccggacatcccaacgcatgctcctggagctcacagccttctgtggtgtcatttctgaaacaagggcgtggatccctcaaccaagaagaatgtttatgtcttcaagtgacctgtactgcttggggactattggagaaaataaggtggagtcctacttgtttaaaaaatatgtatctaagaatgttctagggcactctgggaacctataaaggcaggtatttcgggccctcctcttcaggaatcttcctgaagacatggcccagtcgaaggcccaggatggcttttgctgcggccccgtggggtaggagggacagagagacgggagagtcagcctccacattcagaggcatcacaagtaatggcacaattcttcggatgactgcagaaaatagtgttttgtagttcaacaactcaagacgaagcttatttctgaggataagctctttaaaggcaaagctttattttcatctctcatcttttgtcctccttagcacaatgtaaaaaagaatagtaatatcagaacaggaaggaggaatggcttgctggggagcccatccaggacactgggagcacatagagattcacccatgtttgttgaacttagagtcattctcatgcttttctttataattcacacatatatgcagagaagatatgttcttgttaacattgtatacaacatagccccaaatatagtaagatctatactagataatcctagatgaaatgttagagatgctatatgatacaactgtggccatgactgaggaaaggagctcacgcccagagactgggctgctctcccggaggccaaacccaagaaggtctggcaaagtcaggctcagggagactctgccctgctgcagacctcggtgtggacacacgctgcatagagctctccttgaaaacagaggggtctcaagacattctgcctacctattagcttttctttatttttttaactttttggggggaaaagtatttttgagaagtttgtcttgcaatgtatttataaatagtaaataaagtttttaccattaaaaaaatatctttccctttgttattgaccatctctgggctttgtatcactaattattttattttattatataataattattttattaaaatgttccctgctttcccttttagcaa

SEQ ID NO: 1319 - DNA, 1064 bp, Homo sapiens
  Genbank Accession No. M36821
  unsure (1)..(1064): n = a or c or g or t
cacagccgggtcgcaggcacctccccngccagctctcccgcattctgcacagcttcccgacgcgtctgctgagccccatggcccacgccacgctctccgccgcccccagcaatccccggctcctgcgggtggcgctgctgctcctgctcctggtgggcagccggcgcgcagcaggagcgtccgtggtcactgaactgcgctgccagtgcttgcagacactgcagggaattcacctcaagaacatccaaagtgtgaatgtaaggtcccccggaccccactgcgcccaaaccgaagtcatagccacactcaagaatgggaagaaagcttgtctcaaccccgcatcccccatggttcagaaaatcatcgaaaagatactgaacaaggggagcaccaactgacaggagagaagtaagaagcttatcagcgtatcattgacacttcctgcagggtggtccctgcccttaccagagctgaaaatgaaaaagagaacagcagctttctagggacagctggaaagggacttaatgtgtttgactatttcttacgagggttctacttatttatgtatttatttttgaaagcttgtattttaatattttacatgctgttatttaaagatgtgagtgtgtttcatcaaacatagctcagtcctgattatttaattggaatatgatgggttttaaatgtgtcattaaactaatatttagtgggagaccataatgtgtcagccaccttgataaatgacagggtggggaactggagggtngggggattgaaatgcaagcaattagtggatcactgttagggtaagggaatgtatgtacacatctattttttatacttttttttttaaaaaagaatgtcagttgttatttattcaaattatctcacattatgtgttcaacatttttatgctgaagtttcccttagacattttatgtcttgcttgtagggcataatgccttgtttaatgtccattctgcagcgtttctctttcccttggaaaagagaatttatcattactgttacatttgtacaaatgacatgataataaaagttttatg

SEQ ID NO: 1320 - DNA, 1029 bp, Homo sapiens
  Genbank Accession No. M57399
tctgcttttaataagcttcccaatcagctctcgagtgcaaagcgctctccctccctcgcccagccttcgtcctcctggcccgctcctctcatccctcccattctccatttcccttccgttccctccctgtcagggcgtaattgagtcaaaggcaggatcaggttccccgccttccagtccaaaaatcccgccaagagagccccagagcagaggaaaatccaaagtggagagaggggaagaaagagaccagtgagtcatccgtccagaaggcggggagagcagcagcggcccaagcaggagctgcagcgagccgggtacctggactcagcggtagcaacctcgccccttgcaacaaaggcagactgagcgccagagaggacgtttccaactcaaaaatgcaggctcaacagtaccagcagcagcgtcgaaaatttgcagctgccttcttggcattcattttcatactggcagctgtggatactgctgaagcagggaagaaagagaaaccagaaaaaaaagtgaagaagtctgactgtggagaatggcagtggagtgtgtgtgtgcccaccagtggagactgtgggctgggcacacgggagggcactcggactggagctgagtgcaagcaaaccatgaagacccagagatgtaagatcccctgcaactggaagaagcaatttggcgcggagtgcaaataccagttccaggcctggggagaatgtgacctgaacacagccctgaagaccagaactggaagtctgaagcgagccctgcacaatgccgaatgccagaagactgtcaccatctccaagccctgtggcaaactgaccaagcccaaacctcaagcagaatctaagaagaagaaaaaggaaggcaagaaacaggagaagatgctggattaaaagatgtcacctgtggaacataaaaaggacatcagcaaacaggatcagttaactattgcatttatatgtaccgtaggctttgtattcaaaaattatctatagctaagtacacaataagcaaaaacaa

SEQ ID NO: 1321 - DNA, 2368 bp, Homo sapiens
  Genbank Accession No. M57951
acagtcagctgtcggtggcttctgctgagatggccagaggactccaggttcccctgccgcggctggccacaggactgctgctcctcctcagtgtccagccctgggctgagagtggaaaggtgttggtggtgcccactgatggcagcccctggctcagcatgcgggaggccttgcgggagctccatgccagaggccaccaggcggtggtcctcaccccagaggtgaatatgcacatcaaagaagagaaatttttcaccctgacagcctatgctgttccatggacccagaaggaatttgatcgcgttacgctgggctacactcaagggttctttgaaacagaacatcttctgaagagatattctagaagtatggcaattatgaacaatgtatctttggcccttcataggtgttgtgtggagctactgcataatgaggccctgatcaggcacctgaatgctacttcctttgatgtggttttaacagaccccgttaacctctgcggggcggtgctggctaagtacctgtcgattcctgctgtgtttttttggaggtacattccatgtgacttagactttaagggcacacagtgtccaaatccttcctcctatattcctaagttactaacgaccaattcagaccacatgacattcctgcaaagggtcaagaacatgctctaccctctggccctgtcctacatttgccatactttttctgccccttatgcaagtcttgcctctgagctttttcagagagaggtgtcagtggtggatcttgtcagctatgcatccgtgtggctgttccgaggggactttgtgatggactaccccaggccgatcatgcccaacatggtcttcattgggggcatcaactgtgccaacgggaagccactatctcaggaatttgaagcctacattaatgcttctggagaacatggaattgtggttttctctttgggatcaatggtctcagaaattccagagaagaaagctatggcaattgctgatgctttgggcaaaatccctcagacagtcctgtggcggtacactggaacccgaccatcgaatcttgcgaacaacacgatacttgttaagtggctaccccaaaacgatctgcttggtcacccgatgacccgtgcctttatcacccatgctggttcccatggtgtttatgaaagcatatgcaatggcgttcccatggtgatgatgcccttgtttggtgatcagatggacaatgcaaagcgcatggagactaagggagctggagtgaccctgaatgttctggaaatgacttctgaagatttagaaaatgctctaaaagcagtcatcaatgacaaaagttacaaggagaacatcatgcgcctctccagccttcacaaggaccgcccggtggagccgctggacctggccgtgttctgggtggagtttgtgatgaggcacaagggcgcgccacacctgcgccccgcagcccacgacctcacctggtaccagtaccattccttggacgtgattggtttcctcttggccgtcgtgctgacagtggccttcatcacctttaaatgttgtgcttatggctaccggaaatgcttggggaaaaaagggcgagttaagaaagcccacaaatccaagacccattgagaagtgggtgggaaataaggtaaaattttgaaccattccctagtcatttccaaacttgaaaacagaatcagtgttaaattcattttattcttattaaggaaatactttgcataaattaatcagccccagagtgctttaaaaaattctcttaaataaaaataatagactcgctagtcagtaaagatatttgaatatgtatcgtgccccctccggtgtctttgatcaggatgacatgtgccatttttcagaggacgtgcagacaggctggcattctagattacttttcttactctgaaacatggcctgtttgggagtgcgggattcaaaggtggtcccaccgctgcccctactgcaaatggcagttttaatcttatcttttggcttctgcagatggttgcaattgatccttaaccaataatggtcagtcctcatctctgtcctgcttcataggtgccaccttgtgtgtttaaagaagggaagctttgtacctttagagtgtaggtgaaatgaatgaatggcttggagtgcactgagaacagcatatgatttcttgctttggggaaaaagaatgatgctatgaaattggtgggtggtgtatttgagaagataatcattgcttatgtcaaatggagctgaatttgataaaaacccaaaatacagctatgaagtgctgggcaagtttactttttttctgatgtttcctacaactaaaaataaattaataaatttataaa

SEQ ID NO: 1322 - DNA, 1206 bp, Homo sapiens
  Genbank Accession No. M58525
gaattcccgccattgccgccatcgtcgtggggcttctggggcagctagggctggccgcgctgcctgcgccggaccggggcgggtccagtcccgggcgggccgtcgcgggagagaaataacatctgctttgctgccgagctcagaggagaccccagacccctcccgcagccagagggctggagcctgctcagaggtgctttgaagatgccggaggccccgcctctgctgttggcagctgtgttgctgggcctggtgctgctggtggtgctgctgctgcttctgaggcactggggctggggcctgtcgcttatcggctggaacgagttcatcctgcagcccatccacaacctgctcatgggtgacaccaaggagcagcgcatcctgaaccatgtgctgcagcatgcggagcccgggaacgcacagagcgtgctggaggccattgacacctactgcgagcagaaggagtgggccatgaacgtgggcgacaagaaaggcaagatcgtggacgccgtgattcaggagcaccagccctccgtgctgctggagctgggggcctactgtggctactcagctgtgcgcatggcccgcctgctgtcaccaggggcgaggctcatcaccatcgagatcaaccccgactgtgccgccatcacccagcggatggtggatttcgctggcatgaaggacaaggtcacccttgtggttggagcgtcccaggacatcatcccccagctgaagaagaagtatgatgtggacacactggacatggtcttcctcgaccactggaaggaccggtacctgccggacacgcttctcttggaggaatgtggcctgctgcggaaggggacagtgctactggctgacaacgtgatctgcccaggtgcgccagacttcctagcacacgtgcgcgggagcagctgctttgagtgcacacactaccaatcgttcctggaatacagggaggtggtggacggcctggagaaggccatctacaagggcccaggcagcgaagcagggccctgactgccccccccggcccccctctcgggctctctcacccagcctggtactgaaggtgccagacgtgctcctgctgaccttctgcggctccgggctgtgtcctaaatgcaaagcacacctcgccgagcctgcgccctgacatgctaacctctctgaactgcaacactggattgttcttttttaagactc

SEQ ID NO: 1323 - DNA, 1163 bp, Homo sapiens
  Genbank Accession No. M60047
ctctacctgacacagctgcagcctgcaattcactcccactgcctgggattgcactggatccgtgtgctcagaacaaggtgaacgcccagctgcagccatgaagatctgtagcctcaccctgctctccttcctcctactggctgctcaggtgctcctggtggaggggaaaaaaaaagtgaagaatggacttcacagcaaagtggtctcagaacaaaaggacactctgggcaacacccagattaagcagaaaagcaggcccgggaacaaaggcaagtttgtcaccaaagaccaagccaactgcagatgggctgctactgagcaggaggagggcatctctctcaaggttgagtgcactcaattggaccatgaattttcctgtgtctttgctggcaatccaacctcatgcctaaagctcaaggatgagagagtctattggaaacaagttgcccggaatctgcgctcacagaaagacatctgtagatattccaagacagctgtgaaaaccagagtgtgcagaaaggattttccagaatccagtcttaagctagtcagctccactctatttgggaacacaaagcccaggaaggagaaaacagagatgtcccccagggagcacatcaagggcaaagagaccaccccctctagcctagcagtgacccagaccatggccaccaaagctcccgagtgtgtggaggacccagatatggcaaaccagaggaagactgccctggagttctgtggagagacttggagctctctctgcacattcttcctcagcatagtgcaggacacgtcatgctaatgaggtcaaaagagaacgggttcctttaagagatgtcatgtcgtaagtccctctgtatactttaaagctctctacagtccccccaaaatatgaacttttgtgcttagtgagtgcaacgaaatatttaaacaagttttgtattttttgcttttgtgttttggaatttgccttatttttcttggatgcgatgttcagaggctgtttcctgcagcatgtatttccatggcccacacagctatgtgtttgagcagcgaagagtctttgagctgaatgagccagagtgataatttcagtgcaacgaactttctgctgaattaatggtaataaaactctgggtgtttttcaaaaaaaaaaaaaaaaa

SEQ ID NO: 1324 - DNA, 2930 bp, Homo sapiens
  Genbank Accession No. M60502
ggccactctgcagacagctccagacaatcaggcactcgtcacacagagtcttcctctcgtggacaggctgcgtcatcccatgaacaggcaagatcaagtgcaggagaaagacatggatcccaccaccagcagtcagcagacagctccagacacgcaggcattgggcacggacaagcttcatctgcagtcagagacagtggacaccgagggtacagaggtagtcaggccactgacagtgagggacattcagaagactcagacacacagtcagtgtcagcacagggacaagctgggccccatcagcagagccaccaagagtccgcacgtggccagtcaggggaaagctctggacgttcagggtctttcctctaccaggtgagcactcatgaacagtctgagtccacccatggacagtctgtgcccagcactggaggaagacaaggatcccaccatgatcaggcacaagacagctccaggcactcagcatcccaagagggtcaggacaccattcgtggacacccggggccaagcagaggaggaagacaggggtcccaccacgagcaatcggtagataggtctggacactcagggtcccatcacagccacaccacatcccagggaaggtctgatgcctcccgtgggcagtcaggatccagaagtgcaagcagacaaacacatgaccaggaacaatcaggagacggctctaggcactcagggtcgcgtcatcaggaagcttcctcttgggccgacagctctagacactcacaggcagtccagggacaatcagaggggtccaggacaagcaggcgccagggatccagtgttagccaggacagtgacagtcagggacactcagaagactctgagaggcggtctgggtctgcttccagaaaccatcgtggatctgctcaggagcagtcaagagatggctccagacaccccaggtcccatcacgaagacagagccggtcacggggactctgcagagagctccagacaatcaggcactcatcatgcagagaattcctctggtggacaggctgcatcatcccatgaacaggcaagatcaagtgcaggagagagacatggatcccactaccagcagtcagcagacagctccagacactcaggcattgggcacggacaagcttcatctgcagtcagagacagtggacaccgagggtccagtggtagtcaggccagtgacaatgagggacattcagaagactcagacacacagtcagtgtcagcccaccgacaggctgggcgccatcacgagagccaccaagagtccacacgtggccggtcacgaggaaggtctggacgttcagggtctttcctctaccaggtgagcactcatgaacagtctgagtctgcccatggacgggctgggcccagtactggaggaagacaaggatcccgccacgagcaggcacgagacagctccaggcactcagcgtcccaagagggtcaggacaccattcgtggacacccggggtcaaggagaggaggaagacagggatcctaccacgagcaatcggtagataggtctggacactcagggtcccatcacagccacaccacatcccagggaaggtctgatgcctcccatgggcagtcaggatccagaagtgcaagcagagaaacacgtaatgaggaacagtcaggagacggctccaggcactcagggtcgcgtcaccatgaagcttccactcaggctgacagctctagacactcacagtccggccagggtgaatcagcggggtccaggagaagcaggcgccagggatccagtgttagccaggacagtgacagtgaggcatacccagaggactctgagaggcgatctgagtctgcttccagaaaccatcatggatcttctcgggagcagtcaagagatggctccagacaccccggatcctctcaccgcgatacagccagtcatgtacagtcttcacctgtacagtcagactctagtaccgctaaggaacatggtcactttagtagtctttcacaagattctgcgtatcactcaggaatacagtcacgtggcagtcctcacagttctagttcttatcattatcaatctgagggcactgaaaggcaaaaaggtcaatcaggtttagtttggagacatggcagctatggtagtgcagattatgattatggtgaatccgggtttagacactctcagcacggaagtgttagttacaattccaatcctgttcttttcaaggaaagatctgatatctgtaaagcaagtgcgtttggtaaagatcatccaaggtattatgcaacgtatattaataaggacccaggtttatgtggccattctagtgatatatcgaaacaactgggatttagtcagtcacagagatactattactatgagtaagaaattaatggcaaaggaattaatccaagaatagaagaatgaagcaagttcactttcaatcaagaaacttcataatactttcagggaagttatcttttcctgtcaatctgtttaaaatatgctatagtatttcattagtttggtggtaacttatttttattgtgtaatgatctttaaacgctatatttcagaaatattaaatggaagaaatcaatatcatggagagctaactttagaaaactagctggagtattttaggagattctgggtcaagtaatgttttatgtttttgaaagtttaagttttagacactccccaaatttctaaattaatctttttcagaaatatcgaaggagccaaaaatataaaacagttctgatatccaaagtggctatatcaacatcagggctagcacatctttctctattatccttctattggaattctagtattctgtattcaaaaaatcatcttggacataattaatattttagtaagctgcatctaaattaaaaataaactattcatcatataat

SEQ ID NO: 1325 - DNA, 2348 bp, Homo sapiens
  Genbank Accession No. M62982
cccgggaatcgcacaggacccggctcccctcgcctaagctgctggggggcgccatgggccgctaccgcatccgcgtggccaccggggcctggctcttctccgggtcgtacaaccgcgtgcagctttggctggtcgggacgcgcggggaggcggagctggagctgcagctgcggccggcgcggggcgaggaggaggagtttgatcatgacgttgcagaggacttggggctcctgcagttcgtgaggctgcgcaagcaccactggctggtggacgacgcgtggttctgcgaccgcatcacggtgcagggccctggagcctgcgcggaggtggccttcccgtgctaccgctgggtgcagggcgaggacatcctgagcctgcccgagggcaccgcccgcctgccaggagacaatgctttggacatgttccagaagcatcgagagaaggaactgaaagacagacagcagatctactgctgggccacctggaaggaagggttacccctgaccatcgctgcagaccgtaaggatgatctacctccaaatatgagattccatgaggagaagaggctggactttgaatggacactgaaggcaggggctctggagatggccctcaaaccgtgtttacacctcctgagctcctggaactgcctagaagactttgatcagatcttctggggccagaagagtgccctggctgagaaggttcgccagtgctggcaggatgatgagttgttcagctaccagttcctcaatggtgccaaccccatgctgttgagacgctcgacctctctgccctccaggctagtgctgccctcggggatggaagagcttcaggctcaactggagaaagaacttcagaatggttccctgtttgaagctgacttcatccttctggatggaattccagccaacgtgatccgaggagagaagcaatacctggctgcccccctcgttatgctgaagatggagcccaatgggaagctgcagcccatggtcatccagattcagcctcccagccccagctctccaaccccaacactgttcctgccctcagaccccccacttgcctggctcctggccaaatgctgggtccgaaattcagatttccaactgcacgagatccagtatcacttgctgaacactcacctggtggctgaggtcatcgctgtcgccaccatgcggtgcctcccaggactgcaccccatcttcaagttcctgatcccccatatccgctacaccatggaaatcaacacccgggcccggacccaactcatctcagatggaggaatttttgataaggcagtgagcacaggtggagggggccatgtacagttgctccgtcgggcggcagctcagctgacctactgctccctctgtcctcctgacgacctggctgaccggggcctgctgggactcccaggtgctctctatgcccatgatgctttacggctctgggagatcattgccaggtatgtggaggggatcgtccacctcttctaccaaagggatgacatagtgaagggggaccctgagctgcaggcctggtgtcgggagatcacggaggtggggctgtgccaggcccaggaccgaggtttccctgtctccttccagtcccagagtcaactctgccatttcctcaccatgtgcgtcttcacgtgcactgcccagcatgccgccatcaaccagggccagctggactggtatgcctgggtccctaatgctccatgcacaatgcggatgcccccacccaccaccaaggaagatgtgacgatggccacagtgatggggtcactacctgatgtccggcaggcctgtcttcaaatggccatctcatggcatctgagtcgccgccagccagacatggtgcctctggggcaccacaaagaaaaatatttctcaggccccaagcccaaagctgtgctaaaccaattccgaacagatttggaaaagctagaaaaggagattacagcccggaatgagcaacttgactggccctatgaatatctgaagcccagctgcatagagaacagtgtcaccatctgagccctagagtgactctacctgcaagatttcacatcagctttaggactgacatttctatcttgaatttcatgctttcctaaagtctctgctgctaaggctctatttcctcccccagttaaaccccctacattagtatcccactagcccaggggagcagtaaactttctctgcaaagactagatccttttttacgctttgcagaccgcatagtcactgtctcaactactcagctctcctgctgcagcatgaaggcagccacagacaacatggaaatgagtgtgactatgttccaataaaacttta

SEQ ID NO: 1326 - DNA, 11990 bp, Homo sapiens
  Genbank Accession No. M63391
ctgcagatggatggtggggatagttgtacaacaatgtgaatgtacttgacgccactgaactgtatactaaaaaatggctcaaatggtgaattttattttatgtatattttatcacaatgtaaaagtgactcagctgtcaatgtactaaaatggaaccatctctaacgtgtatgtcattgaaaaaagattgattcagaagtagggggctcacataagaaaatgtggttgtgtgtacatgaatgtactctgaaggaaccagtaacaaccaaaacctggttgtctctgaagcagtgtttggggtggctgggtgtcaaagggggaaggagacttacttttcattttatgcctttttgcacatcttgaattttgtaccatatacactacccatccaaatcccttgtcggtatttttagtgtgtcccatccgagtggtcctctcggaggctgaactctccctccagcggtgctgcccagctcacagcatgttttggagtgctcctctttcacctgccttccaagcctcgggtgtgatttgcagccctccatggtagcaaatcctcaggggcgaactgaattttgaaaacctcccaagtggttcgggccaagtctggtggttgttgattttgactagagattagatggcatgatatttgtcttctgcctcttttcaccaaggaactgaggacttgggctggtccaaaggccatttccttatgtggtctggagactattcacagagaagagctccagaaatgttgtcccagtagcatcatagaaataggtgtagagtccccttcaggaagattaatctggttctttgggctgtaagtgatcaaagcaataccaaatgccttaaattaaaaaaaaaaaaaaaaaaaaacggaaagtttgttgccaaggccaggaaggacagtgtgggagctcaactcacaaagttgagggaagcactgcaggaaccaaggggctggcctgctcctcctctccagcctcctctgcttcttacatattgacctctctttcttcctactcccccagggggcaggaaacatggcttccacaggttccagttgaagaatcccagttccgtctataaattccagggaaggtctctgattggccctactcattcccaggcccattccttgacccagtcactgaagtcagggagatgcagtaataagactggctggaatcagggtctttaggggtggagggatggggaggaggcacagcatgtcatcaaaataaggaaattgcaaaagaaagcttgcaggctactttgaatgacaatgagaaagacggtgctgcctgagtgtgttaaggatccacatggtctccaaaatcctccaggagcatacagtctagtctgggagatgagacacaaaaataaccagaacacaacagcttgcactgactcgagggctggataagaatatctggaactcccccatctatttcagaagcttgtctcttggatgaaaattagacacttaatgggaaagggctttgaaaagagtgcagtaacaaagccccctttacaatttacccggcacattcacacccatcctgaggccaaagccacaggctgtgaggtctcactgtctcagcttcctgagctataaaatgggaatgatgctagtctctacctcctagggttggagaattgggggtcatgggtgtgaagtgctcagcagcttggcccacactaggtggtcagtacatgtaaggtattattgttgctacatacattagtagggcctgggcctctttaaacctttatagggtagcatggcaaggctaaccatcctcactttatatctgacaagctggggctcagagaggacgtgcctgagctggggctcagacaaggacacacctactagtaacccctccagctggtgatggcaggtctagggtaggaccagtgactggctcctaatcgagcactctattttcaggtttgcattgcaaaagggtcagtccaagagggacctggagagccaagtggaggtgtagagcacggccagtacccatggagaatggtggatgtccttaggggttagcaagtgccgtgtgctaaggagggggctttggaggttggcaggccctctgtggggctccatttttgtgggggtgggggctggagcattatagggggtgggaagtgattggggctgtcaccctagccttccttatctgacgcccacccatgcctcctcaggtacccccctgcccccacagctcctctcctgtgccttgtttcccagccatgcgttctcctctataaatacccgctctggtatttggggttggcagctgttgctgccagggagatggttgggttgacatgcggctcctgacaaaacacaaacccctggtgtgtgtgggcgtgggtggtgtgagtagggggatgaatcagggagggggcgggggacccagggggcaggagccacacaaagtctgtgcgggggtgggagcgcacatagcaattggaaactgaaagcttatcagaccctttctggaaatcagcccactgtttataaacttgaggccccaccctcgacagtaccggggaggaagagggcctgcactagtccagagggaaactgaggctcagggccagctcgcccatagacatacatggcagctttggccaggatccctccgcctgccaggctctccctgccctcccttcctgcctagagacccccaccctcaagcctggctggtctttgcctgagacccaaacctcttcgacttcaagagaatatttaggaacaaggtggtttagggcctttcctgggaacaggccttgaccctttaagaaatgacccaaagtctctccttgaccaaaaaggggaccctcaaactaaagggaagcctctcttctgctgtctcccctgaccccactcccccccaccccaggacgaggagataaccagggctgaaagaggccgctgggggctgcagacatgcttgctgcctgccctggcgaaggattggtaggcttgccgtcacaggacccccgctggctgactcaggggcgcaggctcttgcgggggagctggcctcccgcccccacggccacgggccctttcctggcaggacagcgggatcttgcagctgtcaggggaggggaggcgggggctgatgtcaggagggatacaaatagtgccgacggctgggggccctgtctcccctcgccgcatccactctccggccggccgcctgcccgccgcctcctccgtgcgcccgccagcctcgcccgcgccgtcaccatgagccaggcctactcgtccagccagcgcgtgtcctcctaccgccgcaccttcggcggcgccccggtcttctcgctcggctccccgctgagctcgcccgtgttcccgcgggcgcctttcggctctaagggctcctccagctcggtgacgtcccgcgtgtaccaggtgtcgcgcacgtcgggaggggccgggggcctggggtcgctgcgggccagccggctggggaccacccgcacgccctcctcctacggcgcaggcgagctgctggacttctcactggccgacgcggtgaaccaggagtttctgaccacgcgcaccaacgagaaggtggagctgcaggagctcaatgaccgttcgccaatctacatggagaaggtgcgcttcctggagcagcagaacgcgctcgccgccgaagtgaaccggctcaagggccgcgagccgacgcgagtggccgagctctacgaggaggagctgcgggagctgcggcgccaggtggaggtgctcactaaccagcgcgcgcgcgtcgacgtcgagcgcgacaacctgctcgacgacctgcagcggctcaaggccaagtgagggcccggcaccccagactcctctttctgcgggcagggcacaggaggctaggcctgggggctggggtcccgctgtcaccacctgccttctcccggggcccgaccgctcctcccccatgtggagaaagggtcctccacctgtgtgtttcaaggggccgtgacctccaggtctctccccctgcgatcccatcttgccacaggagttttcttggggacatagatcagggggtggatatgggagaatttaggggacccggtgccctgtggacagccccgttaaaaagcattttaagatgctggggcgatatttatggggtcaggtagttgatgggcagaggaagggctgcaggaggcccagagcgagtgtagccagagggagaagggaggctgataggagacagggaaagcagggcaagggccagagtccaagcaacagctctcagtctcagcgttgatgaggccctgggggaggtggggggaggggggagcttggccctggggcttgccgagactgtgtctttttacaaggtgaatggacaggctggagaaaaagggagtaggtgggggtcacagctctcagagagcttgggaggacctgactgtagacttcaccaggctccaagaacgaaaagggcagcaagtgtagcatatttcgctctggtcccacttctgacaggccaagtgagcacagtcaccctcctgccaccaaagtcataaatattaattgagcagctatatggccaggctggagctgggaaccagaaacacagaggtggataaaatagacacagtttctagagacccagggaggtcacacagtctggtggggacatagacttcaagggtgtggctcctgggcagagattgggccacttcctctgccctctctgggtgggtggggcctctccactccctgtctctcctgcctctacccagcagccaggccctccccctctgtcctggacccaccccctggtcagccccgccagtcgtttccactgccagctttatcacccgcaactgtctgtctttctgtctgtcccacccaggctgcaggaggagattcagttgaaggaagaagcagagaacaatttggctgccttccgagcggtgagtgcccttcttttccccttgcatggcctctcgcgtttgctctgccccacctgggtcgcggagaccatgtccttctcgcttggcctctcccaggacgtggatgcagctactctagctcgcattgacctggagcgcagaattgaatctctcaacgaggagatcgcgttccttaagaaagtgcatgaagaggtatacttggcccctcttcctggggtcactgggccattggggaaagcagccggaaagtggggtttggggtgaggctctggctgggaataggggtgtgagggtcgtgtgtgggccctgagagggactgaagcccagtcatgccctacaggagatccgtgagttgcaggctcagcttcaggaacagcaggtccaggtggagatggacatgtctaagccagacctcactgccgccctcagggatatccgggctcagtatgagaccatcgcggctaagaacatttctgaagctgaggagtggtacaagtcgaaggtgggtggcctcgcccggggactgggatctccgtccccctggaatcccaaggcctttggattgttgcttgcctgtggtaccatccatgggaggagagcccagaggttcatgctcccaagctcatccctacccgtgccctgcatccttctcatttttgggcccctttctctgcccttaggtgtcagacctgacccaggcagccaacaagaacaacgacgccctgcgccaggccaagcaggagatgatggaataccgacaccagatccagtcctacacctgcgagattgacgccctcaagggcactgtgagtccctgcccacctgggccaggccctgccccttctctgtctgcagttcacaccctcactttgtgaccttggccatcatagatcctctctggccttcatctacttaaatctacaatagggtaaaaccagacaagtggattccagttggatgctaaggaatcaggggttcctgggcatctacctatgtggggacttgtgaggctgatgcaatgttcctttgtatctattttattctgagtgttccacatatagcttaatttgagttcagggttcaacatggccaggacctgaccattctggggttgcctgccagccccaaagctttctttgggctgctagtgtcctcttcccttccttgacctgggttccccctctcctgcagaacgattccctgatgaggcagatgcgggaattggaggaccgatttgccagtgaggccagtggctaccaggacaacattgcacgcctggaggaggaaatccggcacctcaaggatgagatggcccgccatctgcgcgagtaccaggacctgctcaacgtgaagatggccctggatgtggagattgccacctaccggaagctgctggagggagaggagagccggtgaggggccaggcaggagccgagtgggaggtgcggggtgctgggtggtccatttctgtccccaggaggctcgagattactgattacctcaacaagacctggaaacaattttttttttttttgagatggagtttcgctcttgtcgcccagtctggagtgcaatggcaccatcttggctcactgcaacctccgcctcctgggttcaagcaattctcctgcctcagcttcccgagcagctgggattacaggcgcctaccaccacacctggctaatttttgtatttttagtagagaggggtttcactatgttgggcagctggtctcgaactcctgacctcaggtgatctgcctacctcagcctccaaagtactgggattacaggcgtgcgccgcgcccggcgtggaaacaattttatacaagaggccactgctctataaccgcagagaattaaccaaggccacctgggtaaaaagcaatttaattaacagcatttataaaaagagaaatataagtattcccttatccaccttcagaattaagaaccagcagcaaaaaaaaccatattcagcaaccaataataaaatattactgccagtcaagggagagatgaaagcagaatggggagtatgaggagggaaacggagggagcagatagaggcaaatagagagagggagggagagaccttcacagggataggctaagagaaggtaaagagatgcatacagaaggcatgagtttgcacacacatgcacacatgtcagcatatcacatgtcggaggaaaagacacagacgatatgctcagagcaacccactctagacacagaaacacatacactggaagggacaccagggaactgtcggatacagaatgtctatatcttttttttttttttttgagcagagtctgctctgtacagccgctaggtagcgtgtgtatctccctacactgcaacctgctcctcccaggctcaagcgctctcctgtctcagcctccctgtagctggatacaggatcgacagtgccaacacactcagactcgattttttgtatttttagtagagatgaggtttcaccatgttggtcaggctggactctaactcctgacctcaagtaattcgcctgcctcagcctcccaaagtgctgggattataggcatgagccactgtgcctggcctagaaatgttctatatcttgatttggactggtagttacacagacgtggacattgatcaaaactcattgaattgtacattaaagatctgtgcatttcactgtatgtaaatttaacctcaatttaaaacagatcagttactccaaaaactggtaccccttgatactcataaaaataactatctgaaatttttaaaaaggagcagacatgtttagatacaggtacaaacataaagagaaacttcagattttgtaaaatcacgtctacatatgatggcctttgaaggtagctaaaggcatgttgcattttcccagcattaggcctaaatagtaagctctcagaactggctggctggagggtgggcatgagcaatggatatcacccacagctgctactagtaccaacttcagtgccaggagcaagaaggaaatcctggtgctcttgagggtgcggtggggttgcacatccttagtgtcgcgcaacgcagttcacagttgaaataatgatccttccagaagagactatccctggggacagctctagctggcttcgaccccattccttagcagtatgggtggtgggagtgctggggtcgtgggactgggacagctgaggatggtgtttagaaaggaccaggtgagccttgatgggcgtgcagggaaagatcgggaggtctttttttttttttttagacagggcttgttctgtaccccaggctggagtgcagtggtgcaactccgctcactgcaagctccacctcctgggttcgcaccattctcctgcctcaccctcctgagtatctggaactacaggtgcccgccaccatgcccggctaatttttgtatttttagtagagacggggtttcactgtgttagccaggatggtctcgatctcctgacctggtgatccgcccgcctcggccttccaaagtgctgggattacagctgggcccggccgatgggagggttcttaactcttaggaggttttgtctcttcccttttaggatcaatctccccatccagacctactctgccctcaacttccgaggtgagtgtctgctggaggcggaggctggagttgcaggggccaggagtccagcatgggcactgcccaaggccagccaggagggaggatgggaccctggggctagggacagacctgagctagggaagaaaagggaccactgcgggtaggtcggggagtttaggtagaggtggatgaggcaacttatgacagagagagctttttatgtgattatattgtattgtatttaccatgtcccctgcaccttcttggagtattgggcctcagaagcagcctctgttctgaatcccaaactcatcccaaactctgaaagcaggagtgtccttggggccctggcttcaggagcatctcataccacctgccctctaagacacccacagcccattgtctgtttggcacattgccaagccccaccttggctgcttgtcgaacacctccagtttgttggagcaagatgttggatgcacgtttggaaaaaaatgccaaatcttagcaaagccaaacaatgaaaagaaagagctcttagggcactctgccattttgacattagtaatacgcagatcgggtggctttccaaccccagagagcagagaaacacaggataatgatgcattaggaaagcaagtcggagtccttggcagcttctcctttcctagatcaaaccttttctatcttcgatgtacatttccatcaggaaaaaaaacgcgctgcgtccagcgagtcacaacattcatcacaggctggttgctagctaaggaaattcgtaagcaccaaactcataataccaaggacctccatttgacctttcctacacaactcagagcctctcttttcagttagttgtttatacagacaccaagtatgagtcttgcatttaaaacttcatagtacaaaaaactccacccacattgcacagtgcttttccaaatcaatagctttgtggccatgataaggttggtaccacttcactccgtgtcctcagtgaggaaactgaggcacagaatggcaagtgactgagcatcagcacaatgagtcagtgccttattcctgctctgtctcacttaagacatcaagttgctcatctgaattttttttttcttttgaaacggagtctcgctctgtcgcccaggctggagtgcagtggtgcaatctcggctcaccgcaacctccgtcctcccaggttcaagcaattctcctgcctcagcctcctgagtagctgggattacaggcatgtgcaccagtccccctaattttgtatttttagtagagacgggttcacatgttggtcagggtggtctggaactcctggtactcatgatccactgccttggtccaaactactggcattacagatgtgaccaaccgcacctggccctgaaatcttaaagggagataggtactgtaaggtcctctaaagagtgtcttgagactgggctttggggttctatcttgaagaaggggagtcccaggagacaaatgtgtgcagggctctcctggggcctgggggtggagaggaactaggagggatggggaatgtcagtgctgtgcagcctgggcctcaggtgtcccctaccctcctgcaccatcctgcacatggagcaaatctgttggctcctgagaccatctaaactatgggacaggcgctgggggctgcagctgggtgctgggctgaaggaaaggtgttaaagtcttgaagaagtaacaagcctgtcttgagggggttggggtctgctagggctctgccaatgtggccccagatggactcccagcccctggtatagcccagcctggacttggtcaggctgagtgtgcgatggaccctgttacagaaaccagccctgagcaaaggggttctgaggtccataccaagaagacggtgatgatcaagaccatcgagacacgggatggggaggtaagtggtctgtctgggctccttacccttggttggggctatggatgtgtctggggggactgtcttccaccagctgtgcaggtctaggtcctggctagtgggcaagagagatcctgcgatcctgggtgggatgcctaggctgacgtcatcctgctagcacatgtgactggactcctctccccaggtcgtcagtgaggccacacagcagcagcatgaagtgctctaaagacgagagaccctctgccaccagagaccgtcctcacccctgtcctcactgctccctgaagcccagccttcttccgatcccaggacaccacacccagcctcagtcctccaaatcacagcctctgacccctcctcactggccatccctcgtggtccccaacagcgacatagcccatccctgcctggtcacaggcatgccccggccacctctgcggaccccagctgtgagccttggctgttggcagtgagtgagcctggctcttgtgctggatggagcccaggcgggagcggtggccctgtccctcccacctctgtgacctcaggcctacgctttggctctggagatagccccagagcagggtgttgggatactgcagggccaggactgagccccgcagacctccccagcccctagcccaggagagagaaagccaggcaggtagcctgggggactagccctgtggagactggggggcttgaaattgtccccgtggtctcttactttcctttccccagcccagggtggacttagaaagcaggggctacaagagggaatccccgaaggtgctggaggtgggagcaggagattgagaaggagagaaagtgggtgagatgctggagaagagaggagaggagagaggcagagagcggtctcaggctggtgggaggggcgcccacctccccacgccctccccccccctgctgcaggggctctggagagaaacaataaagagattcacacacaagccaagctggcccctgttgtcttgactgccaggtctcctgtgggtcccctggccggtgtgatacaacctgtcaccctgagatggactatactgaccttctacccagccagacttttcccagggcctcgcgccacttctgttcccagagccacctggccttgatgtctgtatgcagtgtatgggggtggaggggctggacagggcttttgttggggaaccacaaatacctctgcttaggccccagttccaggactgcaccccttgtgctctctactacaccttcaggtcagccaggctgggggacaccacctgctattccttttgaaggatgtacctgctccccactgactggctctgaagtagggctcccccagtcccttcttcaaagatgccaagagcccctttttttctctctctctttttttctttttgagatggagtcttgctgtgtcacccaggctggagtgcagcagtgtgatcaccgcttactgcagcctggacttcctgagctc

SEQ ID NO: 1327 - DNA, 2060 bp, Homo sapiens
  Genbank Accession No. M63904
tgttcccagcactcaagccttgccaccgccgagccgggcttcctgggtgtttcaggcaaggaagtctaggtccctggggggtgacccccaaggaaaaggcagcctccctgcgcacccggttgcccggagccctctccagggccggctgggctgggggttgccctggccagcaggggcccgggggcgatgccacccggtgccgactgaggccaccgcaccatggcccgctcgctgacctggcgctgctgcccctggtgcctgacggaggatgagaaggccgccgcccgggtggaccaggagatcaacaggatcctcttggagcagaagaagcaggaccgcggggagctgaagctgctgcttttgggcccaggcgagagcgggaagagcaccttcatcaagcagatgcggatcatccacggcgccggctactcggaggaggagcgcaagggcttccggcccctggtctaccagaacatcttcgtgtccatgcgggccatgatcgaggccatggagcggctgcagattccattcagcaggcccgagagcaagcaccacgctagcctggtcatgagccaggacccctataaagtgaccacgtttgagaagcgctacgctgcggccatgcagtggctgtggagggatgccggcatccgggcctgctatgagcgtcggcgggaattccacctgctcgattcagccgtgtactacctgtcccacctggagcgcatcaccgaggagggctacgtccccacagctcaggacgtgctccgcagccgcatgcccaccactggcatcaacgagtactgcttctccgtgcagaaaaccaacctgcggatcgtggacgtcgggggccagaagtcagagcgtaagaaatggatccattgtttcgagaacgtgatcgccctcatctacctggcctcactgagtgaatacgaccagtgcctggaggagaacaaccaggagaaccgcatgaaggagagcctcgcattgtttgggactatcctggaactaccctggttcaaaagcacatccgtcatcctctttctcaacaaaaccgacatcctggaggagaaaatccccacctcccacctggctacctatttccccagtttccagggccctaagcaggatgctgaggcagccaagaggttcatcctggacatgtacacgaggatgtacaccgggtgcgtggacggccccgagggcagcaagaagggcgcacgatcccgacgccttttcagccactacacatgtgccacagacacacagaacatccgcaaggtcttcaaggacgtgcgggactcggtgctcgcccgctacctggacgagatcaacctgctgtgacccaggccccacctggggcaggcggcaccggcgggcgggtgggaggtgggagtggctgcagggaccctagtgtcctggtctatctctccagcctcggcccacacgcaagggagtcgggggacggcccgctgctggccgctctcttctctgcctctcaccaggacagccgccccccagggtactcctgcccttgcttgactcagtttccctcctttgaaagggaaggagcaaaacggccatttgggatgccagggtggatgaaaaggtgaagaaatcaggggattgagacttgggtgggtgggcatctctcaggagccccatctccgggcgtgtcacctcctgggcagggttctgggaccctctgtgggtgacgcacaccctgggatggggctagtagagccttcaggcgccttcgggcgtggactctggcgcactctagtggacaggagaaggaacgccttccaggaacctgtggactaggggtgcagggacttccctttgcaaggggtaacagaccgctggaaaacactgtcactttcagagctcggtggctcacagcgtgtcctgccccggtttgcggacgagagaaatcgcggcccacaagcatcccccatcccttgcaggctgggggctgggcatgctgcatcttaaccttttgtatttattccctcaccttctgcagggctccgtgcgggctgaaattaaagatttcttag

SEQ ID NO: 1328 - DNA, 1493 bp, Homo sapiens
  Genbank Accession No. M63959
tgagcgggggatgatggcgccgcggagggtcaggtcgtttctgcgcgggctcccggcgctgctactgctgctgctcttcctcgggccctggcccgctgcgagccacggcggcaagtactcgcgggagaagaaccagcccaagccgtccccgaaacgcgagtccggagaggagttccgcatggagaagttgaaccagctgtgggagaaggcccagcgactgcatcttcctcccgtgaggctggccgagctccacgctgatctgaagatacaggagagggacgaactcgcctggaagaaactaaagcttgacggcttggacgaagatggggagaaggaagcgagactcatacgcaacctcaatgtcatcttggccaagtatggtctggacggaaagaaggacgctcggcaggtgaccagcaactccctcagtggcacccaggaagacgggctggatgaccccaggctggaaaagctgtggcacaaggcgaagacctctgggaaattctccggcgaagaactggacaagctctggcgggagttcctgcatcacaaagagaaagttcacgagtacaacgtcctgctggagaccctgagcaggaccgaagaaatccacgagaacgtcattagcccctcggacctgagcgacatcaagggcagcgtcctgcacagcaggcacacggagctgaaggagaagctgcgcagcatcaaccagggcctggaccgcctgcgcagggtcagccaccagggctacagcactgaggctgagttcgaggagcccagggtgattgacctgtgggacctggcgcagtccgccaacctcacggacaaggagctggaggcgttccgggaggagctcaagcacttcgaagccaaaatcgagaagcacaaccactaccagaagcagctggagattgcgcacgagaagctgaggcacgcagagagcgtgggcgacggcgagcgtgtgagccgcagccgcgagaagcacgccctgctggaggggcggaccaaggagctgggctacacggtgaagaagcatctgcaggacctgtccggcaggatctccagagctcggcacaacgaactctgaaggcactggggagcccagcccggcagggaagaggccagcgtgaaggacctgggctcttggccgtggcatttccgtggacagcccgccgtcagggtggctggggctggcacgggtgtcgaggcaggaaggattgtttctggtgactgcagccgctgccgtcgcgacacagggcttggtggtggtagcatttgggtctgagatcggcccagctctgactgaaggggcttggcttccactcagcatcagcgtggcagtcaccaccccagtgaggacctcgatgtccagctgctgtcaggtctgatagtcctctgctaaaacaacacgatttacataaaaaatcttacacatctgccaccggaaataccatgcacagagtccttaaaaaatagagtgcagtatttaaacc

SEQ ID NO: 1329 - DNA, 3829 bp, Homo sapiens
  Genbank Accession No. M64347
aaggatggcacagggctggtgccctcggagcgtgtcctggtggggccccagcggctgcaggtgctgaatgcctcccacgaggactccggggcctacagctgccggcagcggctcacgcagcgcgtactgtgccacttcagtgtgcgggtgacagacgctccatcctcgggagatgacgaagacggggaggacgaggctgaggacacaggtgtggacacaggggccccttactggacacggcccgagcggatggacaagaagctgctggccgtgccggccgccaacaccgtccgcttccgctgcccagccgctggcaaccccactccctccatctcctggctgaagaacggcagggagttccgcggcgagcaccgcattggaggcatcaagctgcggcatcagcagtggagcctggtcatggaaagcgtggtgccctcggaccgcggcaactacacctgcgtcgtggagaacaagtttggcagcatccggcagacgtacacgctggacgtgctggagcgctccccgcaccggcccatcctgcaggcggggctgccggccaaccagacggcggtgctgggcagcgacgtggagttccactgcaaggtgtacagtgacgcacagccccacatccagtggctcaagcacgtggaggtgaatggcagcaaggtgggcccggacggcacaccctacgttaccgtgctcaagacggcgggcgctaacaccaccgacaaggagctagaggttctctccttgcacaacgtcacctttgaggacgccggggagtacacctgcctggcgggcaattctattgggttttctcatcactctgcgtggctggtggtgctgccagccgaggaggagctggtggaggctgacgaggcgggcagtgtgtatgcaggcatcctcagctacggggtgggcttcttcctgttcatcctggtggtggcggctgtgaccgtctgccgcctgcgcagcccccccaagaaaggcctgggctcccccaccgtgcacaagatctcccgcttcccgctcaagcgacaggtgtccctggagtccaacgcgtccatgagctccaacacaccactggtgcgcatcgcaaggctgtcctcaggggagggccccacgctggccaatgtctccgagctcgagctgcctgccgaccccaaatgggagctgtctcgggcccggctgaccctgggcaagccccttggggagggctgcttcggccaggtggtcatggcggaggccatcggcattgacaaggaccgggccgccaagcctgtcaccgtagccgtgaagatgctgaaagacgatgccactgacaaggacctgtcggacctggtgtctgagatggagatgatgaagatgatcgggaaacacaaaaacatcatcaacctgctgggcgcctgcacgcagggcgggcccctgtacgtgctggtggagtacgcggccaagggtaacctgcgggagtttctgcgggcgcggcggcccccgggcctggactactccttcgacacctgcaagccgcccgaggagcagctcaccttcaaggacctggtgtcctgtgcctaccaggtggcccggggcatggagtacttggcctcccagaagtgcatccacagggacctggctgcccgcaatgtgctggtgaccgaggacaacgtgatgaagatcgcagacttcgggctggcccgggacgtgcacaacctcgactactacaagaagacaaccaacggccggctccccgtgaagtggatggcgcctgaggccttgtttgaccgagtctacactcaccagagtgacgtctggtcctttggggtcctgctctgggagatcttcacgctggggggctccccgtaccccggcatccctgtggaggagctcttcaagctgctgaaggagggccaccgcatggacaagcccgccaactgcacacacgacctgtacatgatcatgcgggagtgctggcatgccgcgccctcccagaggcccaccttcaagcagctggtggaggacctggaccgtgtccttaccgtgacgtccaccgacgagtacctggacctgtcggcgcctttcgagcagtactccccgggtggccaggacacccccagctccagctcctcaggggacgactccgtgtttgcccacgacctgctgcccccggccccacccagcagtgggggctcgcggacgtgaagggccactggtccccaacaatgtgaggggtccctagcagcccaccctgctgctggtgcacagccactccccggcatgagactcagtgcagatggagagacagctacacagagctttggtctgtgtgtgtgtgtgtgcgtgtgtgtgtgtgtgtgcacatccgcgtgtgcctgtgtgcgtgcgcatcttgcctccaggtgcagaggtaccctgggtgtccccgctgctgtgcaacggtctcctgactggtgctgcagcaccgaggggcctttgttctggggggacccagtgcagaatgtaagtgggcccacccggtgggaccccgtggggcagggagctgggcccgacatggctcggcctctgcctttgcaccacgggacatcacagggtgcgctcggcccctcccacacccaaagctgagcctgcagggaagccccacatgtccagcaccttgtgcctggggtgttagtggcaccgcctccccacctccaggctttcccacttcccaccctgcccctcagagactgaaattacgggtacctgaagatgggagcctttaccttttatgcaaaaggtttattccggaaactagtgtacatttctataaatagatgctgtgtatatggtatatatacatatatatatataacatatatggaagaggaaaaggctggtacaacggaggcctgcgaccctgggggcacaggaggcaggcatggccctgggcggggcgtgggggggcgtggagggaggccccaggggtctcacccatgcaagcagaggaccagggctttttctggcaccgcagttttgttttaaaactggacctgtatatttgtaaagctatttatgggcccctggcactcttgttcccacaccccaacacttccagcatttagctggccacatggcggagagttttaatttttaacttattgacaaccgagaaggtttatcccgccgatagagggacggccaagaatgtacgtccagcctgccccggagctggaggatcccctccaagcctaaaaggttgttaatagttggaggtgattccagtgaagatattttatttgctttgtcctttttcaggagaattagatttctataggatttttctttaggagatttattttttggacttcaaagcaagctggtattttcatacaaattcttctaattgctgtgtgtcccaggcagggagacggtttccagggaggggccggccctgtgtgcaggttccgatgttattagatgttacaagtttatatatatctatatatataatttattgagtttttacaagatgtatttgttgtagacttaacacttcttacgcaatgcttctagagttttatagcctggactgctacctttcaaagcttggagggaagccgtgaattcagttggttcgttctgtactgttactgggccctgagtctgggcagctgtcccttgcttgcctgcagggccatggctcagggtggtctcttcttggggcccagtgcatggtggccagaggtgtcacccaaaccggcaggtgcgattttgttaacccagcgacgaactttccgaaaaataaagacacctggttgctaacctgaaaaaaaaaaaaaaaaaaaaaaaaaaaaaa

SEQ ID NO: 1330 - DNA, 1119 bp, Homo sapiens
  Genbank Accession No. M69023
acaactactcagactgggaaaatacagattggttcaaagaaaccaaaaaccagagtgtccctcttagctgctgcagagagactgccagcaattgtaatggcagcctggcccacccttccgacctctatgctgaggggtgtgaggctctagttgtgaagaagctacaagaaatcatgatgcatgtgatctgggccgcactggcatttgagctattcagctgctgggcatgctgtgtgcttgcatcgtgttgtgcagaaggagtagagatcctgcttacgagctcctcatcactggcggaacctatgcatagttgacaactcaagcctgagctttttggtcttgttctgatttggaaggtgaattgagcaggtctgctgctgttggcctctggagttcatttagttaaagcacatgtacactggtgttggacagagcagcttggcttttcatgtgcccacctacttacctactacctgcgactttctttttccttgttctagctgactcttcatgcccctaagattttaagtacgatggtgaacgcttctaatttcagaaccaattgcgagtcatgtagtgtggtagaattaaaggaggacacgagcctgcttctgttacctccaagtggtaacaggactgatgccgaaatgtcaccaggtcctttcagtcttcacagtggagaactcttggccaaaggtttttggggggaggaggaggaaaccagctttctggttaaggttaacaccagatggtgcccctcattggtgtccttttaaaaaatatttactgtagtccaataagatagcagctgtacaaaatgactaaaatagattgtaggatcatatggcgtatatcttggttcatcttgaaaatcagagactgagctttgaaactagtggtttttaatcaaagttggctttataggaggagtataatgtatgcactactgttttaaaagaattagtgtgagtgtgtttttgtatgaatgagcccattcatggtaagtcttaagcttgttggaaataatgtacccatgtagactagcaaaatagtatgtagatgtgatctcagttgtaaatagaaaaatctaattcaataaactctgtatcagcccccaac

SEQ ID NO: 1331 - DNA, 8930 bp, Homo sapiens
  Genbank Accession No. M69225
gaattccggaaagaaagaacatcgtttcaggaataaaaatgcacagtagtagttatagttaccgtagcagtgattctgtgtttagtaacactaccagcactcgaaccagtcttgattcaaatgaaaatcttctcttggttcattgtggtccaacactgatcaactcttgcattagcttcggcagtgaatcctttgatggacacaggttagaaatgttgcaacagattgccaacagagttcagagggacagtgtcatctgtgaagacaaactgattcttgctggaaatgctcttcagtctgattctaaaagattagaatcaggagtgcagtttcagaatgaagcagaaattgctgggtatatacttgaatgtgagaaccttttacgccagcatgtaattgatgtacagattcttattgatggaaaatactaccaggcagatcaattggtacagagggttgcaaaactgcgtgacgaaattatggccttaaggaacgaatgttcttctgtgtacagcaaaggacgcatactgacaacagaacagacaaagctcatgatatcaggaatcactcaaagtttaaactcaggatttgcacagaccttacaccctagtctgacctcagggctgacccagagtttaacaccttccctaacctcttctagtatgacttctggcctgtcatcagggatgacttcccgcctgactccatctgtcactccagcttatacacctggtttcccatcaggattagttccaaatttcagttcaggagtagagccaaattcattgcaaactttgaagttgatgcagatccgaaaaccccttctaaagtcttctttgctggatcaaaatttaacagaagaagaaatcaatatgaaatttgttcaggatcttttgaattgggttgatgagatgcaggtacaactggaccgcactgagtggggctcagatttgccaagtgttgaaagccatttagaaaatcataaaaatgttcatagagctattgaagaatttgaatctagtctcaaagaagctaaaatcagtgagattcaaatgacagcacctcttaaactgacttatgcagaaaagttgcacagattagagagtcagtatgcaaaactcttgaatacatccaggaatcaagaacggcaccttgatacactccataattttgtaagtcgtgcgactaatgaacttatttggttgaatgaaaaagaagaggaggaagttgcttatgactggagtgagagaaacaccaacatagctaggaaaaaagattatcatgctgaattaatgagagaacttgatcaaaaggaagaaaatattaaatcagttcaggagatagcagagcagctacttctagaaaatcatccagcccggttaactattgaggcctacagagcggcaatgcagacgcagtggagctggatcttacagctctgccagtgtgtggagcagcacataaaggagaacacagcgtatttcgagtttttcaatgatgccaaagaagctactgattacttaaggaatctaaaagatgccattcagcggaagtacagctgtgatagatcaagcagcattcacaagctagaagaccttgttcaggaatcaatggaagagaaagaagaacttctgcagtacaaaagcactatagcaaacctaatgggaaaagcaaaaacaataattcaactgaagccaaggaattctgactgtccactcaaaacttctattccgatcaaagctatctgtgactacagacaaattgagataaccatttacaaagacgatgaatgtgttttggcaaataactctcatcgtgctaaatggaaggtcattagtcctactgggaatgaggctatggtcccatctgtgtgcttcaccgttcctccaccaaacaaagaagcggtggaccttgccaacagaattgagcaacagtatcagaatgtcctgactctttggcatgagtctcacataaacatgaagagtgtagtatcctggcattatctcatcaatgaaattgatagaattcgagctagcaatgtggcttcaataaagacaatgctacctggtgaacatcagcaagttctaagtaatctacaatctcgttttgaagattttctggaagatagccaggaatcccaagtcttttcaggctcagatataacacaactggaaaaggaggttaatgtatgtaagcagtattatcaagaacttcttaaatctgcagaaagagaggagcaagaggaatcagtttataatctctacatctctgaagttcgaaacattagacttcggttagagaactgtgaagatcggctgattagacagattcgaactcccctggaaagagatgatttgcatgaaagtgtgttcagaatcacagaacaggagaaactaaagaaagagctggaacgacttaaagatgatttgggaacaatcacaaataagtgtgaggagtttttcagtcaagcagcagcctcttcatcagtccctaccctacgatcagagcttaatgtggtccttcagaacatgaaccaagtctattctatgtcttccacttacatagataagttgaaaactgttaacttggggttaaaaaacactcaagctgcagaagccctcgtaaaactctatgaaactaaactgtgtgaagaagaagcagttatagctgacaagaataatattgagaatctaataagtactttaaagcaatggagatctgaagtagatgaaaagagacaggtattccatgccttagaggatgagttgcagaaagctaaagccatcagtgatgaaatgtttaaaacgtataaagaacgggaccttgattttgactggcacaaagaaaaagcagatcaattagttgaaaggtggcaaaatgttcatgtgcagattgacaacaggttacgggacttagagggcattggcaaatcactgaagtactacagagacacttaccatcctttagatgattggatccagcaggttgaaactactcagagaaagattcaggaaaatcagcctgaaaatagtaaaaccctagccacacagttgaatcaacagaagatgctggtgtccgaaatagaaatgaaacagagcaaaatggacgagtgtcaaaaatatgcagaacagtactcagctacagtgaaggactatgaattacaaacaatgacctaccgggccatggtagattcacaacaaaaatctccagtgaaacgccgaagaatgcagagttcagcagatctcattattcaagagttcatggacctaaggactcgatatactgccctggtcactctcatgacacaatatattaaatttgctggtgattcattgaagaggctggaagaggaggagattaaaaggtgtaaggagacttctgaacatggggcatattcagatctgcttcagcgtcagaaggcaacagtgcttgagaatagcaaacttacaggaaagataagtgagttggaaagaatggtagctgaactaaagaaacaaaagtcccgagtagaggaagaacttccgaaggtcagggaggctgcagaaaatgaattgagaaagcagcagagaaatgtagaagatatctctctgcagaagataagggctgaaagtgaagccaagcagtaccgcagggaacttgaaaccattgtgagagagaaggaagccgctgaaagagaactggagcgggtgaggcagctcaccatagaggccgaggctaaaagagctgccgtggaagagaacctcctgaattttcgcaatcagttggaggaaaacacctttaccagacgaacactggaagatcatcttaaaagaaaagatttaagtctcaatgatttggagcaacaaaaaaataaattaatggaagaattaagaagaaagagagacaatgaggaagaactcttgaagctgataaagcagatggaaaaagaccttgcatttcagaaacaggtagcagagaaacagttgaaagaaaagcagaaaattgaattggaagcaagaagaaaaataactgaaattcagtatacatgtagagaaaatgcattgccagtgtgtccgatcacacaggctacatcatgcagggcagtaacgggtctccagcaagaacatgacaagcagaaagcagaagaactcaaacagcaggtagatgaactaacagctgccaatagaaaggctgaacaagacatgagagagctgacatatgaacttaatgccctccagcttgaaaaaacgtcatctgaggaaaaggctcgtttgctaaaagataaactagatgaaacaaataatacactcagatgccttaagttggagctggaaaggaaggatcaggcggagaaagggtattctcaacaactcagagagcttggtaggcaattgaatcaaaccacaggtaaagctgaagaagccatgcaagaagctagtgatctcaagaaaataaagcgcaattatcagttagaattagaatctcttaatcatgaaaaagggaaactacaaagagaagtagacagaatcacaagggcacatgctgtagctgagaagaatattcagcatttaaattcacaaattcattcttttcgagatgagaaagaattagaaagactacaaatctgccagagaaaatcagatcatctaaaagaacaatttgagaaaagccatgagcagttgcttcaaaatatcaaagctgaaaaagaaaataatgataaaatccaaaggctcaatgaagaattggagaaaagtaatgagtgtgcagagatgctaaaacaaaaagtagaggagcttactaggcagaataatgaaaccaaattaatgatgcagagaattcaggcagaatcagagaatatagttttagagaaacaaactatccagcaaagatgtgaagcactgaaaattcaggcagatggttttaaagatcagctacgcagcacaaatgaacacttgcataaacagacaaaaacagagcaggattttcaaacaaaaattaaatgcctagaagaagacctggcgaaaagtcaaaatttggtaagtgaatttaagcaaaagtgtgaccaacagaacattatcatccagaataccaagaaagaagttagaaatctgaatgcggaactgaatgcttccaaagaagagaagcgacgcggggagcagaaagttcagctacaacaagctcaggtgcaagagttaaataacaggttgaaaaaagtacaagacgaattacacttaaagaccatagaggagcagatgacccacagaaagatggttctgtttcaggaagaatctggtaaattcaaacaatcagcagaggagtttcggaagaagatggaaaaattaatggagtccaaagtcatcactgaaaatgatatttcaggcattaggcttgactttgtgtctcttcaacaagaaaactctagagcccaagaaaatgctaagctttgtgaaacaaacattaaagaacttgaaagacagcttcaacagtatcgtgaacaaatgcagcaagggcagcacatggaagcaaatcattaccaaaaatgtcagaaacttgaggatgagctgatagcccagaagcgtgaggttgaaaacctgaagcaaaaaatggaccaacagatcaaagagcatgaacatcaattagttttgctccagtgtgaaattcaaaaaaagagcacagccaaagactgtaccttcaaaccagattttgagatgacagtgaaggagtgccagcactctggagagctgtcctctagaaacactggacaccttcacccaacacccagatcccctctgttgagatggactcaagaaccacagccattggaagagaagtggcagcatcgggttgttgaacagatacccaaagaagtccaattccagccaccaggggctccactcgagaaagagaaaagccagcagtgttactctgagtacttttctcagacaagcaccgagttacagataacttttgatgagacaaaccccattacaagactgtctgaaattgagaagataagagaccaagccctgaacaattctagaccacctgttaggtatcaagataacgcatgtgaaatggaactggtgaaggttttgacacccttagagatagctaagaacaagcagtatgatatgcatacagaagtcacaacattaaaacaagaaaagaacccagttcccagtgctgaagaatggatgcttgaagggtgcagagcatctggtggactcaagaaaggggatttccttaagaagggcttagaaccagagaccttccagaactttgatggtgatcatgcatgttcagtcagggatgatgaatttaaattccaagggcttaggcacactgtgactgccaggcagttggtggaagctaagcttctggacatgagaacaattgagcagctgcgactcggtcttaagactgttgaagaagttcagaaaactcttaacaagtttctgacgaaagccacctcaattgcagggctttacctagaatctacaaaagaaaagatttcatttgcctcagcggccgagagaatcataatagacaaaatggtggctttggcatttttagaagctcaggctgcaacaggttttataattgatcccatttcaggtcagacatattctgttgaagatgcagttcttaaaggagttgttgaccccgaattcagaattaggcttcttgaggcagagaaggcagctgtgggatattcttattcttctaagacattgtcagtgtttcaagctatggaaaatagaatgcttgacagacaaaaaggtaaacatatcttggaagcccagattgccagtgggggtgtcattgaccctgtgagaggcattcgtgttcctccagaaattgctctgcagcaggggttgttgaataatgccatcttacagtttttacatgagccatccagcaacacaagagttttccctaatcccaataacaagcaagctctgtattactcagaattactgcgaatgtgtgtatttgatgtagagtcccaatgctttctgtttccatttggggagaggaacatttccaatctcaatgtcaagaaaacacatagaatttctgtagtagatactaaaacaggatcagaattgaccgtgtatgaggctttccagagaaacctgattgagaaaactatatatcttgaactttcagggcagcaatatcagtggaaggaagctatgttttttgaatcctatgggcattcttctcatatgctgactgatactaaaacaggattacacttcaatattaatgaggctatagagcagggaacaattgacaaagccttggtcaaaaagtatcaggaaggcctcatcacacttacagaacttgctgattctttgctgagccggttagtccccaagaaagatttgcacagtcctgttgcagggtattggctgactgctagtggggaaaggatctctgtactaaaagcctcccgtagaaatttggttgatcggattactgccctccgatgccttgaagcccaagtcagtacagggggcataattgatcctcttactgtcaaaaagtaccgggtggccgaagctttgcatagaggcctggttgatgaggggtttgcccagcagctgcgacagtgtgaattagtaatcacagggattggccatcccatcactaacaaaatgatgtcagtggtggaagctgtgaaggcaaatattataaataaggaaatgggaatccgatgtttggaatttcagtacttgacaggagggttgatagagccacaggttcactctcggttatcaatagaagaggctctccaagtaggtattatagatgtcctcattgccacaaaactcaaagatcaaaagtcatatgtcagaaatataatatgccctcagacaaaaagaaagttgacatataaagaagccttagaaaaacctgattttgatttccacacaggacttaaactgttagaagtatctgagcccctgatgacaggaatttctagcctctactattcttcctaatgggacatgtttaaataactgtgcaaggggtgatgcaggctggttcatgccactttttcagagtatgatgatatcggctacatatgcagtctgtgaattatgtaacatactctatttcttgagggctgcaaattgctaagtgctcaaaatagagtaagttttaaattgaaaattacataagatttaatgcccttcaaatggtttcatttagccttgagaatggttttttgaaacttggccacactaaaatgtttttttttttacgtagaatgtgggataaacttgatgaactccaagttcacagtgtcatttcttcagaactccccttcattgaatagtgatcatttattaaatgataaattgcactcgctgaaagagcacgtcatgaagcaccatggaatcaaagagaaagatataaattcgttcccacagccttcaagctgcagtgttttagattgcttcaaaaaatgaaaaagttttgcctttttctgtatatagtgaccttctttgcatattaaaatgtttaccacaatgtcccatttctagttaagtcttcgcacttgaaagctaacattatgaatattatgtgttggaggaggggaaggattttcttcattctgtgtattttccttacatgtacagtagacgttctctattctatcagccttctatggtacctttttgtcaggacaattaggattgtaatgctaatgcaaaggcagcaattcaaagatcttctagtgcctcatgaataaagttgagatttaaaatttgtaacattgatggaacagctgggaggttagaccaatcattaaggaatgtatgccatacctttctttgctaccataaacattttggaggtgcatctgctatgtgacatggtaaatatggttaagtgaatgaataaaatgttttagtaacctgtgtcggattccgcggaat

SEQ ID NO: 1332 - DNA, 1636 bp, Homo sapiens
  Genbank Accession No. M74542
ccaggagccccagttaccgggagaggctgtgtcaaaggcgccatgagcaagatcagcgaggccgtgaagcgcgcccgcgccgccttcagctcgggcaggacccgtccgctgcagttccgattccagcagctggaggcgctgcagcgcctgatccaggagcaggagcaggagctggtgggcgcgctggccgcagacctgcacaagaatgaatggaacgcctactatgaggaggtggtgtacgtcctagaggagatcgagtacatgatccagaagctccctgagtgggccgcggatgagcccgtggagaagacgccccagactcagcaggacgagctctacatccactcggagccactgggcgtggtcctcgtcattggcacctggaactaccccttcaacctcaccatccagcccatggtgggcgccatcgctgcagggaacgcagtggtcctcaagccctcggagctgagtgagaacatggcgagcctgctggctaccatcatcccccagtacctggacaaggatctgtacccagtaatcaatgggggtgtccctgagaccacggagctgctcaaggagaggttcgaccatatcctgtacacgggcagcacgggggtggggaagatcatcatgacggctgctgccaagcacctgacccctgtcacgctggagctgggagggaagagtccctgctacgtggacaagaactgtgacctggacgtggcctgccgacgcatcgcctgggggaaattcatgaacagtggccagacctgcgtggccccagactacatcctctgtgacccctcgatccagaaccaaattgtggagaagctcaagaagtcactgaaagagttctacggggaagatgctaagaaatcccgggactatggaagaatcattagtgcccggcacttccagagggtgatgggcctgattgagggccagaaggtggcttatgggggcaccggggatgccgccactcgctacatagcccccaccatcctcacggacgtggacccccagtccccggtgatgcaagaggagatcttcgggcctgtgctgcccatcgtgtgcgtgcgcagcctggaggaggccatccagttcatcaaccagcgtgagaagcccctggccctctacatgttctccagcaacgacaaggtgattaagaagatgattgcagagacatccagtggtggggtggcggccaacgatgtcatcgtccacatcaccttgcactctctgcccttcgggggcgtggggaacagcggcatgggatcctaccatggcaagaagagcttcgagactttctctcaccgccgctcttgcctggtgaggcctctgatgaatgatgaaggcctgaaggtcagataccccccgagcccggccaagatgacccagcactgaggaggggttgctccgcctggcctggccatactgtgtcccatcggagtgcggaccaccctcactggctctcctggccctggagaatcgctcctgcagccccagcccagccccactcctctgctgacctgctgacctgtgcacaccccactcccacatgggcccaggcctcaccattccaagtctccacccctttctagaccaataaagagacaaatacaattttctaactcgg

SEQ ID NO: 1333 - DNA, 1930 bp, Homo sapiens
  Genbank Accession No. M76180
ggagagagagaggacagagagcaagtcactcccggctgcctttttcacctctgacagagcccagacaccatgaacgcaagtgaattccgaaggagagggaaggagatggtggattacgtggccaactacatggaaggcattgagggacgccaggtctaccctgacgtggagcccgggtacctgcggccgctgatccctgccgctgcccctcaggagccagacacgtttgaggacatcatcaacgacgttgagaagataatcatgcctggggtgacgcactggcacagcccctacttcttcgcctacttccccactgccagctcgtacccggccatgcttgcggacatgctgtgcggggccattggctgcatcggcttctcctgggcggcaagcccagcatgcacagagctggagactgtgatgatggactggctcgggaagatgctggaactaccaaaggcatttttgaatgagaaagctggagaagggggaggagtgatccagggaagtgccagtgaagccaccctggtggccctgctggccgctcggaccaaagtgatccatcggctgcaggcagcgtccccagagctcacacaggccgctatcatggagaagctggtggcttactcatccgatcaggcacactcctcagtggaaagagctgggttaattggtggagtgaaattaaaagccatcccctcagatggcaacttcgccatgcgtgcgtctgccctgcaggaagccctggagagagacaaagcggctggcctgattcctttctttatggttgccaccctggggaccacaacatgctgctcctttgacaatctcttagaagtcggtcctatctgcaacaaggaagacatatggctgcacgttgatgcagcctacgcaggcagtgcattcatctgccctgagttccggcaccttctgaatggagtggagtttgcagattcattcaactttaatccccacaaatggctattggtgaattttgactgttctgccatgtgggtgaaaaagagaacagacttaacgggagcctttagactggaccccacttacctgaagcacagccatcaggattcagggcttatcactgactaccggcattggcagataccactgggcagaagatttcgctctttgaaaatgtggtttgtatttaggatgtatggagtcaaaggactgcaggcttatatccgcaagcatgtccagctgtcccatgagtttgagtcactggtgcgccaggatccccgctttgaaatctgtgtggaagtcattctggggcttgtctgctttcggctaaagggttccaacaaagtgaatgaagctcttctgcaaagaataaacagtgccaaaaaaatccacttggttccatgtcacctcagggacaagtttgtcctgcgctttgccatctgttctcgcacggtggaatctgcccatgtgcagcgggcctgggaacacatcaaagagctggcggccgacgtgctgcgagcagagagggagtaggagtgaagccagctgcaggaatcaaaaattgaagagagatatatctgaaaactggaataagaagcaaataaatatcatcctgccttcatggaactcagctgtctgtggcttcccatgtctttctccaaagccatccagagggttgtgattttgtctgcttagtatctcatcaacaaagaaatattatttgctaattaaaaagttaatcttcatggccatagcttttattcattagctgtgatttttgttgattaaaacattatagattttcatgttcttgcagtcatcagaagtggtaggaaagcctcactgatatattttccagggcaatcaatgttcacgcaacttgaaattatatctgtggtcttcaaattgtcttttgtcatgtggctaaatgcctaataaacaattcaagtga

SEQ ID NO: 1334 - DNA, 3336 bp, Homo sapiens
  Genbank Accession No. M76482
ttttcttagacattaactgcagacggctggcaggatagaagcagcggctcacttggactttttcaccagggaaatcagagacaatgatggggctcttccccagaactacaggggctctggccatcttcgtggtggtcatattggttcatggagaattgcgaatagagactaaaggtcaatatgatgaagaagagatgactatgcaacaagctaaaagaaggcaaaaacgtgaatgggtgaaatttgccaaaccctgcagagaaggagaagataactcaaaaagaaacccaattgccaagattacttcagattaccaagcaacccagaaaatcacctaccgaatctctggagtgggaatcgatcagccgccttttggaatctttgttgttgacaaaaacactggagatattaacataacagctatagtcgaccgggaggaaactccaagcttcctgatcacatgtcgggctctaaatgcccaaggactagatgtagagaaaccacttatactaacggttaaaattttggatattaatgataatcctccagtattttcacaacaaattttcatgggtgaaattgaagaaaatagtgcctcaaactcactggtgatgatactaaatgccacagatgcagatgaaccaaaccacttgaattctaaaattgccttcaaaattgtctctcaggaaccagcaggcacacccatgttcctcctaagcagaaacactggggaagtccgtactttgaccaattctcttgaccgagagcaagctagcagctatcgtctggttgtgagtggtgcagacaaagatggagaaggactatcaactcaatgtgaatgtaatattaaagtgaaagatgtcaacgataacttcccaatgtttagagactctcagtattcagcacgtattgaagaaaatattttaagttctgaattacttcgatttcaagtaacagatttggatgaagagtacacagataattggcttgcagtatatttctttacctctgggaatgaaggaaattggtttgaaatacaaactgatcctagaactaatgaaggcatcctgaaagtggtgaaggctctagattatgaacaactacaaagcgtgaaacttagtattgctgtcaaaaacaaagctgaatttcaccaatcagttatctctcgataccgagttcagtcaaccccagtcacaattcaggtaataaatgtaagagaaggaattgcattccgtcctgcttccaagacatttactgtgcaaaaaggcataagtagcaaaaaattggtggattatatcctgggaacatatcaagccatcgatgaggacactaacaaagctgcctcaaatgtcaaatatgtcatgggacgtaacgatggtggatacctaatgattgattcaaaaactgctgaaatcaaatttgtcaaaaatatgaaccgagattctactttcatagttaacaaaacaatcacagctgaggttctggccatagatgaatacacgggtaaaacttctacaggcacggtatatgttagagtacccgatttcaatgacaattgtccaacagctgtcctcgaaaaagatgcagtttgcagttcttcaccttccgtggttgtctccgctagaacactgaataatagatacactggcccctatacatttgcactggaagatcaacctgtaaagttgcctgccgtatggagtatcacaaccctcaatgctacctcggccctcctcagagcccaggaacagatacctcctggagtataccacatctccctggtacttacagacagtcagaacaatcggtgtgagatgccacgcagcttgacactggaagtctgtcagtgtgacaacaggggcatctgtggaacttcttacccaaccacaagccctgggaccaggtatggcaggccgcactcagggaggctggggcctgccgccatcggcctgctgctccttggtctcctgctgctgctgttggccccccttctgctgttgacctgtgactgtggggcaggttctactgggggagtgacaggtggttttatcccagttcctgatggctcagaaggaacaattcatcagtggggaattgaaggagcccatcctgaagacaaggaaatcacaaatatttgtgtgcctcctgtaacagccaatggagccgatttcatggaaagttctgaagtttgtacaaatacgtatgccagaggcacagcggtggaaggcacttcaggaatggaaatgaccactaagcttggagcagccactgaatctggaggtgctgcaggctttgcaacagggacagtgtcaggagctgcttcaggattcggagcagccactggagttggcatctgttcctcagggcagtctggaaccatgagaacaaggcattccactggaggaaccaataaggactacgctgatggggcgataagcatgaattttctggactcctacttttctcagaaagcatttgcctgtgcggaggaagacgatggccaggaagcaaatgactgcttgttgatctatgataatgaaggcgcagatgccactggttctcctgtgggctccgtgggttgttgcagttttattgctgatgacctggatgacagcttcttggactcacttggacccaaatttaaaaaacttgcagagataagccttggtgttgatggtgaaggcaaagaagttcagccaccctctaaagacagcggttatgggattgaatcctgtggccatcccatagaagtccagcagacaggatttgttaagtgccagactttgtcaggaagtcaaggagcttctgctttgtccgcctctgggtctgtccagccagctgtttccatccctgaccctctgcagcatggtaactatttagtaacggagacttactcggcttctggttccctcgtgcaaccttccactgcaggctttgatccacttctcacacaaaatgtgatagtgacagaaagggtgatctgtcccatttccagtgttcctggcaacctagctggcccaacgcagctacgagggtcacatactatgctctgtacagaggatccttgctcccgtctaatatgaccagaatgagctggaataccacactgaccaaatctggatctttggactaaagtattcaaaatagcatagcaaagctcactgtattgggctaataatttggcacttattagcttctctcataaactgatcacgattataaattaaatgtttgggttcataccccaaaagcaatatgttgtcactcctaattctcaagtactattcaaattgtagtaaatcttaaagtttttcaaaaccctaaaatcatattcgc

SEQ ID NO: 1335 - DNA, 427 bp, Homo sapiens
  Genbank Accession No. M87068
ctgggtctgtctctgccacctggtctgccacagatccatgatgtgcagttctctggagcaggcgctggctgtgctggtcactaccttccacaagtactcctgccaagagggcgacaagttcaagctgagtaagggggaaatgaaggaacttctgcacaaggagctgcccagctttgtgggggagaaagtggatgaggaggggctgaagaagctgatgggcaacctggatgagaacagtgaccagcaggtggacttccaggagtatgctgttttcctggcactcatcactgtcatgtgcaatgacttcttccagggctgcccagaccgaccctgaagcagaactcttgactccctgccatggatctcttgggcccaggactgttgatgcctttgagttttgtattcaataaactttttttgtctgttg

SEQ ID NO: 1336 - DNA, 3953 bp, Homo sapiens
  Genbank Accession No. M90357
ttatggttaatgttcttatagacatccaaaggtcagaaactattcccatttgaaaaatatctgttgtggtataaatgtgctgttttctttcctcttctccctgactttagggaactgctcgcagaaagaagaaggtggttcatagaacagccacagcagatgacaaaaaacttcagttctccttaaagaagttaggggtaaacaatatctctggtattgaagaggcaagtatcaaattttgttactttaaaaaacaagatttggctgggaaaagttaacgttaatgcattaaatgggttgttgggttttttttaacttagggacttcaaagtccctaagatgtgtttctaccataaattaataaatatcagggagctcattaagtctgaatgctattagaatacatattccattccaggcaaaatttcacctgtgcttacacgtgaaatactagttagccagagctagtttaataaaacatttgtttttaaagagactggtcagcattgctaatttaaatttttcttttcttaataggtgaatatgtttacaaaccaaggaacagtgatccactttaacaaccctaaagttcaggcatctctggcagcgaacactttcaccattacaggccatgctgagacaaagcagctgacagaaatgctacccagcatcttaaaccagcttggtgcggatagtctgactagtttaaggagactggccgaagctctgcccaaacaatgtgagtttcctagtaatggttttaccagggaattactcatttagcagctgatttctgatctcagggctcagaatggatatgagtatttttaagtttggaaatgcaagctttaaaaataacagatttgtaactgattttaagcaactgtccttgctcaagtttgcagtaattgatgtagcgtgccatgattgttacacttgattttgtggaatgttttctacttacttgatttggatcagatacttttattaactagaaatgatgaaaatgttaatttggtgctttgccaataactacttgtaagtttggaattgaaaaaaaaattagtgtaaattatgaaattacttcagtttcatctatatagttcgtattaccagtaatcttttaaaaatggcttgccagtattctggcattttaattacagtgtgatagggatttattcggggcagaaaatagtgtagctgaatatacatctgaggatgtggcagtgttatgctgttttctgtgcttaaaattttgaagaataggaatgcaggaggaagtcagaggcttatatatggctctttagttacccatgtttttctaggtattgacttaatctgcctcaattttcatttttattatcacattgagttgcaggttctaaactgtcagggctttcagagctgaaataggcttttgaagtatcccactgatgcctgtatgggcctagtacataactctcctgtgtacgttcatattcttgtgtgataaaggagagtggatgcttaccactcacagactctttaatttttttactttaacttttttcatttcagtaagtggttgttgagcatcacccttatgccacacacagagtagttgagaaaatggcatcttcatttgtctcccaaaatctcaccatgatttggtatgtgggttttacctgcactctaagagttccctactgcccttatactacctcaggcctatggtggccagaggattgaaagagtggtatggaatttgtttgttggcgttcctagtattttaacccatttgtagacattagaatatcatgttattgatagtatcataggataaaatcccaaatgtcccttatcatggaaataagttgtaacaacacttggcatttcatctgttctttttttttttttttttttttttttggtgaatatttattaaaaacctagacaaataatgtttacattttcctttcatagctgtggatggaaaagcaccacttgctactggagaggatgatgatgatgaagttccaggtaggaacgtttgcttgtggttaacctagagaatcttagccaagggagaataagaaatctttgtaggaaaaactacccagggaagaggggtggtaagttaagatggacatagatcttacttagaatgagaaaaataatgcagtattaggtaattgagaattatgtttatagacttgacttggcttgtttctgtttgggatcccaaggatgtgtaggtatctaaccttaaatattgaataaataagtatatatatatagtaccctaaatataactattacctgcagagcactaatgacccttgctccctactttgaaactcatgaatttacaagaaggtgtggagttgttcaggtatcttgggatatatatatgcattctaaaatctgtagcagcataactccttttgggaatcagaggattttgtctcttacctgttattggataaatttacgttcttctaaaatatttattgggcaggagaatcactggactcataaatattcccactttgcatagacaggtatccttaggaatcaggaaaattttaacattgtgtgtcattgtattctttggttctgctcccccactattgaccaatgtagagatgggaagaggggggcatttttttctcttttttttttttttgcattcttgttcttggggctatgacacagtatttatcatcattggcaaatgaatgctctttccttcatccccttttaatatctgataattatttgtagattggcttttttaagaatttctactctttttcttttcctagatcttgtggagaattttgatgaggcttccaagaatgaggcaaactgaattgagtcaacttctgaagataaaacctgaagaagtttactgggagctgctattttatattatgactgctttttaagaaaatttttgtttatggatctgataaaatctagatctctaatatttttaagcccaagccccttggacactgcagctcttttcagtttttgcttatacacaattcattctttgcagctaattaagccgaagaagcctgggaatcaagtttgaaacaaagattaataaagttcttttgcctagtatacagttttatttttttatttattgacaccgatctgtacacagtaaaaaaaattgcttatagaaagctaatcatggcatgtaatatggctgataacctttggaatttgattaaagatttaaaatcacggtgtaagtgtaacaaaggtggtataaagttctcaggtttgaaaactttgtctccaacagtccttagtgcttccatgatttatatggtgggtgtaaatatgagaatagagtattccttagtggataaacagacatttctccctgatattctctattgtaagcatatgttaagtgccttttatgaattaccctcggtgttatcttcctttattcctcaatttgtgaagaactaatagctccattttgtagatgtaacctgaggtttagaacttctaaaaagtaaaagtaatctccagatcccttctttgtaggatattttataaggtgacttggaaaaggtagtgtttagaataggagtggctcctgggtcattgtcttttccttaagtgtaacacctaataaatgaatagggttatgtttttatttaataaaaaatatacagtaaaattgagcatatacagttaaaagaatttataatgtctgccactataaccaggcttaccagacagtttcatggtccagaaaatccctaaacatagggttacttttaaacattttacaaattacaatgaaacaattgtgtaatctgaaccaaggccatttgaggagaaatagttctacttgtatggtatttatttttaaatttttcatagcaatttgcaagtaccttttgaaagtattatcagttgtatctaaaatgcactattaaccgtgg

SEQ ID NO: 1337 - DNA, 2037 bp, Homo sapiens
  Genbank Accession No. M92299
cattgaatcggccctaacgattctcggatcgtcattaggtgtaaccatagagcatgaattacctcttgaggtcatcagcgagaatttacgactgtcaacaaaagcacgtgattccctaacgccccccacccccccaaccccccccccatatttggccgcatacatagcaaaacgaagtacagtgcatcgctataattcattaatacatcataaatcgtgaagcacagggttataacgaccacgatccacaaatcaagccctccaaaatcacccaaatgagctcgtactttgtaaactccttctcggggcgttatccaaatggcccggactatcagttgctaaattatggcagtggcagctctctgagcggctcttacagggatcccgctgccatgcacaccggctcttacggctacaattacaatgggatggacctcagcgtcaaccgctcctcggcctcctccagccactttggggcggtgggcgagagctcgcgcgccttccccgcgcccgcccaggagccccgcttcaggcaagcggcttcgagctgctccctgtcctcgcccgagtccctgccctgcaccaacggcgacagccacggcgccaagccctctgcttcgtccccctccgaccaggcgacctcagccagctccagcgccaatttcaccgaaatagacgaggccagcgcgtcctcggagcctgaggaagcggcaagccagctaagcagccccagcctagctcgggcgcagccagagcccatggccacctccacagccgcccccgaggggcagactccgcagatattcccctggatgaggaagcttcacatcagccatgatatgaccgggccggacgggaaaagggcccggaccgcgtatacccgctaccagaccctggagctggaaaaggagttccacttcaaccgctacctgacccggcgacggcgcatcgagatcgcccacgcactctgcctgtccgagcgccagatcaagatctggttccagaaccggcgcatgaagtggaagaaggacaacaaattgaaaagtatgagcctggctacagctggcagcgccttccagccttgagcccgcccagaggagcccagcggcccaagagcccgtgccacccccagccctggcccctccaatcctccccgctctgccgccgcccgctggggaccggttcccacaagcctgcctcgccttgtgttacgatatttcgtttggtcttaggtcttcctgtggctccctctctcctggactggttatcttgttattattgttaataataataattattattattttccttccatgctcccaactcccttctgcttgtcccaaatccgccagtgtttctgaatgtttgtgtctgtggttgcagtctttcccccaggaaaaaaaaaaaaaaagaaattcgcatgtttaatgtgaactctcccctccccatctgtgttctaacttatttataaaagatgatcgctgtattttgagtttcagctggaaacttctgtaaggggcagcagttgaggtggggtagtgccgcagtggggtcaagctgagctggcttcggagatggagtcccttttcattctcctcctcctccctcctcactccctaggcccaagtctcctaggggcttggtcctagggtgggaaggggctagggaggaccaaagggatggtattgagaagagagaaagaagatagtgagatttaagttcctgctgcctgggtaggccccacaaggcctggtctgggagtatacggaaacaaaaatgatcctcagtgcaaaatgtcttgtgtatttctctgtgaatccatgggtctggctagagggcccaaagcttgtaaatatggggatagtctgggtcagacccatctctcccttacccatcttgcttccaagaccatttgtagtgagcgagtggatgctgtgctacgtgtgaaatctgtctttgcggggcctgtctcagtgattcgcttttggtatttgtttgtagctttcctggaagtcaaataaatgtttcccccactcc

SEQ ID NO: 1338 - DNA, 672 bp, Homo sapiens
  Genbank Accession No. M93036
aatataactttttctttttttatttaaataagtcttataaatgtgggaaaaaattatcttgtgttcctttaatttcatttttatttaatactattttcagaatgaacaaaagattgaaaaattatttagaatttttttctgtgctttttcctgtttcagataaaggagatgggtgagatgcatagggaactcaatgcataactatataatttgaagattatagaagaagggaaatagcaaatggacacaaattacaaatgtgtgtgcgtgggacgaagacatctttgaaggtcatgagtttgttagtttaacatcatatatttgtaatagtgaaacctgtactcaaaatataagcagcttgaaactggctttaccaatcttgaaatttgaccacaagtgtcttatatatgcagatctaatgtaaaatccagaacttggactccatcgttaaaattatttatgtgtaacattcaaatgtgtgcattaaatatgcttccacagtaaaatctgaaaaactgatttgtgattgaaagctgcctttctatttacttgagtcttgtacatacatacttttttatgagctatgaaataaaacattttaaactgaatttcttaactttgacatttcaaatttcttcttctttttcttttcttttttttttttttttgaga

SEQ ID NO: 1339 - DNA, 1316 bp, Homo sapiens
  Genbank Accession No. M93056
cccgcagctcggagcccggagcgtcctcggcggctgtcggttttcaccatggagcagctgagctcagcaaacacccgcttcgccttggacctgttcctggcgttgagtgagaacaatccggctggaaacatcttcatctctcccttcagcatttcatctgctatggccatggtttttctggggaccagaggtaacacggcagcacagctgtccaagactttccatttcaacacggttgaagaggttcattcaagattccagagtctgaatgctgatatcaacaaacgtggagcgtcttatattctgaaacttgctaatagattatatggagagaaaacttacaatttccttcctgagttcttggtttcgactcagaaaacatatggtgctgacctggccagtgtggattttcagcatgcctctgaagatgcaaggaagaccataaaccagtgggtcaaaggacagacagaaggaaaaattccggaactgttggcttcgggcatggttgataacatgaccaaacttgtgctagtaaatgccatctatttcaagggaaactggaaggataaattcatgaaagaagccacgacgaatgcaccattcagattgaataagaaagacagaaaaactgtgaaaatgatgtatcagaagaaaaaatttgcatatggctacatcgaggaccttaagtgccgtgtgctggaactgccttaccaaggcgaggagctcagcatggtcatcctgctgccggatgacattgaggacgagtccacgggcctgaagaagattgaggaacagttgactttggaaaagttgcatgagtggactaaacctgagaatctcgatttcattgaagttaatgtcagcttgcccaggttcaaactggaagagagttacactctcaactccgacctcgcccgcctaggtgtgcaggatctctttaacagtagcaaggctgatctgtctggcatgtcaggagccagagatatttttatatcaaaaattgtccacaagtcatttgtggaagtgaatgaagagggaacagaggcggcagctgccacagcaggcatcgcaactttctgcatgttgatgcccgaagaaaatttcactgccgaccatccattccttttctttattcggcataattcctcaggtagcatcctattcttggggagattttcttccccttagaagaaagagactgtagcaatacaaaaatcaagcttagtgctttattacctgagtttttaatagagccaatatgtcttatatctttaccaataaaaccactgtccagaaacaaaaaaaaaaaaaaaaaa

SEQ ID NO: 1340 - DNA, 3865 bp, Homo sapiens
  Genbank Accession No. M95585
tttttcaattttgaacattttgcaaaacgaggggttcgaggcaggtgagagcatcctgcacgtcgccggggagcccgcgggcacttggcgcgctctcctgggaccgtctgcactggaaacccgaaagtttttttttaatatatatttttatgcagatgtatttataaagatataagtaatttttttcttcccttttctccaccgccttgagagcgagtacttttggcaaaggacggaggaaaagctcagcaacattttagggggcggttgtttctttctttcttatttcttttttaaggggaaaaaatttgagtgcatcgcgatggagaaaatgtcccgaccgctccccctgaatcccacctttatcccgcctccctacggcgtgctcaggtccctgctggagaacccgctgaagctcccccttcaccacgaagacgcatttagtaaagataaagacaaagaaaagaagctggatgatgagagtaacagcccgacggtcccccagtcggcattcctggggcctaccttatgggacaaaacccttccctatgacggagatactttccagttggaatacatggacctggaggagtttttgtcagaaaatggcattccccccagcccatctcagcatgaccacagccctcaccctcctgggctgcagccagcttcctcggctgccccctcggtcatggacctcagcagccgggcctctgcaccccttcaccctggcatcccatctccgaactgtatgcagagccccatcagaccaggtcagctgttgccagcaaaccgcaatacaccaagtcccattgatcctgacaccatccaggtcccagtgggttatgagccagacccagcagatcttgccctttccagcatccctggccaggaaatgtttgaccctcgcaaacgcaagttctctgaggaagaactgaagccacagcccatgatcaagaaagctcgcaaagtcttcatccctgatgacctgaaggatgacaagtactgggcaaggcgcagaaagaacaacatggcagccaagcgctcccgcgacgcccggaggctgaaagagaaccagatcgccatccgggcctcgttcctggagaaggagaactcggccctccgccaggaggtggctgacttgaggaaggagctgggcaaatgcaagaacatacttgccaagtatgaggccaggcacgggcccctgtaggatggcatttttgcaggctggctttggaatagatggacagtttgtttcctgtctgatagcaccacacgcaaaccaacctttctgacatcagcactttaccagaggcataaacacaactgactcccattttggtgtgcatctgtgtgtgtgtgcgtgtatatgtgcttgtgctcatgtgtgtggtcagcggtatgtgcgtgtgcgtgttcctttgctcttgccattttaaggtagccctctcatcgtcttttagttccaacaaagaaaggtgccatgtctttactagactgaggagccctctcgcgggtctcccatcccctccctccttcactcctgcctcctcagctttgcttcatgttcgagcttacctactcttccaggactctctgcttggattcactaaaaagggccctggtaaaatagtggatctcagtttttaagagtacaagctcttgtttctgtttagtccgtaagttaccatgctaatgaggtgcacacaataacttagcactactccgcagctctagtcctttataagttgctttcctcttactttcagttttggtgataatcgtcttcaaattaaagtgctgtttagatttattagatcccatatttacttactgctatctactaagtttccttttaattctaccaaccccagataagtaagagtactattaatagaacacagagtgtgtttttgcactgtctgtacctaaagcaataatcctattgtacgctagagcatgctgcctgagtattactagtggacgtaggatattttccctacctaagaatttcactgtcttttaaaaaacaaaaagtaaagtaatgcatttgagcatggccagactattccctaggacaaggaagcagagggaaatgggaggtctaaggatgaggggttaatttatcagtacatgagccaaaaactgcgtcttggattagcctttgacattgatgtgttcggttttgttgttccccttccctcacaccctgcctcgcccccacttttctagttaactttttccatatccctcttgacattcaaaacagttacttaagattcagttttcccactttttggtaatatatatatttttgtgaattatactttgttgtttttaaaaagaaaatcagttgattaagttaataagttgatgttttctaaggccctttttcctagtggtgtcatttttgaatgcctcataaattaatgattctgaagcttatgtttcttattctctgtttgcttttgaacgtatgtgctcttataaagtggacttctgaaaaatgaatgtaaaagacactggtgtatctcagaaggggatggtgttgtcacaaactgtggttaatccaatcaatttaaatgtttactatagaccaaaaggagagattattaaatcgtttaatgtttatacagagtaattataggaagttcttttttgtacagtatttttcagatataaatactgacaatgtattttggaagacatatattatatatagaaaagaggagaggaaaactattccatgttttaaaattatatagcaaagatatatattcaccaatgttgtacagagaagaagtgcttgggggtttttgaagtctttaatattttaagccctatcactgacacatcagcatgttttctgctttaaattaaaattttatgacagtatcgaggcttgtgatgacgaatcctgctctaaaatacacaaggagctttcttgtttcttattaggcctcagaaagaagtcagttaacgtcacccaaaagcacaaaatggattttagtcaaatatttattggatgatacagtgttttttaggaaaagcatctgccacaaaaatgttcacttcgaaattctgagttcctggaatggcacgttgctgccagtgccccagacagttcttttctaccctgcgggcccgcacgttttatgaggttgatatcggtgctatgtgtttggtttataatttgatagatgtttgactttaaagatgattgttcttttgtttcattaagttgtaaaatgtcaagaaattctgctgttacgacaaagaaacattttacgctagattaaaatatcctttcatcaatgggattttctagtttcctgccttcagagtatctaatcctttaatgatctggtggtctcctcgtcaatccatcagcaatgcttctctcatagtgtcatagacttgggaaacccaaccagtaggatatttctacaaggtgttcattttgtcacaagctgtagataacagcaagagatgggggtgtattggaattgcaatacattgttcaggtgaataataaaatcaaaaacttttgcaatcttaagcagagataaataaaagatagcaatatgagacacaggtggacgtagagttggcctttttacaggcaaagaggcgaattgtagaattgttagatggcaatagtcattaaaaacatagaaaaatgatgtctttaagtggagaattgtggaaggattgtaacatggaccatccaaatttatggccgtatcaaatggtagctgaaaaaactatatttgagcactggtctctcttggaattagatgtttatatcaaatgagcatctcaaatgttttctgcagaaaaaaataaaaagattctaataaaaaaa

SEQ ID NO: 1341 - DNA, 1717 bp, Homo sapiens
  Genbank Accession No. M97815
cgcctaccgtctccttcaaggcactttcttagacacccgggcaccaggcagatgcaccccccaacacacccaccccaagcaagtcacaaatcagcctgctccaactgtcttatggggagggtgtgagagaggtgcccaaaggcccctaaaaggtgagcctctcctctctccccacaggggtgaatgtgatgctgaggaagattgctgtggctgcagcgtccaagccagcagtggagatcaaacaggagggagacactttctacatcaaaacctccaccaccgtgcgcaccacagagattaacttcaaggttggggaggagtttgaggagcagactgtggatgggaggccctgtaaggtgagtgccagaaggggctccagggtcatggcgtcattgccctgcctctcaacctgccattttccaggctagcagttaactcctagcttctctctgtcccagtagggaaaatccctaggtagtggtgggggctagaaaggggctctctcccttatccctctcactgcattgcccctgctatgggcccagctcacttggccacctgtctcttgcagagcctggtgaaatgggagagtgagaataaaatggtctgtgagcagaagctcctgaagggagagggccccaagacctcgtggaccagagaactgaccaacgatggggaactgatcctggtaagtcctgcctcctccccactaatagcaaacccagtgctaccttccaagattctctgggagaccccagggtgcaggagactcaagaacaaccatggctggactccgcaccctgctgatgggactgcttgaacagaactaaggtgtccctatcccatacagtgccctgtgtgaattagaaatggtgttccttttatgcaagcaaagggcatgtactgagggatcccagcagttcttcagggagatcttcctggcttgaggaggaggacgggccccagggctctattgctatcctccctccattgatgcctgggcattctgggaccagctcctgcctgttggtcttgagccaagaagcaggtttggacctggaggccaagcagagtacctccattcaaccctcctctccaaagccacaggaccccaggggcctctcaggctaacaactacttctgtccttccagaccatgacggcggatgacgttgtgtgcaccagggtctacgtccgagagtgagtggccacaggtagaaccgcggccgaagcccaccactggccatgctcaccgccctgcttcactgccccctccgtcccaccccctccttctaggatagcgctccccttaccccagtcacttctgggggtcactgggatgcctcttgcagggtcttgctttctttgacctcttctctcctcccctacaccaacaaagaggaatggctgcaagagcccagatcacccattccgggttcactccccgcctccccaagtcagcagtcctagccccaaaccagcccagagcagggtctctctaaaggggacttgagggcctgagcaggaaagactggccctctagcttctaccctttgtccctgtagcctatacagtttagaatatttatttgttaattttattaaaatgctttaaaaaaataaaacctgtctctggctcattgggcaggtagataagtcacctgagttcaaccttgcctctgaaatgtagtatgggaaagacttgtgtttctgcagcat

SEQ ID NO: 1342 - DNA, 14537 bp, Homo sapiens
  Genbank Accession No. M98447
ctggtaggaatcagcctggtgccaggggccatcacagcggtggctcccaccaaagcccagcctaagcccccagacctcacccctgctccctccctagcatcttctccccatttcccgcccagaggcctggcctcttctctccgccccctacagcagtttggcccctccctcccacataagtcacttaccaggtctgtccctgcggcatccagtctgtgggtcctgtcccatccatcctgacctgttccatctcagccccaggactcagtactgcggttgccaacactgctgccaggtgaggggctcccacgggtactgtggtgccgagtccaggcggcccacactatcagaggccgtgcctggatccagcaaggtggggtgtgggccagctgtgtacctgtcagccccagctaggctgttcccaacaccaagactctgctttccctgtgcacaggctccggcacctgccatgccctacccctcctggcagccccaagtggggtcttccctgacttgggaatgccaaggaccacaggccccggggtcacttgtctgtcttgtgaggaaccttgagttgggggatttctgctaagaaatgagttctagaagctgtcagtgttgtgcacctctagactgcagagctagcaggtggacggaccaggcccagggatgctggagcactctgatgtgtgtgcagctgggtcttgaggctgggacaagtgtccatgcagggaactatgtggatttcctgggatggatcgttgagtgggtttcttcattgggcagtttttcggatgttgtttggtgggggtgaggggaaggcttttctctgcagcatgagaagcttctctgggtgagtctgaatggtcttcgcggaaggtctctggatgtgtctggagaatctctgggccaaggtgggattgtttcggtcatcgggtgggactgaatcagctgtctggatggagggtttctgggtcaactggctgggactacctgggttaaggagccaccctgcctcttcctaacaggcatgatggatgggccacgttccgatgtgggccgttggggtggcaaccccttgcagccccctaccacgccatctccagagccagagccagagccagacggacgctctcgcagaggaggaggccgttccttctgggctcgctgctgtggctgctgttcatgccgaaatgcggcagatgacgactggggacctgaaccctctgactccaggggtcgagggtccagctctggcactcgaagacctggctcccggggctcagactcccgccggcctgtatcccggggcagcggtgtcaatgcagctggagatggcaccatccgaggtgaggccggtctgtcctcctcagctgagagctaaaaggctttaatgggaccagagactcagcctggcatttctgggggggataggaagctaatgataagggcctgggctcctcatggggcttcactgacacggagctgtgtccttgcagagggcatgctagtagtgaacggtgtggacttgctgagctcgcgctcggaccagaaccgccgagagcaccacacagacgagtatgagtacgacgagctgatagtgcgccgcgggcagcctttccatatgctcctcctcctgtcccggacctatgaatcctctgatcgcatcacccttgagttactcatcggtcagtggggcttggattgggacgggtgaaggccctatgtttggtggggagaggctggcattagggtcagagaggtctttaggctcctccctgccccactcctcacctctgccagataaggcaggtgcaagtgtgtgggtgtgcccctggggttgtgtctcagagagggtcttggtgttgcagtttttcccaagcccatcctcctcaagcctcctggggcatcggtctcagagtactcctcttcagggcctgcctcggtgcctccttcggcattgctgctctgtcctttgtgcatctgttctcattccccaggatgtggctggttctctcttctatctctctctctccctcttgccttccatgtcccccatctctgccaattctgtctctctctgtctctgtccctctgtccccatgacccaaggcaggtgcctccctcaccgcgttgcttggtgtagcttgacttctcaggctggtgattatgctgctgcctggggcaggtgactccttttaccctttgattagggcctaaccttgcccacctcatcctttaatttcccaggaacccctaccacctccaccagggatgccctgggctctggaagctgcagccccaggaagcaggcagggttggccttcaggatcaggactgccctttcatacggggcaggtggatctgcccctccagcccaggcactgtgatagtcaggcaggcagaaggtgacaggagccctcgtctctcctccccacctcagagttcagtgtcaggggaacaggtttgggatgttggactgcggcactgccctaacatgtgggcaagcattgggtggagacagagctgctctaagggagactgtcagagaataaggtgatggcccaacgtaggggacatacacagtggctcatacacattgtgggtggggccgggagaagtcccaggctccatcccctctcctcagggaggccttgccagctaattgctgatttcctactctaggaaacaaccccgaggtgggcaagggcacgcacgtgatcatcccagtgggcaaggggggcagtggaggctggaaagcccaggtggtcaaggccagtgggcagaatctgaacctgcgggtccacacttcccccaacgccatcatcggcaagtttcagttcacagtccgcacacaatcagacgctggggagttccagttgccctttgacccccgcaatgagatctacatcctcttcaacccctggtgcccaggtgagcagctggggtctggagcagagggtagatgggagggaaagacagggaagggcttcctgccctcggatgtggcggggtgcctaggtgcctgaccccaggagaagccagcctcccattgggcagatgagaggaccgaggcctggtgcagaaaggtggccagcccagggtcacacagccagccacacctctcctggcaaaggcccctggctacagccaatctcctccaccatctgtcatgctccccgtgtcctcccacagcagtcctgtcaggctaggggcatccccgcattttcttctgtggacatgagtcctgcagaactggccagaagtaggtgaggcccagggagagaactggagggaaccagttttgtgtgttctggggacacagaggacattgtgtacgtggaccatgaggattggcggcaggagtatgttcttaatgagtctgggagaatttactacgggaccgaagcacagattggtgagcggacctggaactacggccaggtatggtgcggctggccagggtcacatacacccagaggagctggggtgggtgtgggggctggggtattggagcagggtgctggcctagggttcaggctgtcacctctgccctccatccctccttccagtttgaccacggggtgctggatgcctgcttatacatcctggaccggcgggggatgccatatggaggccgtggagacccagtcaatgtctcccgggtcatctctgccatggtgagcaccctcacatctctgagtcctactgtgtgtgtgcctgctgcctcgccacacccccaccctcctcctgccctttctggattcctcaagaacccccagccctgtccctgccctcgtaaaggatacttcaggaaggggtctccctcctcttctctcccttgcctgccccccaccccgcctttcctggctcctgtcccagctcctgtggaatgtagggccaaacccaaaacttggcacacccaggattcacattcctgtgtcagagcccgggtgggaggggggcagatggctgagggaagggctgggtggagctcaggctggtgtctggatcctgaggcatttaggggtaaggggtggttgcaggatcggggcccggctggtccccatggaccacatggcaggtcctgagcccctcctccacctccgccctatctcatcctgtcctgggcaggtgaactccctggatgacaatggagtcctgattgggaactggtctggtgattactcccgaggcaccaacccatcagcgtgggtgggcagcgtggagatcctgcttagctacctacgcacgggatattccgtcccctatggccagtgctgggtctttgctggcgtgaccaccacaggtagtggagggactgggacaggagtggcccgggccctacagggagaagggaggaaagccaggcttacccagccctgcccagatgtggctacagtgcagggtgcaggcgggggtgggtaataggctggccttaattatcattaattagtgttaacaacagagagaggcctaagggaaaggagggagaagggacaggcaaggactgagccaggcaggtggcctagcttcccctgaccccaagtgctctgtagcccaaagcttgtggcccccgtggccctgaccctggagtctatgcccagcttggcaatcctagttgcccttctccccctgatactcctgacacgatgcctcacttgcccccaacccatgccttgaaccccaaccttcgctcctccacagtgctgcgctgcctgggtctggccacccgtactgtcaccaacttcaactccgcccacgacacagacacatcccttaccatggacatctacttcgacgagaacatgaagcccctggagcacctgaaccatgattctgtctggtgagctggggtggactgcccatctgtgctgaagaatggtgacctgagctttggaggtggagggtgggcagggctggggaggctggggaaactgaggactcctgaccctggggctcagacccagcccctcctccatgtccatccaggaacttccatgtgtggaacgactgctggatgaagaggccggatctgccctcgggctttgatgggtggcaggtggtggatgccacaccccaagagactagcagtggtaagctgggccccccactccccaccatgcccctgcttatctcccccacctgattaacacagtccagagtgtcagtgctgggccgggccggagagccaagccatgtaaccccgcggcttcttaaacgggtttgtcagctgaaccaccacgtggatgttagtttatttttaccattctatataactctctatttgcctacattttacttatttataatggtttattttatttataatggttaatatacaagggaggttcaaaattcaaaagctggaagagtattcagagaaagaattcatattcactattcttacttgctttttaacttacatatcctggagataattaactgaaggaccattttaaagtcatttttataagtaatacatgcttggaaggaaaaaaaaagtatagaattgaacaacacaaaatgtaaagcttccctattctctctcaggaggtatttgggttttttttcaaaaatatttttaaagtaaatttctaggttctactccaaacctgatacattagactttcccaggatagatgctaacaatgtatatttttgaaagttcttctggtgattctgacgatcagccggattttttgacccactccaaagggtggccagagagatggagtgacctcctctggggcacagagtggtaggtcagtgacagagcaagtccagtccttttaagcacatactcttgctttcaacgagttccttcctgtctgttccattgctcactgtgagttatatatacagcatagaaaaaaatcagggctcagataggttcaaagaagaaaatagcccttatgaccctgccttaatatataattactgttaatataaccaagggtctcttttctgtgtccacatacatgtgtttctgcagaaattagaactaccatacactctgttctcaaacaaacccccaccccttcttaccgtgataccccagccccagccaccaggcctgccctgccagctaccttctgtccagcctctcccttaccccaggtcagagagtcctccctagcctacattcctcccctggcctcttcccagtgccctccctctcactcagatatgtgaacacagccccatgagctgtgcaacccggtgatgcctgtgatgctgaaacagcctgtcccagacgctggcagatctgagctctggcccccaactctgggaagtggtggggtggacatcaggcagggggctcagggccagccagactggggcttgatcccagcctgatcacttctcagatgtatgctcttgggcaagcacctcgaacttttaggctttggtggtttggatgtaatttggggtaatagataccatatatggtgattgggaggattaaatgagaaattctgtatctgaagggaccagcagcatgccgggagtgtagcagctactcaaaaagtctgagctcctttcattctccctgcaccacctgtcttgtgagatcctggcatgaacttcaccttgctgtttccccgtctgtaaaggagtgtgtagtgttatgtcttgtctaagattctttccggttggatggtactcacttaccactctgtcctctcctgccaggcctcttcctgtcagcctatctcttctagacagcctcctgagtatcataagggcagactctatttcccaccagctccccccagtagaaagggcagcaggctgcagagctgagggttgttccgcatctctctggaatggtggtggcggtggtgtcctcgctctcccagccagcaggcagggccactgtggactctgggttggttatgataaaggatggggcgtcctgtcctctgggggtcacagatggtggacatccagtgtcagccagccatgaaagagtatgtcagggacttggttatcaggcaggctggtccgcacatctgtaccctgcccccatcctccagcagagcagcctgggctgaggaaagcagattgagagccaaatggagccgctctctctttgttttccatacctgtgttgcactggctgtcaactgacccccaagtgtttgggtcagggctgatgaccttgttccagaggccaccaggcagtgggaccgggcctgagtgggtgggctggggccctgtgtggaccttacccagggtctgaagagccctctccgccttctcagatctcttgcctctgtcccgcctcactctctaggcatcttctgctgcggcccctgctctgtggagtccatcaagaatggcctggtctacatgaagtacgacacgcctttcatttttgctgaggtgagggctgggctccaggtgccttcttgggcttcagtcatgggttctctggtcccaacttcaccgctgactgaccagctctgcgacccggggcaagtcactcattatacaagtcagtttcctcacctgtaaaaggggataatcaaggctgccttgcttcctatactcgggatcagaagagataacgggtatgaaactgcttcactagtcgtaaagtcagccattgagtgtgagggattactgatattgccaaagtgctctgccaggagcctcccagaccagcttcttccctgcactctggcctcgtctggctcgtcttggaaagtctccccttggctctgccaggaagctcccacccttgggaccaagccctgtcccatagctcctgggatcaggggaaggaggccgggagtcaggccaccctcagaccctctggctcactcattcctgctcacccccaccccccacaggtgaatagtgacaaggtgtactggcagcggcaggatgatggcagcttcaagattgtttatgtggaggagaaggccatcggcacactcattgtcacaaaggccatcagctccaacatgcgggaggacatcacctacctctataagcacccagaaggtaccattcccccaacccagccagctctgggccccacaacaagtgttcctgccaagtgcttggccacccacgtgggaattggaacctcacccttgaccctcaacccccaggctcagacgcagagcggaaggcagtagagacagcagcagcccacggcagcaaacccaatgtgtatgccaaccggggctcagcggaggatgtggccatgcaggtggaggcacaggacgcggtgatggggcaggatctgatggtctctgtgatgctgatcaatcacagcagcagccgccgcacagtgaaactgcacctctacctctcagtcactttctatactggtgtcagtggtaccatcttcaaggagaccaagaaggaagtggagctggcaccaggggcctgtaagtgctccttacccagccctgccccctggatggctgggcacctcagggctgtggacatggagaccccaggagcagtggggagtccctgggggaagcctcatgtagggaagcaggcctcagtgacgccatgcctcttctccacagcggaccgtgtgaccatgccagtggcctacaaggaataccggccccatcttgtggaccagggggccatgctgctcaatgtctcaggccacgtcaaggagagcgggcaggtgctggccaagcagcacaccttccgtctgcgcaccccagacctctccctcacggtgaatgcagtttgctggggcatgaggggtggtcagagagtgaaggccaggggataaggacatcagaggtgggcgctaagccagcagcaggctggcctgatgagcctttgtaggagaaggtcaaggaccggctctggggcctcagtttcctcatctgtagcatgggatcttatgtctctggttctgtgacagcctttattgaggaataggttggagtttcttctctgacttctggggaatcttctctcaggaggataaatgtgggactcggggaggttttgcttctaagcagcttcccctctctggtgcagtgtacggtccccgtgtgtttggccagggtctctgacgtgggggatgggcctctttttctctcagttactgggagcagcagtggttggccaggagtgtgaagtacagattgtcttcaagaacccccttcccgtcaccctcaccaatgtcgtcttccggctcgaaggctctgggttacagaggcccaagatcctcaacgttgggtgagtctggcctctccccctacccctgcttccactctggccttccccacaggctgccctggctcccagctttgctccctctctgtctggacaagtatgttctgtcaggacccaaccaagcaggttggggccagctagcaatacctcccggcccagctcagtcccaccagcctttagggagacctcttgggcacctggtgctatgccatgtccttgccctgcctcactatctaattagggagcagaaggcccacataggaatcattagtaactcattgctaatatttgcccagcactgaagaattgaccaggccctttcaggaatattatctcctttggacacaaaaactctaatttaagtacattagaaggccaggtgtggtggctcacacctgtaatcccagcactttggcaggccaaggtgagtggatcacttgagcccaggagttggagaccagcctgggcaacatgatgaaaccctgtttctacaaaaaatttttaaaaaattaaccaggtttggtgctgtgcgcctgttgtcccagctacttgggagtctaaggtgggaggatcacctgagcctggagaggttgaggctgaagtgagccatgtttgtgccactgcactccagcctgggcgacagagtgagaccccgtgtgtctctctctctctctgtcacacacacacacagacacacacacacacacagagacacacacacacaagcgaagttttggaatcctaatgatacgggttcagctctagcacttactggctatatgcccttgggcaagcgacttctctccttcaagcctcagtgttctcacctgtaaagcagggatagcaatagcccctggacctagggttgtttagtgcactgcttggcacaaagttagtgctccattggtagttgttatttttattattgccattattacccccacttacagatggggaagctggcggtcacatctcatatggtctcacagctcgtagggggcaaactctgctcttcccactgtggtgcataccatgcacaggctctcaaactcattgtttgttttgtgccatgagggccaagtagcagttccagaggagagaactccatccctcaggcccttacccagcccgtctgggcctgatcctgggctgggcaagcccctgggtgtagtgagggcacacacatgctgtgttcctgggcctgcggctgtcatctttgatacagacttacacgtgctgccccgtccccgcctaggaaaagcacggagggaaagcagagcaggccagagcctggccttctagatcagccttctgggacaggggcaggcttcatcttcagacagcgagctcctgagaaagaacaatggcttggggtggggaaactgaggggaggaagcagaggaccccctgcccacttgcccacccctccctcacacacagcagctctcctggtggtggccgccaccttcgccattaggccaaagctgagaaggaagctatgttgatctttgccccagcctgggcccctgggaatgctatgatgtgtcacaaagtagggctttcctcatgtcaccataccatggtctctggcagctcagtgaacagagcctgaaccccccgggtagcctgctctgctagtcttgcccagcaggcatctcttacccacacccccaccatggtggggaggttcctcatcctaagggatccgcagagctggacttgcctcagcagccccaccaggcctttgcctcttggccctgcctggaagtaaggaaagggccactgtgctgagtgttgggggacctgtttcctgtctttagctgtagggtttatgtgagtctccctacagtaaaagacagggttggatgatggtttcttaaggcagatcctccctggacagtctgtggctccttagctgctgtgagcccagaccagagcctccagtacaattgggagcctccagggggacatctctgagctgttggttcaggtacctaagattccaagatgggtgtactttgcctctcattcgcacatcagaggctgtggcatggaaccccattatagcataaggtgtgccacccccctgtggtgactggccacttaataaacattccagaactcactcctccagatggctgttgtcaccaccaaaagcagtcaccagagaggctggaagtctgttccaaacccttcctgggaatttccctcagagtctgaatgatattctctagaatgtcctcagagtggtcagtctgccttcttaggggtagatttgactttgcagagaaacctgaagtcatcaagagctaagactaattaataagataagtgaacaagtgggtaactgcccttttccatcagaaccgaggcatgctgtggaaggaaggacaggctgaccgtggcatcactgagcacacgcctgtgtgtatggtttaaatggctctgaagaagagtccaggaggagttttaaacatgtttcaagcccaggcaatacgattgaacaagtacacaattggacaatgctcgtttcgacgtctaagttctggtgtccttgttggggagttggtttcatgacccacactcagttccaggaacatcccagctttagcagatggcttgtactcagcttcagctcacaaaagaggtgtggtaaagtcccccacctcacaatgagaccaggggagggagagatcttgacatttccacctagaaaacagtttctcttgaaaataatccgttactgcaatgtaaaggttactttctgaaatattatagttcaattatggtatagagtaaatagacttctgagggctggtctgagcttgaacaaccttgaatcttgtatctatgaaaagttagcaaaaattaagagtgcaaatttgtaagcagtcaggacatagcctagccattaagttatagacttaatttatagacttcctatcatactacgttctattatatatccctgcctccctccttcagggagctcagaaacaccttcaagataatcagatcccactcctccttttactttcacttccattttatgacccagaaagtgaggaacagagaagttaaatagcttctcataagcctcacagctaacaagtggtagaaaagggagtagagtggtccagggaaacccctcagaaccaggttccaagccaaatgctttgccctgaaaaaaactcatccttggagttagggatgttggctcattctcttagaggacaatagttaatgcacaggttctatgtctggaaagggtccccagcggcaggcttgggttgaatagggcaccagaggtaaggtttaggcaaaggcaggaaggacaaattcccacaggcacgagcaaatgcaatataaatgcagtcatgttcagtgtataaaatgaaacgtgcagattgctggaggagctcagagaagggtgagtttccttttcctagaggcaggaggtgctcaggggagccgtcactgaggaagtggtgtgccaggccttggaggaaaagtaggccttcacaaggacacccagggtggggaggcagagctgggtgctcattccacacaaggcaaagactgcaaagcatgactgtggaggtgagtctggggaagaaggcattcggtagggctgctcagcaggaggaatgatggggggtgatgaggctgtgcaagtagcagggactgggtcagagtgagcctgtgtgtcaagttagagagccaggatcgtgtgccacaagcaccaaaggagcactaaatccttgaaggatttagttcacctctgagtggttagcagaacagaatacaaaagtgggatgggaggcaaggagtcccgttagaggactagtgaaatcatgattcccaggggaggctgggaatcaatttttcagaggcccatgtggaaaggagaaaatgaaaacactggttgtgtgtgtgtgtgtgtgtttgtccacccacctctctgtctctctctctcacacacacacacacacacacacacacacacacacagagacataagggtttatgtccatttaaagatgtctgttgtctgttcttgggaaggattttccttttttttcaaagataacatccttctaatgttttggtgtgtgaaaatgctcttttctctttggaacgacgatcatagcagagagtgattacttttcttcaacctatgctcttgtcaaaactgaaagtatttgaaaatattgtgttgggcccccaaagtctcattttgaagttttcttggttttggaaaccccaggtgagatgaggatgttctgtctggggcaggagcagtggtgatggaggggatggcatgagaggcctctgcggtggcatcagcagtctttgtccaggtggatgtgggagcagggagggaggagtcccagacgatggggagagttccagcacaggcagctggtgggtggctgctgagctggctatgcagaggcgccctggggatcctggtcttgggtgtggaaatttcaggtaagcctggaattgtctgaatgggtccacctcctgcttcttcctcctgactgccctggatcagctcttactccccactccacccccaattactccaggcccatgaccttgtctctgcccacagggacattggaggcaatgaaacagtgacactgcgccagtcgtttgtgcctgtgcgaccaggcccccgccagctcattgccagcttggacagcccacagctctcccaggtgcacggtgtcatccaggtggatgtggccccagcccctggggatgggggcttcttctcagacgctggaggtgacagtcacttaggagagaccatccctatggcatctcgaggtggagcttagccctgtgccaggagcaatgggactggagtcagatgagcaaggacattgccccaagataggggcacactacagagcagctccccaggagctcaggtggggagtccagggctcccggagagggagtcagtcttcacttgcactgggggaacagatgctaataaactgttttttaatgaagctgctgctctgtccatctttcagtccatgccacaccaagacggatggagccatggtttgtcccagggctgcacatggccttcctgtatcatccactgataggggctggtgtccctcaccagagagagggaaccacaagggaagttgaggctcagagagacagagtcgatactctttgtataactctcttctacctggaaattttcctgtgggtgagttttggaggattttggctttggtttgaatgaaactgttcccttacctcagggtttttcaagtgtagtctctaga

SEQ ID NO: 1343 - DNA, 621 bp, Homo sapiens
  Genbank Accession No. N20945
  unsure (1)..(621): n = a or c or g or t
accaagttcataattttattatactctcgaatagagatgatatttaaggagcagagaaaatgactatacaaaagatttatagaacattcatttacatactggatatattctttacagtatcagaaaagtaaaaatatgcactaacaaggcagagaagacgttacaaggtatttgatgctgagaataaatgcacagtgacttttaacatggctatagcttaacactggaggaatacaacaatacgttcttttactgagtagttagtaggaccctggctataacatgcgttgggcacagttcgtgaactctccgcatttactccccagggcagtacgtgcctgtccagcgggancctgggagacaaaatgcctggaaacgttccttttcctgtggccctagagccggtgtccacggtgggggctctctcacggtttctgagcccacagtacaatctgtgatgacacacagcttgttctggttaatgcacatgtaacacaaaagggagaaagaacttcctataccagctcttcagaaatcatgggnacttgcttccttngggtccccaganggggctatctgctttggagcnaattnccgatggccttgacacgtttacctgtg

SEQ ID NO: 1344 - DNA, 554 bp, Homo sapiens
  Genbank Accession No. N21031
aaatttaacagataagtttatttgagcaaagaacagtttgggaatcgggcagccctcagaattagaagttcagagctctgctccggcagcatgagcagcaagcttttgtaggctgagctagaagcaaagaaagaaactgcagtcatgtgttgcttaatgatggggatacggtctgaggagtttgctgttagttgattttgtcgtcgtgcaggcatcagagtgcgctacacctgccgcacacctaggctgtgtggtgtggcctattgctcctaggctgcatacctgctccgcatgtgactgtactgaatgcttcaggccattgtaacacaatggtatctaaacacatctaaacatagaaaaggtacagttaaaataaggtattataatcttacgggaccaccatctacatgtgggcccatcattgactgaaacgttgttagcagtgcatgactgctcttagcggtgcatgactgcctgattggctactgctgggcatttgccctaattgtgtggtccatgcatgggcccaagttctgccacagttggctgggtgg

SEQ ID NO: 1345 - DNA, 571 bp, Homo sapiens
  Genbank Accession No. N21131
  unsure (1)..(571): n = a or c or g or t
caagggtaactaactccaaaattctttctttagtaaaattgtcacatttgatgtcaatggaatacacaaactcaagtgtgctacaaacaagatgtacagagcatcacagctctgggcagtgcagctgagtgcacctgcctctcatctccacgctgaagtggcaagttcaagcttttgtttagcccagggctgcctggaacactagtgcccagcaccattcctgccacctctgcccccagagcccgcacagggtgggttgaaggctgggtgggtgaacctgggagagcgctggcagctctacaaaattcttcctcctgcccgtagctccctccctccacccacttccagagctgcagggtccctaaaagtttcttaagaaacggggctggggcctggactgggctggttaccaggggctgccctgcaagccatccatcagaggagggagggaaganctgggagactttcaggggcctaacccaccacatctgaanccctgggaggagggaggagattcagggagggncggggcaaccccggagactctggctggcattggtcaccaagggct

SEQ ID NO: 1346 - DNA, 510 bp, Homo sapiens
  Genbank Accession No. N21439
  unsure (1)..(510): n = a or c or g or t
gagctttggacaaatttattgaaacatacaggcggctgttagcagagaaatcattccatgattgatgtgttacatttggccactaccttgaatgtataatttaaaaattatatttttcacaactaagcctttgncaaaaaagtcatttagcacatctttaaagatcaataagaaatggattttggacattaaaaagatcaagtcactgaattaaacagtagcaacccccattaatctagaatcccataagtgctgaaggtangaggtgtctgtgcaaagctaagtcatttgttaacagcaatcagaagagatgggggcaggcacacctgtcagaggtggcagcagagctggcaggacaggacggctgggctggtctgggtcaggtgagcatgtcccagagacagcagcaaccgagagccgtccagcaggctgtgaggcaggtggatgggtcccagctcatctcctccttgggncctctancacatacactgtgggtttaggaagcccccg

SEQ ID NO: 1347 - DNA, 447 bp, Homo sapiens
  Genbank Accession No. N22262
  unsure (1)..(447): n = a or c or g or t
tacatttccatttttaatttaaaaaataaataacagcaaatctgaacaaaattttcctacttcaatgcacatcttcctaactgtccatgtttgaaatccagatagcaacaaaatcatggcaaaggcatttttgacaaagtttagacaaacgactcacaaaatatggctaatagtagatgagtttggacatctgatactgcagaccagccttggtagatcctaggcgtcagagtgaaatcatgaatttccttttgtagattagaattgatggtccaactctcaacccaccaaagagaaacttaccttttccaatttaattgtaaaagccagatatatcactggaatgaaggtatctaaggaagtggatatttatcaacttccccaaatggataccagagaaggggaaaagcntaaattattaaaaatggaaccctaaaggtcntggat

SEQ ID NO: 1348 - DNA, 632 bp, Homo sapiens
  Genbank Accession No. N22751
  unsure (1)..(632): n = a or c or g or t
ggtttggcatagtttattacaattagtgtgcgcataaaaccatgtaaactctacaaagtaaaccatttcccctccacactaaccagcagctagtctgccatgaccttccagcacccccattattttaacatatatacatttcacaggatgtaataaccacacaaatagggttataatacattcttcagggaaaaaaatttttggtccatattttctattaaaaaaacacacacacttccctctttggcaaaagaggttaaatctcccatagttaactcacaaaagaaactcaaataaaaactactgagcatgaggtacagctgatgtctggactgttctgggaattacagacgcctccttgaggggaaaatcatttcttataaaatgagatcagtttccaacagtttccatgtcagtagaaaagctcgatttagacttggtcagnatcacttttgcatgaacatgttccaaataactttggttttcagaggacagcggaagtcncgaaaatgngctacttctggaggaagtcntggaaattgtggcgtctgacctcagcaatatttttaatcngaggtacgaaacatctgncacagccattcacccggnattcctgtgccaccttcatggtc

SEQ ID NO: 1349 - DNA, 592 bp, Homo sapiens
  Genbank Accession No. N23781
  unsure (1)..(592): n = a or c or g or t
atcagaaccaatgatcccttggcctacttagttaaaaccagttcatacatcccttagggtttttattattattattattattattacagttgttattgttgtttttgttgttattattatttggggtttcttgtgttttttctttgcgactctccacactaaacttgcaatattgtggggagaagctgtgactaaactctacgctgcggtgagatgtagcagtaatcagctcccagcgacgtgtgtagctggggctgccgctcgcaataatcactattgatttaaagctttacttagccttgatctgtaccctcgtagtcaataaggtcttgccacattttattagtgaggtggagaaacgtattatttgtttgttgtttttgcccttcccccaccccccaatattaaactgtgaaatttgtgatttgtttaaactctgggtgaatcatagcttagtttgcatgtccagctaatttggtnccaaacattttggtttgattctccttctccttctctcagggcttttacaaaaaaatatatatatatggatctctgaaaaggtttttgagggtcaaggtttttcccttggttt

SEQ ID NO: 1350 - DNA, 573 bp, Homo sapiens
  Genbank Accession No. N23796
  unsure (1)..(573): n = a or c or g or t
naccgttatccagtcggttcgtggagaggagaggtgcactttacaggtccccgatgaaccaagagaaccctccaccatatccaggccctggtccaacggccccatacccaccttatccaccacaaccaatgggtccaggacctatggggggaccctacccacctcctcaagggtacccctaccaaggatacccacagtacggctggcagggtggacctcaggagcctcctaaaaccacagtgtatgtggtagaagaccaaagaagagatgagctaggaccatccacctgcctcacagcctgctggacggctctctgttgctgctgtctctgggacatgctcacctgaccagaccagcccagccgtcctgtcctgccagctctgctgccacctctgacaggtgtgccttgcccccatctcttctgattgctgttaacaaatggactagctttgcacagaacanctctaccttcagcactatgggattctagattaatgggggttgctactggtttaattcagtgacttgatcttttttaatgtccaaaatcaattncttattgatcttaaagat

SEQ ID NO: 1351 - DNA, 489 bp, Homo sapiens
  Genbank Accession No. N29070
  unsure (1)..(489): n = a or c or g or t
ccattttgggtaaacgtcaggatagagataccacatgtggcaagccaaagatctatgcctctgttttttcaatgagagagaaatagcaaatgttctttctatgctttcctcaccatcatcacagtgtttacaaacttttgaaaatatttagtctgttacaaacttctgtcatgtagctgaccaaaatcctgcagggccacagtcggcactgttatttgcttcttttaatcagcaaaggcctcaagtcttaaaataaaaggggagaagaacaaactagctgtcaagtcaaggactggctttcaccttgccctggtgtctttatccagatttcaatatattctctgatggcctgacaggctaatttaagtagatgtgaatattttctccccaagatggacctcccattcttcggcagaccttaagagtttgcctcctgagttaagctcntttggnaatcggtgnaccacagggtgtggctaatnaatgnac

SEQ ID NO: 1352 - DNA, 592 bp, Homo sapiens
  Genbank Accession No. N30008
  unsure (1)..(592): n = a or c or g or t
gcgnccgctgccttgnacccagcgccacccgcacacggcgctccgtagccaggccgggagcaagagccaggcgttggagaagccgcgtncggagaagccgcgntgaggnctcgtccgcagggcccaggaggagggccggggagccgccgccgcctgagctggcgttgctcccgccaccgccgccgccgccgccgactcccgcgaccccgacgtcctcggcgtccaacctggacctgggcgagcancgggagctnggngagacgttccagaagcggcagaagttacctccgagggtgccgccaagctcctgntagacacctttgaataccagggcctggtgaagcacacatggaggctgccactgtggagcagttcgtttttgaagttttgggcctcagcagctttnatatatttgantgcagtaccggaattatatatgaataataagcacatacgatggattactccaatggagantgaccagctactaacaatagagtcngatttgaaanaagcctgtggatacttttgagagatntttgctaattagactttttcaaggtggcttaaanagggattagttaattccggg

SEQ ID NO: 1353 - DNA, 543 bp, Homo sapiens
  Genbank Accession No. N36638
  unsure (1)..(543): n = a or c or g or t
aaaatcataatttggggaanntttaagcaaatctggctttgtagtcctgatgttataagtgactttgtgatcaaactgtcaggcttgggttcttgttatagaatgcttggtatagaaaaaccatgccatcattaatggctaacaacacgtagggacttcatgtcatgtcaaagatagctctttgcaagtgccttgattaaaccagaaaactgtcatcgtttaacccaaatatctgaatggtcatctggtaactcatgggtttttggcctcataagatggtccactctgtacacaggcattcctcctgcaataatgttgtatctttgagaccgttgtcagtgtacacaactcacatccttcatattgaaggtgactcatttttctgcacacttttttgatgtgatgcttgacgtgaggcccgacactaggaattctcaatgcaagaatccagtaccttgcacatagaagtagcaacccaccccttggcnaattttcaacntgctggtggtctcttttttaaaaaaatggggggtgacttgtttt

SEQ ID NO: 1354 - DNA, 531 bp, Homo sapiens
  Genbank Accession No. N39954
  unsure (1)..(531): n = a or c or g or t
gtaattcttctgtttttgttttgttctgtcttttcttcattttggcttntgnttnngggaggggcaggtgacacaaaggatttnnnttttttttttttaatttttggaatcttttccaataaccagctaaagatttgcactgaaatacaacttgtatgccttttgcatttttaaagcctgcttcctggatttaagcagagtgatagtgttcaaagagccagttcagcctgtaacatatttgaaaaagatatgtctgcactttgaggtcccttttgaatgccattcactagacctctcaagcattttgtttcattgctacatccaagcgcctcacaagtccacaatgcgggacagcatcaaaagctcaagactttggaaaaagcttgtgggcttgcactgggggagggaagggaacaaaatttgtgtacttcttttgtttaatttaganattaggcatccaagagatgccaattattttctgtgtttcnatttgttgtgcctttgagttaaactgcatttttggcctttgtt

SEQ ID NO: 1355 - DNA, 535 bp, Homo sapiens
  Genbank Accession No. N42752
  unsure (1)..(535): n = a or c or g or t
gatcgccttagctttcaaaactantttgttttatcatttaagaatacttgaggaacttctttgatcagaattatatttcagagaattgttaaagcatttctgatttaaagaaaaaaccatctaattattgaagcatttctgtatttcacatgggggtaacagagacaattatgttatagcgagttacaagttgcaatttacatcntcctataacacatgacttgattggtctaagttgccagaggtatcgggtaactggtcattgttttgttttgtttgttttattcttccttttttttggagtcacactacatgtatagtattgctcacgttagcagttttctgtaaggagggccaagtggtcagggataataggtggacttttttactccacctattttaccacaactccaccctggcagggtgacgggtccaatgccttgcctgnctcccatctttaattccaccggttaatggttaatttatggccaactccagggggggnaaaaccataacaagnccctaggtttgggng

SEQ ID NO: 1356 - DNA, 638 bp, Homo sapiens
  Genbank Accession No. N49836
  unsure (1)..(638): n = a or c or g or t
aatcaagattagataagattttaatacaacatactctgctcatttgaaataaaccagtatcttccacggtttcttcaaaatatgcgacatctcacagaatactgtaaatttcagtgcaaaggatgccaccccagagacactgttgacttggcttgggtaaaggtacacatgaaaactgcttaaattaaatatctacaaaaaagaaagccaaaagacttgttttggttgagaacaataggagtccacataagtcttcaattctaggagcttcaaaatgaagaaaaggctgagatgtgttgtccttcatgttcctgttcatccaagttgcttccctttgaagaactaagaaaacactacactccataatgtattcttttggaggattccataaagtttaagttcaacatctcagcataaggatgtatgcnatagagtagctaaaatccgtaaaaaggagaccaccaagacgcaaaatgtctgtccagtgcccagtgtgagggcttcaaatgggtatcatttccttccctgctgctcggtaaactccagcaatagctgcaccatatttgtggatgtcngagggtgaagagggccagtatccagcagggcctggaagaagagggaagcaccngtgccncagg

SEQ ID NO: 1357 - DNA, 633 bp, Homo sapiens
  Genbank Accession No. N49855
  unsure (1)..(633): n = a or c or g or t
ggaattaattactcttttattagcacaaaataacagcaacctagcagccgcacgncccgagaataagttaaggcacagagcaggcgacgggcggctttcccagggccaggcctgcatgccccgaacttcctgagcaaactccctaggggctggggtttcgagggtcctggagggcctcttcccttgagatgaggggaacggaacagggcaagaggggcgcccccatgnnaaagcgggtccacgctgcgccgcgatcacttctcgaagtagggcaggtagaagaactggaagccccggtggcccttgaccgcgcagtagatgaagatcacgtgattagactccaggcaccaacaacaggaagcccggcacgaagaagatggcgctggagacaccttggaagagggggtcgcctccagttcccacgccgaccaggatcagcaccagccccagcagcangagcaggaaggaaggcagcaccactcggcggttcttctggatcaaagggtgttgggtccagctncagcaggttnttgtaaganccctgggttctgctgctgaatggtgctgaaggaccattggagcttngatggaagttcggctctcgtgcnaattnttggnctcaggcaaantcct

SEQ ID NO: 1358 - DNA, 550 bp, Homo sapiens
  Genbank Accession No. N50065
  unsure (1)..(550): n = a or c or g or t
ggagacagagtgtcgctatgtttcccaggctggaatgcagtggcactatcctggctaactccagccttgacctcctgggtacaagttatcctctcacctcagtctcccgagtagttgggactacaggcacgtgccagaacaccccactaattttgtttattttttgtagagaggaagtctcactatgttgctcaggcgggtctccaattcctgggctcaagtgatcctcccacctcagcctcccaaaatgctgggattacaggcctgagccactctgctcagctgacattttcaatcttgttattagatcactcttcctcttttctctgagctctgataactttccaaattgtactcatatccacagaggcaacaactttgggagttagattaatatccaatcttccggactacactggggtcaaaatacagcctgacaagtttttgaattggttttgaacttaagcagtaagggaccagggtccaatctctaagtgaattcctgggtgggattcaaataaagttncagacaacttagccatctttggag

SEQ ID NO: 1359 - DNA, 514 bp, Homo sapiens
  Genbank Accession No. N51702
  unsure (1)..(514): n = a or c or g or t
aagagaaaaaactttaacaaggtccatgaagcttcatatccttaaggcgtttgttatcaggagcagcaggggacagcagagtcctgcctgcgcaggaaccctctaagcagagtgcagtgggataacaaacttgcagccaaagggcgagtggtagttgatgcccacctcctggaagacctgctggggaatgccaatgtcgcacaaatagatacggcctgcgtgctcccccagtggcagaggcaggcccagtgccagtgaccatttggcatcaatgccctgttcgacttcatgcacaggagggtctatgctgagtactggtgcccggttctgggtttggcccaggccacagctgccttgtaccagggttgatcgcgcaggaagacgttctcagggcaatccaggcagttgatgaccaggtccacagggctagtgggcagatctttgaggctagacacttgttggccttgggtcttgctgaagagcgacactcatttggtgatagattccaacatnt

SEQ ID NO: 1360 - DNA, 479 bp, Homo sapiens
  Genbank Accession No. N53442
  unsure (1)..(479): n = a or c or g or t
ggtcaggaaagagcaagaacttatcgtttctgtgaatttgagaattatgataatatttttcatgccagatcnaatcaaaccaccttttatagaaaaggagccanagcggtgactgtgagctttagtcacgatcattttcctctaagcccatacaaacctttctcagaaactgcacaaaggagatgaactgaaaattatcccagacacaggaagaaggcaaaccctggaaaaggaagcaaatgagctatacctttgatgggctcagctagcccacccaactcattcangaaagaggggaagtgcataatcagaaataaatgccaatactcacaacgagaagtctgctgaggaagagcagagcaccagagttttcaaatccttgtaggaagggctngttttaaccctntgactggctacccagtctcttagaataatnggcaacagctcgagttcttaacacagcgaatctccctgttggg

SEQ ID NO: 1361 - DNA, 665 bp, Homo sapiens
  Genbank Accession No. N53547
  unsure (1)..(665): n = a or c or g or t
aataaaatagcgtgcactttatttaaaaccaaccaagcactgataaaaaatatatatcactgcagctgtgattccacatcaaacctgaacagtaagaattgggcatttattcttcacatcatgtgccaagcctggcagagaaggacatccacctccactagagcctcaaaggaaaagtggcccctaaccaccaagacagggtaccctggtggagaggggcagctggcagctcaccctgctctctgcagaccacgtnaagggaaaggagctgcctgtgttcctcccgggctgccggggtgggcactggtcagcaactccttctcggtttcaggttgtggancgatngggagagaagtgcatgcagttgtncagacaaggaggcgggtcctccctcctctttcagggtctctgaaacccccacanggcatataatgccagcaaggtcccacttgcaggcacatgccttacaaagcagcagcatcttttgctttgggctgatgggggatcaagattctgagagtgantgctcttttcttgacacaaagnaggcacaggacntttcctacatacagtatggcagcaggcaagcagaaggncctgctggctcggattaaaggncttgaaagaggancaaggtaatcctcttccctggnagccccanaagt

SEQ ID NO: 1362 - DNA, 495 bp, Homo sapiens
  Genbank Accession No. N54525
  unsure (1)..(495): n = a or c or g or t
aatgaaaaattatgaaatttatgttactgcataatggtttgatttttttttaaagggattgataaatacgctttctaatttctcagttttaatatcgattattctaaatatggagagagagaatccacagggacatggccgagcacagtggctcacgcctgtcattccagccctttgggggccngaggtgggcggatcacttgagctcaggagtttgagaccagcctgcgcaacagatgaaaccctgtctctacgaaaaaataaaacaaaacattagccgaatgtggtgtcgcacaccgctagtctcagctactcgggaggctgcggagggaggctcacttgaacctgggaagtggagttttgcagtgaagccgagatcgtgccactgcactccagcctggggtaacagaagcnagcctcagctcaggaggaaaaaaaaagaaagnatcccacggacnaaactccttggggtccnaaaagggtccagggttangg

SEQ ID NO: 1363 - DNA, 602 bp, Homo sapiens
  Genbank Accession No. N56950
  unsure (1)..(602): n = a or c or g or t
taatgaatccacttcctttattgcagtaacctctgtacaaagcagcaactgcaatactcaaggttaaaacattagaaaagcatttgtgtgacaggtatattacagtattatcaaaatattacattttcagacttacttagcagataatcatccaccagagcttaaatctttaaattatttccatagtcttaaaaaatatgtaatgtcagaatgcatataaaaagaatgtaaaaggaaacctaaaatacaaatggaataatgtaacaaataaatatttgatttcagtaactgttaataatcagctcaacaccaccattctctctaaactcaatttaattcttataggaataatgaactgtcaaatgccatggcataatttatttatttccaagctatcatcaatgattagaactaaaaaaaatttgggcataaaanggtcacaattcagcataaataaagctatttttagcttcaacactagctagcatctctaaggaattggtggaataagtcctatnaccctggaaaattttcggcctggtggncagtggttaagtggaagtaatgcnttttttttaagtggaaaagcctcctacnttatt

SEQ ID NO: 1364 - DNA, 479 bp, Homo sapiens
  Genbank Accession No. N63181
  unsure (1)..(479): n = a or c or g or t
gaggttcataaacatttattagcataaagtgttgtagaggaaatgtaacattttcaagaagaaaaacttgtatttgcatagttcacctatgtttacatggatcatggtggacatcagctcaatacactattacaatgcactaaattacaagggctttccttaaaagtgataaagcagctttattttaaaataccagtatttatgatacactggcaattacatctttttcaactaattttaggatttaaaacttcaagttatgaaagttttaaagaattgttttagttgtaacataagtaaaaancttttaattacttaataanagtccaaaacttttattaagatcacccaccctctcctaaggaaccaaatggacccaaggaaatttaccccnggaggtatttttaggagcccncaaagntaaggttaccattccacccactgggctccccnaaagggcccnccaaagtgggggatcc

SEQ ID NO: 1365 - DNA, 606 bp, Homo sapiens
  Genbank Accession No. N64681
  unsure (1)..(606): n = a or c or g or t
accgtttaagacagttatttttaatgggaatttgctgttgcacaatttgagaaccagcccatttcataataaaagattaatgttgggcttgttgttaatattgcatctcagatgtgttcttgtaggaagatctgttgaaattccaggtgctggatcatagcacttggactgttgggccggagtttgtgcagcccatgcctagcgatgctgcacctcccatgatgtcctggctttgtggcaaccccagggaggtgcagcagtttcactccttcctccactgtgtccagttttatttacacaaagcgagctgagaccacaggttcttgctctnggatgagcagcatgacaccatcaaaatttaagaccatggatgaaatttcagtttcattcaaatgttacctaaaatttatggtgtcagaataaaagggagatcatagtgagttaatttgatattcatatcctggaagtatacatatttggttttccaaaggttttatatgcaaggtttttggttgtaccnggtatccagatcttcnttttcactggtctaaacaatctaacactttcatagnatcantgggatcttggtatagagggtaacttaat

SEQ ID NO: 1366 - DNA, 482 bp, Homo sapiens
  Genbank Accession No. N72573
  unsure (1)..(473): n = a or c or g or t
tttaggctcagtgctgtccgggctggtttgccntnccctgactaacggctttctgccccttctctcgccacccctgcccaaggtcgcccctctgccttcgcccctgtcccgggagtgcggaagctttgaccccgccctgcccactcgcgtctccgcagccgtagccgcgcctgtcccaatatgaatagggtcaacgaccacttatttttataagagatattaagcccggactgaaaaacttaaatgtcgtctttattgtcctggagataggacgcgtgaccaaaaccaaagacggccatgaaagtgagatcgtgcaaaataagcagataaaaacgggnaagaatcactaatttccgtgtgggatgagatcggaaggtcttatacaagccaaggggataataatccggntgaccagagggtatgcatccatgtggnaaaggatttttgaaactttatactggagggggggtgaaacttnaaaa

SEQ ID NO: 1367 - DNA, 398 bp, Homo sapiens
  Genbank Accession No. N73382
ggtttctcttgctcacgggcctctgcattccttaggggagctggagaagcagcagggaacaaagacactctccttcaagccctgvggagcccagggggacccacagtcaaagcaaggatcgccgrcagccaaaagggaagccgcgctcagggagaggccggcggagagcacggtggaggtattaatcaatgcctccccagcccgactcaccattttaccaatttcaagagatacaattaaaagttactgctagcatgggtaatgccactgttccagcgcctaattaagccacgagctctttctcccctttccccagcctgctgccctccgaggccgagctcccagactaacacagtggaggcggagctcacggcaccctagggccatccttcctgtgt

SEQ ID NO: 1368 - DNA, 453 bp, Homo sapiens
  Genbank Accession No. N73628
  unsure (1)..(453): n = a or c or g or t
atttgctgaaatgttcttgaaccttacatggattcatggctcataactttttaaatataaatttagggctaatcatgggaacagaataagcagctgtaaacaaaatcaagttagttaggatttcactaaaacatggacagggccccaaatatcactaacnnatngcagaatgtgggaattacaaagccaaatactgtgattaaaaatactctgaataagcaatctttttggaaagaggtgggtangacggaactaatgaagtgtttccgttagttcacatcagcaccttggacagttccaaggaggctttctccctcagaaaggagcaaatatcagtatttgtctagttttctaagcattcatttccattngagtgtgttngatcccgatttatccaactaaataaantggcngaaggtaattaggtgtggtcntaaaaacccttaattcctt

SEQ ID NO: 1369 - DNA, 385 bp, Homo sapiens
  Genbank Accession No. N73802
  unsure (1)..(385): n = a or c or g or t
tgtagagacaggatcttactatgtttccccagctggtcacaaatgcctaagctcaagcaattttcctgcctttgnctcccaaagtgctgggaggtgttacaggtgtgagccactgcacctggcctacttttaatttttaaatttgttttaaatggagaacacaggaggananttngtacntaaaaggagactcaatggagaagaaaaacacagctaaataaataaataaataaatgatggaaatcagtccagaggaggtgggaagccatgggatcaaaactgcagatggaagttagaactgatgaggaggaaggacttctgttcctctgagacaggaaaggaggaaggaggattaagaagttgtaagctccagaaancatttggg

SEQ ID NO: 1370 - DNA, 487 bp, Homo sapiens
  Genbank Accession No. N74607
  unsure (1)..(487): n = a or c or g or t
aggcacatatttattttattttttttaatataaaagtaaaagagtacattgttgagtagaggattaaaggagtgacgaccctttctaaagtggggtctcccatcccggatccctaagactgtaacatctgctacatacattaaaaacaaaacaaaacaaaagcaaacatgaaacttatgacctgacttcactccacccttcatgcctgcattatgacagaaacacgtcccactgctcctacttatgtatgtacatccagagctccaaacctaagctgtggccccctcctcccagccctacccacatccaccctacttcccaaaagcctgtagaagcccccacttagaaaaaaagggcagacatacacatacacagaaacacatatctatctggcagctcctccatgtgaagcccctggaaacatacacacccngggacttttcctctccttatggcacagatgggacaggntggcctttcccctgtt

SEQ ID NO: 1371 - DNA, 371 bp, Homo sapiens
  Genbank Accession No. R02826
  unsure (1)..(371): n = a or c or g or t
gaatataggcaatctattttcctccctgcccctctctccatatccctcctccctgacttcttttttgttcttgtttaaggaatcaatccacgtggacagggagaaggaaaagggagaacaggcaccaaaatgctactggataggaaaaagaagataggtgaatatggggacatggagagggcacggacgtgggcgggcagtggaatggcccatttatacttagggtcaagaactgggccaggcctggagcatctgcaatgggtntngangcagcagagacaggaagtctgattttcaaagncatctaagaagcaggacaagttccagctcctgtccnaccctgggcagaagacagggtggctccatctctg

SEQ ID NO: 1372 - DNA, 456 bp, Homo sapiens
  Genbank Accession No. R11248
  unsure (1)..(456): n = a or c or g or t
ctaataatatttctgaatatggaagtaatgataccattccaactataaccagacattttattcccagtgggaaaatgtgtacatgagtttcaaatcggtgggggcagaaacacagctcccaccatgctcacacactgcctcacacagcaaatcgggacctggggcctgggtagacaggatgagaagatttttgagcctgagatcctccttttctacactttcaacatgtcctgaattgataggaaaaatggggactattttgggctctgtatccacttcgtttcgtcatttattttttctntttctttcttccccctcttcccttccctttcttcccttccctttcttcccttcaattcttttccttccctttcaanccttctttttttcaaaccantaattttcccataccccantttaaaggggggttttnggtggncaatngggggnaggggg

SEQ ID NO: 1373 - DNA, 503 bp, Homo sapiens
  Genbank Accession No. R19892
  unsure (1)..(503): n = a or c or g or t
tttaaaaattggtcaaaacaaggtctgggagtatgtttgtgtgtctttccagctttatcctgtagcgtgtctttgttctgtgttttagtgtcccatttagggagtgatgttttaagggtttttgtgtacttggattaagtaattagaggtgagtggggggaatgggattattgaggcaatgatttttttcttcatgggctctgatagttgcattgattgttctgtattctaattgctatatttgtgtttgcataggtgaagagcaaactgggtgcgttatcttgatttttaaaaagtaataaatcctatgagttcccagtattaacacttgcccagttctgggatccctcacaccccattgggctggagcgcatttcaaggcacccaatcgaagccagggtccatctctggaggctgctggaaagggaggtgttgagggctttaggggaaattgggagccccntgtttgccccacggaaaggggaaaggattaaggggaggtt

SEQ ID NO: 1374 - DNA, 456 bp, Homo sapiens
  Genbank Accession No. R24011
  unsure (1)..(456): n = a or c or g or t
ggaaccttagtgtgacatacacacagacacacagacgtgcacacacacacacacacacacaaaatttgtcataggttcccagttaataaatctattattgtttaatgtctttctttgtctctttgcagttttgacttaaagtactttatgtaagatatgacagtttttgacttaagatgtagcttttgtaatactattttgacctcttctgctctcatttggttaatatttgcatgcaatgtctaaatctatcttgccaccttcagtatgtttttaatcattaggatgtcagctgacccttgtagaaagggcaaattgggatcttgggtttttaatnaattttaaaatnaaatttctttattggaaagtatgtcctcttggattgggaaagttttcnggaaaccaagggggacttaccaattttttttgttgttnccatttggatcntggcatctt

SEQ ID NO: 1375 - DNA, 430 bp, Homo sapiens
  Genbank Accession No. R24723
  unsure (1)..(430): n = a or c or g or t
gcagaagatacttttatttctcggcccgtattaacactcagctctacaaaataacctataggttttaacttccttctctttcattgaaaaaggttccttngaaaaatcctgtcctcccattncccggggtncccngacttttagttcatacagataatttccctgtcagatttcctcattgcattttgaactcataaaacatgcacataaaaatagcatgttacaaatttatggagaaaatgggctctgtctcttaaatttgttgactcgaaacattttgggtggggggtcttttttcgtttttaggaagaaaggctttttaggaaaactatgtacataatctgacttctcctccccgcattgcaacgccggaaaattaaaattttttcacantggcattttgtcaagganattaattaccaagncccca

SEQ ID NO: 1376 - DNA, 490 bp, Homo sapiens
  Genbank Accession No. R26843
  unsure (1)..(490): n = a or c or g or t
tttttcaggagttcattccagttattttaatgttatttactagcagtgtgccctcgtgcacattatcaaactcctctgactcttggaatcctcatttttcaataataactcacaaagctgtcaagcctaagggttctaacagctcgaacagcacctggnacagaagcaatagccgccactcagaggttacttcttccttctccgccttctctggatcacctccctacctcatcctcaatctaacgntggaaatattggatatgggggtagggtcaccaaatgttgccagaagactcaaattatgccacccatatctcagctggggaaggggcttaccgtgggcctgactctcctcaggggtccaaggtccccatttatggatgtcccggggaaggaacactttgttttcttgacacatagtaggggccctgggaaaatnttaggtcaaatgaacgagggnttgggtttggggnaagaaggggnaattttg

SEQ ID NO: 1377 - DNA, 400 bp, Homo sapiens
  Genbank Accession No. R33841
  unsure (1)..(400): n = a or c or g or t
taaatcttctanttgagggtttattttaatcatcagtaaaataaacagcagacgaaaaaaagattagtaattaaaacggagtgtnttccattctttactctttaagcattatccatgcacttctcactgagctcacccatttgttgaaaaaggagacaaagccatatcccttagactttcctgttgccatgtcttttaccactcggggcatctctggaaatcaggaaacaatcaggaagtttagggtttgcaaactatcctctgggntatccaaataaggaatttcaccacaccacttcattctcatggtttcacccttcattaaggnggacccttttaatggccaattcacccttttnattcttccaaatttttcanggattgggggggatgngggggc

SEQ ID NO: 1378 - DNA, 513 bp, Homo sapiens
  Genbank Accession No. R35259
  unsure (1)..(513): n = a or c or g or t
cctctgcctcctgggttcaagtgattctcgtacctcagactcccgagtagttgggattacaggtgcccaccaccacacccgactaatttttgtatttttagtagccatgtggttttgccatgttggccaggctggtttcgaactcctgacctcaggtgatccacccacctcagcctcccaaagtgctgggattacaggtgtgagccaccgttcccggcctattgtagattttcttaactacttgctaaggaaatcatatccttttacatgaactacaggtttagaacttggttttaagacaactgctatggccagaaggtaaatgggaattgccttattgaaggtaacattgattgcctaataagaaaatgaattgtttgccacagagttgaatttaatttgagttagntagttcaggatgtaggcacttgccctattaaatgaatcaggtttgttcnctttatatattttaggattaatatattatnctgtaagtngggattttattttgtt

SEQ ID NO: 1379 - DNA, 460 bp, Homo sapiens
  Genbank Accession No. R37637
  unsure (1)..(460): n = a or c or g or t
tttttttttttttttttttttttttttttttttggtaagagtcagggtctcgctttnttgcccaggntgatctcgaacccctggnttcaaccaatcctcctgccttggctcccaaggtgctgggattataggcatgagcttctagtaaaagaagctgagatagcccaaaataaaatgcaaaagtaaatctgcttatcttgcacatcctcataaacttcaatatctcctttgctcagggaccattctacctaagccagtccacatctgtgatcccctaaccccaaataaaaacgtccatttntttatgtagccaatatcacagtcgtcattaaaccanttcatactaaagtgtgantgacagcccccacagngttctccataggttttccaaggaacttagggaatttacatgaatntttaattaggtataggaaggtacaagngtttatttctgggntga

SEQ ID NO: 1380 - DNA, 485 bp, Homo sapiens
  Genbank Accession No. R40393
  unsure (1)..(485): n = a or c or g or t
tttttttttttnnaacgtaaacacaaaatctcatttatttttgtctgaagcacacaggagctcactcagcacaataacagtaagcgaatcatacaaatattgagaaaaaatgttcctatgaatacatacatgtatattcttaagagtagcgatcaggagtttaacaacaaatgtaaagtggttttctctaaagaatgctttctgacaggcttttgggttggaaatggacaggtaaatcactgtcacataacaggtaagctaagantaacttctgttacccaagtcatttgaaccctgtgggactgtgaaagccctcttgggaatttacatttaattccatcattgggtctgggttgacttccacatttcactaaatttgggacaggatccncaaagtaactnctcaacttctcnggtctttnaaccttcgggtcngtgggggagggnaaggccgtgaggancggggnttgatacacttgccacgg

SEQ ID NO: 1381 - DNA, 437 bp, Homo sapiens
  Genbank Accession No. R41725
  unsure (1)..(437): n = a or c or g or t
ttttttttttttgccttttaaacattttattttgaaatattaataattttaggcttacagaaaagttacaaaagtgatacaggaaactcctgtatactctttatccagattcccccaatgtcaacaacccacatgccatgcattgcacagttatcaaaaccagggaatcatcactggtacaagactctcaagtaaactcaagaccccatttgaatgtcaccaattctcttcccaatgttatttttctgttccgggntccaatccggggatcccacatgggcattcattcctcatatctccttaggtctcctccaacctgtggacaccctcccaggtccctccttgtctttcatggaccatggacacccgggggtgganttaccgggtcagtcattttggcaaaattacattcccaccctgtggttgttggaacggcc

SEQ ID NO: 1382 - DNA, 481 bp, Homo sapiens
  Genbank Accession No. R44987
  unsure (1)..(481): n = a or c or g or t
ttttttttttttttttgagacagagtctctactgtcgcccaggctggagtgcagtggtgtgatcctggctcactgcaaactccacctcccgcgttcaagngattctcctgcctcagccttccgagcagccggaaccacaggcatgcaccaccatgcctggctaatttttgtatttttagtagagatgaggtttcactgtgttggccaggctggtctcgaactcccgacctcgtgatccacctgcctcagcctcctaaagtgccgggactacaaggtntaagccgccatgcccagccttgttttatatttctatgagcaccctccaaattctcattctgaaaagaaacttgaaatactccatggctaaaggcaggtgacttgggagttaaataccaaacctttaaaacaggcataattcagtgaagagggttttaacaggttgccaaataagaccataaaattgttgctgagggaaatttta

SEQ ID NO: 1383 - DNA, 537 bp, Homo sapiens
  Genbank Accession No. R45447
  unsure (1)..(537): n = a or c or g or t
ttttttttgttttaaacactttatttataaaaaagtacatttttaatcctcagtacattttcaacccatcatttttttttaatacaagtaaaagggggtgatgcaaacacccccaggtcagaaccaggaggatctgctgggctgtccctggaccaaaggcggaaagggcgacaagacgccgaagcaaggtagcgcatcacgctgggaggggagggtggcagcttctcctgggattcttttcatttatacaaaaaaggaaaaccaattttttcgaccaagantcccattcctcacaggcaggggtcagaagagcagcagcaccgagtggggacaggggctcctcctgggccttcacaagctggggcagtttttgggcagcagtggccagcagcagaggggcctgcctcctggggattccccggttatttgggcattttttgaagcntccttttgggtttttggggacctcggggcacaaccaccttncccttnattaggggaggnttttttttngcattcangttttngggtttcttt

SEQ ID NO: 1384 - DNA, 430 bp, Homo sapiens
  Genbank Accession No. R53734
  unsure (1)..(430): n = a or c or g or t
nattcggcatgaggggaagaataagtccatgtactgtaccacagaagttctgtctgcatcttggacctgaacttgatcattatcagcttgataagagactttttgactctatatccttgcagttaagaagaaagcacttttttgtaatgtttgttttaatggttcaaaaaaaatctttcttataaagagcataggtagaattagtgaactctttggatcctttgtacagataaaggttatagatttcttgtgttgaatattaaaaaagcaaggatgtctaaccattaaggattatccactgtgcctggccccaagttttgcatcttttaatgccctctggaacaaatacataggggaaaactctcaggaacaattaaaacctggcggggcaacagtgttccntccctgtcntaggggttccaggtttggc

SEQ ID NO: 1385 - DNA, 522 bp, Homo sapiens
  Genbank Accession No. R54310
  unsure (1)..(522): n = a or c or g or t
aagattcaaaaatggaatcatttttggacatgcagctaactgaagacctgggattccttaatacagaatgcnnttgagaaattgaactcttctcctgatgaccaagtatactcatttttgccttcacaagatgttaatagttttaatgactcaagtgagtttataaatcctgattcaagtaatatgactcccattttttctacacaaaatatgaatttgaacggtgaaaatttagagaattctggttctactttaagtttaaacccattaccttcacattcagttttgaacgagtccaagtgttttataaaggataacacattggctttgggaaagtaactacccggaagattctcttctcagtagttctttaaatgtaggcaagtgactccatcgcaggttgtagcagtcttcaatcaaaaacaggaaaggaacttttaggattccgagtgcgttgagggntcatttctccgaagctccngtaggtttgggtgccngtggaacctcgggttgttttaattt

SEQ ID NO: 1386 - DNA, 493 bp, Homo sapiens
  Genbank Accession No. R54585
  unsure (1)..(493): n = a or c or g or t
ttttttttcttttcagtgttttatttttcaaaatatacaatttaagtttttatttcacaaccgtagttttgtatatttattccaaaatctttaaatagctccgcagcaaacagtacaaatcacaaggtccgtcaaactgcttctctttagcctttacacttggcgagttttttaagtttcaagtagtaatggtttgtgggtaagaaaggaaccaaaaacaggaggaaacaacattttttacataagctcaacatgtaggattagaaagggccgtctgaccagctccttgggtctggggaccaggacttaaggaacatgtatctggtttataaataaggaccgtcctggggagncagtgagggttttggttacgagggagggaagggggcagggaacctcattctgncgggaggctggggagggcagggggngaggtgagggcantgaggaggtgggntccttttggggagcgcccnagttaggggccttgagc

SEQ ID NO: 1387 - DNA, 492 bp, Homo sapiens
  Genbank Accession No. R60584
  unsure (1)..(492): n = a or c or g or t
tttttttttttttagttttccacaaaggctgttagttttgttttgttttttcctttattgatgggatttaaagtgcatataactgaaggcaaagtccaaggcctagagaaagatatgaggcccgagagagaggctcagagattctagaggcggctgaagaatacccacctaaaaaggccacttgagccacgcaggctgtgccatacctcgttgggctcgtagcccgactgcacttcttgttggtccggcacctgtagcttccataggtgttgacacatacgggcttgtctcgagggcacacgaatgggaactggatgcattcattggtgtccatggcaatggccattttcctgctgggagnaatccttggccacactccantggggctgggtcctgaagtgtgtcctcatcccgggggtaggaggatctccagcactgagttcatntccccgntggccacgtttccggntcaccatnttgccatttggccac

SEQ ID NO: 1388 - DNA, 551 bp, Homo sapiens
  Genbank Accession No. R61210
  unsure (1)..(551): n = a or c or g or t
gctcagccattgggtttaagcagagggctacagaaaacagggaagagacatacccctgggcttggattcccagagaggaaaccttggggccccagatgtgtcctcctgatctccctgagctattaatggtgtgatgcccgaggctgnggcctttgagtctctcctcttccccagcttctagccttcccccatctcctgtcgttttcgacacagcagccagaaggatcctttaaaaacagaggttgatcctgtcgttcctcaaaatcctccaatggttttcctactgcactcagagtaaaagccagtctctgccttagatgctctgggatcctgtaccctctttggtctcatgtcctacaatctggcattctgggccataatgggtcttctctggctgttccttggaacattccagggaacattccccccattcccctcgtgggccttcaggattgggcttgtttcctttgggtatggtaattttgantacaaattaaggaaccttccttnaactgttantaaaaaattngttggggagggcatagggtgaa

SEQ ID NO: 1389 - DNA, 423 bp, Homo sapiens
  Genbank Accession No. R67332
  unsure (1)..(423): n = a or c or g or t
aattcagtaatatattttatttaactcaatatacccaaaatatcatcattccatcaggtaatcattattaaaaatattaatgagatattttactttttttctccttcttttgcattaagtctttgaagtccagcatgggttttacacttctagcacatctcatttgggattagctacatttcaagtacttattaatagtagccacctgtggctagntagctactatattgggtattgccggcctagggattctttttcacatgctgatacctaacttttattttatttctattttgtcactttgttttaaaggacaggaaccatttaggggctcaaggtcttatggtcagatgggaaatttttccccaggtttctacggnattcctataggcaggtttctatgnggggatagggattttggtc

SEQ ID NO: 1390 - DNA, 449 bp, Homo sapiens
  Genbank Accession No. R77227
  unsure (1)..(449): n = a or c or g or t
ttctttaatggaaagacagccaccgacctcagaagcagcccctccttgcgctggaccagaaggataaggggagacctagccaccagtgggccagtgggggtgaggggcttctaggaaaaccggtgtctgggactctggcggttgatggtgtcatctgcgcgggatgctgggcctccacctcccaacctcctccgggacagtacaggtttgggggcaaggctgagcagggcaggctggggagaccgctgtccctggggttttgtgggcaggggctgggtgcaggccggacagacagaaagcagtcccagctcaaggcagaaggccagagggtttggagtgaaagggacaggcgacagggtttcggagagntgggagggaacaggccaccaagcttcagaagccagaaaggttttnagggaagcacaagncacacacacacacanacacac

SEQ ID NO: 1391 - DNA, 588 bp, Homo sapiens
  Genbank Accession No. R78708
  unsure (1)..(588): n = a or c or g or t
ctggggcaacatggtnaaacccccatctctaccaaaaaatacaaaacttagctggacgtggtggcacgtacctatagtcccagctactcaggaggctgaggtgcgaggatcatttgagctctagaggttgaggcttcagtgagctgggattgtgccaccaggaagccagaagctcagggcccagccttgncctttggtacctgccctccccttggtctcatgagcgtcttttcagctttgtggactttgtttcctgccctctctttcctatttcctgccttccagccccacccctctgtccctagattgtgtgactcccttcaggcagtcctttagtcaccagcctcacctttgctctcaatgtcatgcagccgctcctgccagaatccccggaagggccaaatngcagtgcnggggacccaccagggttgcagggcaagctggggatcgggttggcagccggaaggaggggagcctnggaaggagagacattcatcaggtcccttttgcttttctgnttcaacatttttaacatgcagggtgggtggagcaaggaggaccaagtttttncattttaaaaaaatttaa

SEQ ID NO: 1392 - DNA, 467 bp, Homo sapiens
  Genbank Accession No. R86170
  unsure (1)..(467): n = a or c or g or t
gttatctcagtgccgctttgtttcccaccccagtcggacagcccttcctcagcgccctttaacccttgcannnntngatggagaaagctgccagcacgttctagggatgggggcagatnggggagcgggagggagtagtctttgtctaactttataccagtaccaaactatgttaatttaatgtagttttataataaatctttaagtcctgtaacttattctcccaagattgttttggcttattctacggcctttgtatttctaggtgaattttggaattagcttgttaaaaagggggggggattttttattggggctcgcattgaatctatagatctgtttggggaaaactagtatcttaacaacaagtccntcaatccatgaatatcattcttcccccaccatttatttaaaggcggtctttaatttcncccgggcaataatttgtaggatgcacatatatccat

SEQ ID NO: 1393 - DNA, 296 bp, Homo sapiens
  Genbank Accession No. R95918
  unsure (1)..(296): n = a or c or g or t
gagtagctggactataggcgcacaccacctcacccagttgaactggctctactttccgatcccatcttcctcccaagcaagaggcctctctcctgtcanccccagctacttactactcaacaggngtcccctccttcttgcctgtcagcacccaccccgngtacattctccccctgaccctccacancgggggcacctcattccctggctctcaggctttcctcagggcagntcaggcaaaacttttattccatgaaggtaaggaacatccgttacatccgtctgtctttcngggg

SEQ ID NO: 1394 - DNA, 1711 bp, Homo sapiens
  Genbank Accession No. S66896
ctctctgcccacctctgcttcctctaggaacacaggagttccagatcacatcgagttcaccatgaattcactcagtgaagccaacaccaagttcatgttcgacctgttccaacagttcagaaaatcaaaagagaacaacatcttctattcccctatcagcatcacatcagcattagggatggtcctcttaggagccaaagacaacactgcacaacagattaagaaggttcttcactttgatcaagtcacagagaacaccacaggaaaagctgcaacatatcatgttgataggtcaggaaatgttcatcaccagtttcaaaagcttctgactgaattcaacaaatccactgatgcatatgagctgaagatcgccaacaagctcttcggagaaaaaacgtatctatttttacaggaatatttagatgccatcaagaaattttaccagaccagtgtggaatctgttgattttgcaaatgctccagaagaaagtcgaaagaagattaactcctgggtggaaagtcaaacgaatgaaaaaattaaaaacctaattcctgaaggtaatattggcagcaataccacattggttcttgtgaacgcaatctatttcaaagggcagtgggagaagaaatttaataaagaagatactaaagaggaaaaattttggccaaacaagaatacatacaagtccatacagatgatgaggcaatacacatcttttcattttgcctcgctggaggatgtacaggccaaggtcctggaaataccatacaaaggcaaagatctaagcatgattgtgttgctgccaaatgaaatcgatggtctccagaagcttgaagagaaactcactgctgagaaattgatggaatggacaagtttgcagaatatgagagagacacgtgtcgatttacacttacctcggttcaaagtggaagagagctatgacctcaaggacacgttgagaaccatgggaatggtggatatcttcaatggggatgcagacctctcaggcatgaccgggagccgcggtctcgtgctatctggagtcctacacaaggcctttgtggaggttacagaggagggagcagaagctgcagctgccaccgctgtagtaggattcggatcatcacctgcttcaactaatgaagagttccattgtaatcaccctttcctattcttcataaggcaaaataagaccaacagcatcctcttctatggcagattctcatccccgtagatgcaattagtctgtcactccatttggaaaatgttcacctgcagatgttctggtaaactgattgctggcaacaacagattctcttggctcatatttcttttctttctcatcttgatgatgatcgtcatcatcaagaatttaatgattaaaatagcatgcctttctctctttctcttaataagcccacatataaatgtactttttcttccagaaaaattctccttgaggaaaaatgtccaaaataagatgaatcacttaataccgtatcttctaaatttgaaatataattctgtttgtgacctgttttaaatgaaccaaaccaaatcatactttttctttgaatttagcaacctagaaacacacatttctttgaatttaggtgatacctaaatccttcttatgtttctaaattttgtgattctataaaacacatcatcaataaaatagtgacataaaatcaaaaaaaaaaaaaaaaaa

SEQ ID NO: 1395 - DNA, 2304 bp, Homo sapiens
  Genbank Accession No. S74017
ttggagctgccgccgccgggactcccgtcccagcaggacatggatttgattgacatactttggaggcaagatatagatcttggagtaagtcgagaagtatttgacttcagtcagcgacggaaagagtatgagctggaaaaacagaaaaaacttgaaaaggaaagacaagaacaactccaaaaggagcaagagaaagcctttttcactcagttacaactagatgaagagacaggtgaatttctcccaattcagccagcccagcacacccagtcagaaaccagtggatctgccaactactcccaggttgcccacattcccaaatcagatgctttgtactttgatgactgcatgcagcttttggcgcagacattcccgtttgtagatgacaatgaggtttcttcggctacgtttcagtcacttgttcctgatattcccggtcacatcgagagcccagtcttcattgctactaatcaggctcagtcacctgaaacttctgttgctcaggtagcccctgttgatttagacggtatgcaacaggacattgagcaagtttgggaggagctattatccattcctgagttacagtgtcttaatattgaaaatgacaagctggttgagactaccatggttccaagtccagaagccaaactgacagaagttgacaattatcatttttactcatctataccctcaatggaaaaagaagtaggtaactgtagtccacattttcttaatgcttttgaggattccttcagcagcatcctctccacagaagaccccaaccagttgacagtgaactcattaaattcagatgccacagtcaacacagattttggtgatgaattttattctgctttcatagctgagcccagtatcagcaacagcatgccctcacctgctactttaagccattcactctctgaacttctaaatgggcccattgatgtttctgatctatcactttgcaaagctttcaaccaaaaccaccctgaaagcacagcagaattcaatgattctgactccggcatttcactaaacacaagtcccagtgtggcatcaccagaacactcagtggaatcttccagctatggagacacactacttggcctcagtgattctgaagtggaagagctagatagtgcccctggaagtgtcaaacagaatggtcctaaaacaccagtacattcttctggggatatggtacaacccttgtcaccatctcaggggcagagcactcacgtgcatgatgcccaatgtgagaacacaccagagaaagaattgcctgtaagtcctggtcatcggaaaaccccattcacaaaagacaaacattcaagccgcttggaggctcatctcacaagagatgaacttagggcaaaagctctccatatcccattccctgtagaaaaaatcattaacctccctgttgttgacttcaacgaaatgatgtccaaagagcagttcaatgaagctcaacttgcattaattcgggatatacgtaggaggggtaagaataaagtggctgctcagaattgcagaaaaagaaaactggaaaatatagtagaactagagcaagatttagatcatttgaaagatgaaaaagaaaaattgctcaaagaaaaaggagaaaatgacaaaagccttcacctactgaaaaaacaactcagcaccttatatctcgaagttttcagcatgctacgtgatgaagatggaaaaccttattctcctagtgaatactccctgcagcaaacaagagatggcaatgttttccttgttcccaaaagtaagaagccagatgttaagaaaaactagatttaggaggatttgaccttttctgagctagtttttttgtactattatactaaaagctcctactgtgatgtgaaatgctcatactttataagtaattctatgcaaaatcatagccaaaactagtatagaaaataatacgaaactttaaaaagcattggagtgtcagtatgttgaatcagtagtttcactttaactgtaaacaatttcttaggacaccatttgggctagtttctgtgtaagtgtaaatactacaaaaacttatttatactgttcttatgtcatttgttatattcatagatttatatgatgatatgacatctggctaaaaagaaattattgcaaaactaaccacgatgtacttttttataaatactgtatggacaaaaaatggcattttttataattaaattgtttagctctggcaaaaaaaaaaaattttttaagagctggtactaataaaggattattatgactgttaaaaaaaaaaaaaaaaaa

SEQ ID NO: 1396 - DNA, 833 bp, Homo sapiens
  Genbank Accession No. S82240
cagaaattatccagcaaatctatcatggatcctaatcagaacgtgaaatgcaagatagttgtggtgggagacagtcagtgtggaaaaactgcgctgctccatgtcttcgccaaggactgcttccccgagaattacgttcctacagtgtttgagaattacacggccagttttgaaatcgacacacaaagaatagagttgagcctgtgggacacttcgggttctccttactatgacaatgtccgccccctctcttaccctgattcggatgctgtgctgatttgctttgacatcagtagaccagagaccctggacagtgtcctcaaaaagtggaaaggtgaaatccaggaattttgtccaaataccaaaatgctcttggtcggctgcaagtctgatctgcggacagatgttagtacattagtagagctctccaatcacaggcagacgccagtgtcctatgaccagggggcaaatatggccaaacagattggagcagctacttatatcgaatgctcagctttacagtcggaaaatagcgtcagagacatttttcacgttgccaccttggcatgtgtaaataagacaaataaaaacgttaagcggaacaaatcacagagagccacaaagcggatttcacacatgcctagcagaccagaactctcggcagttgctacggacttacgaaaggacaaagcgaagagctgcactgtgatgtgaatctttcattatctttaatgaagacaaaggaatctagtgtaaaaaacaacagcaaacaaaaaggtgagtctaaatgaagtgcacagccaaagtcatgtataccagaggcttaggaggcg

SEQ ID NO: 1397 - DNA, 348 bp, Homo sapiens
  Genbank Accession No. T47055
  unsure (1)..(348): n = a or c or g or t
atagtatttatcacaatataaaattacttcattttccacttttaatttaaaatcttttttttttctccagactagaatgtaaacctcatgtgggcagcagacatgtctnttacctttttttttttttttgagacggagctcgnctctgtcacccaggctggagtgcaacggcgcgatcccggctcactgcaacctccacctcccagggntcaagcgattctgctgccccagccttccaaggaagctgaggattacagggcgcccaccaggggccgggctaaatttttggtatttttaggtagggggagcaggtcggggctctgggacttacatttcccctcgtgccgn

SEQ ID NO: 1398 - DNA, 559 bp, Homo sapiens
  Genbank Accession No. T54146
  unsure (1)..(559): n = a or c or g or t
aatttcatnatttatttatttatttattttttgagatggagtctcactctgtcatccaggctggactgcagtgatgcgatctcggctcactgcaacctctgcctcccgggttcaagcaattctcccgcctcaggctcccaagtagctgggattacaggcatgcgccaccacgtccgggtaatttttgaattttttagtatagacggggtttcaccatgttggccaggctggtctcaaactcctgacctcaagcgatctgcctgcctcggccccacagagtgctgggactacaggcatgagccactgagcccggcttgcagtgtgcttttagacaacagaacaaacagatgatatggggaaaagggctcgggattcacctgggcttcaaatcctgggtgctggacacccatagctctgtgggccttgggtcacgnctcttatcctctctngaacctcagtctcttcttcaaaacatgggaggatgaccctccctgagggccttnctctgagggcgttaaaattaatgaatangaaggtcttggcactnggggctgatgtt

SEQ ID NO: 1399 - DNA, 583 bp, Homo sapiens
  Genbank Accession No. T68813
  unsure (1)..(583): n = a or c or g or t
taagatggtcaactacantgcagtatcagcaagtgtgcgacgctctcttcctcatcttctcctttgtcttcttctacacccgactggtcctctttcccacccagatcctctacaccacatactacgagtccatcagcaacaggggccccttcttcggctactacttcttcaacgggcttctgatgttgctgcagctgctgcacgtgttctggtcttgcctcattctgcgcatgctctatagcttcatgaagaagggccagatggagaaggacattcgtagtgatgtagaagaatcagactccagtgaggaggcngcggcggcccagggaacctctgcagctaaagaacgggnacagctgggagggcccaggccagcccccacttgatgggccctcgggagccgggttgcccgggcgttcttgaccaacagggcacacaacagncacattagcccgggcggtgantggcttttaaggggtttacccccccgccagttgccttngggtatttttttgggnttaattngatttggcngccctgggnaaaccttttttggaaacnagggatggncccaaccgggtgg

SEQ ID NO: 1400 - DNA, 478 bp, Homo sapiens
  Genbank Accession No. T69015
  unsure (1)..(478): n = a or c or g or t
tttttttgcattatagttttataacttgggggatggggcaaaaaggagggagaagtntaaaaaacaaatggagtgggncacaggaattntcagaaatggaggcttaggctgtccatacaggattcagcaagtacttggggactgcgactagaagaagccagggtngggantaagtagctgaggaggagagggagctgatntggaggagagcaagggcaacttcaaggaacaaaagggaagctgcaagnaccagctccattaattcagcanacattccttgtctgtatgccatgccagggtccttgttctatggttctctcagtggggtagctagaaacttgcccaacagacaggaacagncagangccaaagcaaaganttcctnaaaggtagccggcctgntgccaaacctggggacaaactttatggaggcgccgtnttttagccagaccccganttaaaccttggtcccancctg

SEQ ID NO: 1401 - DNA, 517 bp, Homo sapiens
  Genbank Accession No. T71258
  unsure (1)..(517): n = a or c or g or t
aagacacagagtctcgcatgtcaccaggntggaatgcagtgatnaatcacagctcacagcagccntcaaactcctgggctcatgcaatcatcctaccccagtctcctgagtagctgggactacagatgctttttctaattctttattattttatttatttatttatttattttgagatggagtctcgctctgtcgcccaggctggagtgaagctccgtctcaaaaaaaaaaaacaaaaaaaacccaacccttgcgtaatttgatcttgatagtccagcagcatagctagaaatttagattcttccaaacaagtttataagagcaaaagctagggggtacaatgccatacctttcttgggtgtatttntccggggaagatggctaaaagtggggaatccactgaggactgcggccaactttcaccagttcacatcgtgaaattcggttagccttttntcacctaaaaggaacaattttcttgtaggggcnacaccaaaggntgaaatnccaaaggggt

SEQ ID NO: 1402 - DNA, 428 bp, Homo sapiens
  Genbank Accession No. T72642
  unsure (1)..(428): n = a or c or g or t
tcattcattcattcattcattcattatctctgtctctaccatttctgcctctcgtctttcttctcacatcatctcaacagccttccttcttaaagtggacccctggatcagcagcagcacatgagcccttataagaaatggaaatgctctggcggacccttccacctagtgaatccaaatctgcagtttaagaagatttccagctgattcctggggcatatgaaagttggagaagcattgcttaagtggtccttgcatgcaaaaaccggtgggcgataaatcagaggacaagctcaggggtctcagtttccaaacagctcacattaaagtttgcggaaacaggtgttctccatcattttcaggaccaggctgtctagaggggctttaggatactactttgtttcgggctattgggcccctaggncaca

SEQ ID NO: 1403 - DNA, 530 bp, Homo sapiens
  Genbank Accession No. T75313
  unsure (1)..(530): n = a or c or g or t
taanctcatcttagtgaattttaaattatccagagatgtcaaactgccaaataaaaatatttcagtagtctttgcatcagcttaccnttgtaccagaaacattncaatttactatcaaattatagtaactgagcctgtgtgaagtatctcatcattttcgaaaggaacaccttgtgtgatgccagtgagcatttctaaaaagggtgtgaggtagaggtaaggtgagagaccatttcagaatgcactgttgctcaaaaaggtgatctggttctttcttcagagatttctacggggatagaaaatcgggagtctgccctcattaatctgtgactccacctcttgcatcaaatcaatatctatttgttggggcacttattggatttaagaccttggcatatgtcttgtccattttgatttgggganacaactttttgtgtggggttngatggaccaaatccactccaaacaaggctgggggnacagaggaatcagctaggggggaccagttattcaggggtccctttcctctt

SEQ ID NO: 1404 - DNA, 569 bp, Homo sapiens
  Genbank Accession No. T79615
  unsure (1)..(569): n = a or c or g or t
ttgccttaattgttgaagggtatttttgctggatatagaattctggattgacatttctctcagtactttaacgatgttctgtagttacttgaatcgctgaaaggcttaaagttggggaccagctctatcacctatacattttatagaaaggttcattactttcatatcttcattgtggaccatagcctttatcatcacaaaatttggtctcatttatgagtttttaaattttgctttgaacctaaacttttataactcctttctatttcctacaatgtgggagtttatgggcgggacagcacagggcagttgggaaatatatatctgggagtttaggaaaagagggtctagggtaggggaaaatgggatcctaggaaggtcattggatattttgggccggggcgcgggtggncccatgccctggtaatccccagcctcttccctcctatcattttncgtggttctgggagacagtaggccaactnggcccgggggntttgacataaacctaggttctncataagggaagncaggggggccaaaatgaggttctggggncaaacctaaag

SEQ ID NO: 1405 - DNA, 453 bp, Homo sapiens
  Genbank Accession No. T79705
  unsure (1)..(453): n = a or c or g or t
aatagggcagggctgatgggcattgagtccctgcacagtccacccacaagcccctggggcttaagggataaatcctcgctctcctctgtctcctggtttaggtgatctttgacgagactctacagaagtgcctggactcctacctgcgctatgtcccccgcaaattcgacgagggggtggcctcagcccctgaggttgttgacatgcagaagcgcctccatcgaagtgtttttctcaccttcctccgcatgtccactcataaggaatccaaagatcacttcatttccccttctggcgtttgggagaaatcctctaacaataactttcctctttgacatttccaaagatccggggacctntggcgtggttctttgggaaaagggcaattcaccactgtttccaggaagatggntagggaaacatctttacacaggcagccaagtttattacagt

SEQ ID NO: 1406 - DNA, 329 bp, Homo sapiens
  Genbank Accession No. T86696
  unsure (1)..(329): n = a or c or g or t
tttaangtttgatgtttattggtggtgtctgatgagcgtttctcttgtccagactgtgtttctctctccagaccagctcccagggtacagggggtggggagtaggtggtagctgtgtcagtgctgggccctggngccactccctagggaagagcaggtggggcctcggggggtctggccctagctctggcagatccatcctcagtgaagcacatccctggggcaaaggcactcctgaggccaagaccagcatgggcttgatggagccaccccagggagccccaagagagatgaagccatcaataaagcggnccttccaggcctgggnct

SEQ ID NO: 1407 - DNA, 517 bp, Homo sapiens
  Genbank Accession No. T89638
  unsure (1)..(517): n = a or c or g or t
acggggtctcgcatccgtcatccaggccggggtcnccacgggcacgatctcagctcatcgcaacctcggcctccccggttggaacaagtcgcccgccccagtctcccgagcggtcgtgattccaagcccacgccaccaggccggctaatcgttctatttttcagagagacggggtttcgccacgtcggccagcctggtctcgaactcccggccccaagcgatccacccgcctcggcctcccaaagtgccggagtgacaggcgtgagtaagcgtgcccggcccagatcatctttttcatcaattgtagagaaggggtttcgtcagccaacgggtgggagggttgggcgggttttacttcagccttgcgtacttgtgaaaagggggaagttgagtnttgcttcttgttgaacttagatattgggaaattttgttgttgttgttgttgcgcgcgtgttnnccggaagnagagaagagagagagaagaagagagagagagagagagagagaccaatnccac

SEQ ID NO: 1408 - DNA, 495 bp, Homo sapiens
  Genbank Accession No. T92888
  unsure (1)..(495): n = a or c or g or t
gatagttggnggatatgagaaattctttctttctggatgtgtggatataaggcctgaaactgctgtgattatctgctattgtgagggaagaaaccagctgaagataaagccaacacatcagcaagaccaggtctgaaagcatggtaccctgatcaaacaatacctaaagttcattctactgctagacttttcagctgtgacaaaagtcatttctttttactctgtaggcaagtttgaattgggttttctattataataaaaaaaatcctaactcatggaaaagataacatttattggatgctttctaaactccagggcagcgtgctaaatatctcacggtcaattaattcttttatcaatctctgtgattaggtactattaatttctcattttataaatgatgaagctgaagtataggtaaggttaacttacccacggncatacctagggcaaaggactgggattaacncccctgtcctattttacntgccngtt

SEQ ID NO: 1409 - DNA, 458 bp, Homo sapiens
  Genbank Accession No. T92947
  unsure (1)..(458): n = a or c or g or t
gagacatgtnntngcnctgtcgcccaggccccngagtgcaatggcatganctcagctcactgcaacctccgcctcccgggttcaagcgattctcctgcctcagcctcccaaagtgctgggattacaggcctgagcacagcgcccgacccggagagctgtttctnaatctgcctggaggaaaatccccagcccccaactttccacatacttcacatagataacactgtaacaactttgaaactaagagggagagaattaagttttcaaatttgaaattgagaagcctttgaagagtggcagcgttctagaaagttccatgattgaacaagtgaagcaaaaaactagggatagactcaactgaccatctgaactccagggggattaatagccagtgctttggggcatctggctgggagccatgggtacgcaccagttgtacaagttatttcantttaatt

SEQ ID NO: 1410 - DNA, 8833 bp, Homo sapiens
  Genbank Accession No. U01062
cgccccccacgccctgggccccggagggccgcagccatgagtgaaatgtccagctttcttcacatcggggacatcgtctccctgtacgccgagggctccgtcaatggcttcatcagcactttggggctggtggatgaccgctgtgtggtggagcccgcggccggggacctggacaacccccctaagaagttccgtgactgcctcttcaaggtgtgccccatgaaccgctactcggcccagaagcagtactggaaggccaagcagactaagcaggacaaggagaagatcgctgatgtggtgttgctgcagaagctgcagcatgcggcgcagatggagcagaagcaaaatgacacggagaacaagaaggtgcatggggatgtcgtgaagtatggcagtgtgatccagctcctgcacatgaagagcaacaagtacctgacagtgaacaagcggcttccggccttgctggagaagaacgccatgcgggtgactctggatgccacaggcaacgagggttcctggctcttcatccagcccttctggaagctgcggagcaacggggacaacgtggtcgtgggggacaaggtgatcctgaatcctgtcaatgccgggcagcctctgcatgccagcaattacgagctcagcgacaacgccggctgcaaggaggtcaattctgtgaactgcaacaccagctggaagatcaacctgtttatgcagtttcgggaccacctggaggaggtgttgaaagggggagacgtggtgcggctgttccatgcggagcaggagaagttcctgacgtgtgacgagtacaagggcaagctgcaggtgttcctgcgaactacactgcgccagtctgccacctcggccaccagctccaatgctctctgggaggtggaggtggtccaccacgacccctgccgtggaggagctgggcactggaatggcttgtaccgcttcaagcacctggctacaggcaactacctggctgctgaggagaaccccagttacaaaggtgatgcctcagatcccaaggcagcaggaatgggggcacagggccgcacaggccgcaggaatgctggggagaagatcaagtactgcctggtggctgtgcctcatggcaatgacatcgcctctctctttgagctggaccccaccaccttgcagaaaaccgactctttcgtgccccggaactcgtacgtccggctgcggcacctctgcaccaacacgtggattcagagcaccaatgtgcccattgacatcgaggaggagcggcccatccggctcatgctgggcacctgccccaccaaggaggacaaggaggcctttgccatcgtgtcagtgcccgtgtctgagatccgagacctggactttgccaatgacgccagctccatgctggccagtgccgtggagaaactcaacgagggcttcatcagccagaatgaccgcaggtttgtcatccagctgctggaagacctggtgttctttgtcagcgatgtccccaacaatgggcagaatgtcctggacatcatggtcactaagcccaaccgggaacggcagaagctgatgagggagcagaacatcctcaaacaggtctttggcattctgaaggtcccgttccgtgagaaggggggtgaaggtcccctggtgcggctggaggagctgtcagaccagaagaacgccccctaccagcacatgttccgcctgtgctaccgtgtgttgcggtattcccaggaggactaccgcaagaaccaggagcacattgccaagcagtttgggatgatgcagtcccagattggctacgacatcctggccgaggacaccatcactgccctgctgcacaacaaccgcaagctcctggaaaagcacatcaccaagaccgaggtggagaccttcgtcagccttgtgcgcaagaaccgggagcccaggttcctggactacctctctgacctgtgtgtgtccaaccacatcgccatccccgtcacccaagagctcatctgcaagtgtgtgctggaccccaagaacagtgacattctcatccggaccgagcttcggcccgtgaaggagatggcccaatcccacgagtacctgagcatcgagtactcagaagaggaagtgtggctcacgtggactgacaagaataacgagcatcatgagaagagtgtgaggcagctggcccaggaggcgcgggccggcaacgcccacgacgagaatgtgctcagctactacaggtaccagctgaagctctttgcccgcatgtgcttggaccgccagtacttggccatcgacgagatctcccagcagctgggcgtggacctgattttcctgtgcatggcagacgagatgctgccctttgacctgcgcgcctccttctgccacctgatgctgcacgtgcacgtggaccgtgacccccaggagctggtcacgccggtcaagtttgcccgtctctggactgagatccccacagccatcaccatcaaggactatgattccaacctcaacgcgtcccgagatgacaagaagaacaagtttgccaacaccatggagttcgtggaggactacctcaacaatgtagtcagcgaggccgtgccctttgccaacgaggagaagaacaagctcacttttgaggtggtcagcctggcgcacaatctcatctacttcggcttctacagcttcagcgagctgctgcggctcactcgcacactgctgggcatcatcgactgtgtgcaggggcccccggccatgctgcaggcctatgaggaccccggtggcaagaatgtgcggcggtccatccagggcgtggggcacatgatgtccaccatggtgctgagccgcaagcagtccgtcttcagtgcccccagcctgtctgctggggccagtgctgctgagccgctggacagaagcaagtttgaggagaatgaggacattgtggtgatggagaccaagctgaagatcctggaaatccttcagttcatcctcaacgtccgcctggattaccgcatatcctacctgctgtctgtcttcaagaaggagtttgtggaggtgtttcccatgcaggacagtggggctgatggcacagcccctgccttcgactctaccactgccaacatgaacctggatcgcatcggggagcaggcggaggccatgtttggagtggggaagacaagcagcatgctggaggtggatgacgagggcggccgcatgttcctgcgcgtgctcatccacctcaccatgcacgactatgcgccactggtctcgggtgccctgcagctgctcttcaagcacttcagccagcgccaggaggccatgcacaccttcaagcaggttcagctgctgatctcagcgcaggacgtggagaactacaaggtgatcaagtcggagctggaccggctgcggaccatggtggagaagtcagagctgtgggtggacaagaagggcagtggcaagggtgaggaggtggaggcaggcaccgccaaggacaagaaagagcgtcccacggacgaggagggctttctgcacccaccaggggagaaaagcagtgagaactaccagatcgtcaagggcatcctggaaaggctgaacaagatgtgcggggttggggagcaaatgaggaagaagcagcaacggctgctgaagaacatggatgcccacaaggtcatgctggacctgctgcagatcccctatgacaagggtgatgccaagatgatggagatcctgcgctacacgcaccagttcctgcagaagttctgtgcagggaaccccggcaaccaggccctgctgcacaaacacctgcacctcttcctcacgccagggctcctggaggcagagaccatgcagcacatcttcctgaacaactatcagctctgctccgagatcagcgagcctgtgttgcagcacttcgtgcacctgctggccacgcacgggcgccatgtgcagtacctggacttcctgcacaccgtcattaaggccgagggcaagtacgtcaagaagtgccaggacatgatcatgactgagctgaccaatgcaggtgacgatgtggtcgtgttctacaatgataaggcatcgctggcccacctgctggacatgatgaaggccgcccgcgacggcgtggaggaccacagccccctcatgtaccacatttccctggtggacctgctggccgcctgtgccgagggcaaaaacgtctacactgagatcaagtgcacctccctcgtgccgctggaggacgtggtgtctgtggtgacgcatgaggactgcatcactgaggtgaaaatggcctatgtgaacttcgtgaaccactgctacgtggacacggaggtggagatgaaggagatctacaccagcaaccacatctggacgctctttgagaacttcaccctggacatggctcgggtctgcagcaagcgtgagaagcgcgtggctgaccccaccttggagaagtacgtgctgagcgttgtgctggacaccatcaacgccttcttcagctccccattctctgagaacagcacttccctgcagacacaccagccggttgtggtgcagctgctgcagtctaccacacgcctcctcgagtgtccgtggctacagcagcagcacaagggctccgtggaggcctgcatccggaccctcgccatggtggccaagggccgggccatcttgctgcccatggacctggatgcccacatcagctcgatgctcagcagtggagccagctgtgcagctgccgcccagcggaacgcctccagctacaaggcaaccacgcgggccttcccccgcgtcacccccaccgccaaccagtgggactacaagaacatcattgagaagctgcaggacatcatcacagccctggaggagcggctgaagcccctggtacaggctgagctgtccgtgctggtggatgtcctgcactggcctgagctgctcttcctggagggcagtgaggcctaccagcgctgcgagagtgggggcttcctgtccaagctgatccagcacaccaaggacctcatggagtcggaggagaagctgtgcatcaaggtgctgcggaccctgcagcagatgctcgtcaagaagaccaagtacggggaccggggcaaccagctgcgcaagatgctgctgcaaaactacctccagaaccggaagtccacctcgcggggggaccttcccgaccccataggcactggcctggacccagactggtcggcaatcgcagccacccagtgccggctggacaaggagggggccaccaagttggtatgcgacctcatcaccagcaccaagaacgagaagatcttccaggagagcatcggcctggccatccacctgctggatggtggcaacacagagatccagaaatccttccacaacctgatgatgagtgacaagaagtcagagcgcttcttcaaggtgctgcacgaccgcatgaagcgggcccagcaggagaccaagtccacggtggcagtcaacatgaatgacctgggcagccagccacatgaggaccgcgagccagtcgaccccaccaccaaaggccgcgtggcctccttctcgatacctggctcctcatcccgctactcgctgggccccagcctgcgccgggggcacgaggtgagcgaacgtgtgcagagcagtgagatgggcacatccgtgctcatcatgcagcccatcctgcgctttctgcagctgctgtgtgagaaccacaaccgggacctgcagaacttcctgcgctgtcagaacaacaaaaccaactacaacttggtatgcgagacgctgcagttcctggacatcatgtgcggcagcaccacgggcggcctggggctgctggggctctacatcaatgaggacaacgtgggcctcgtcatccagaccttggagaccctcactgagtactgccagggcccctgccatgagaaccagacttgcattgtgactcacgagtccaatggcatagacatcatcaccgcactgatcctcaatgacatcagccccctgtgcaagtaccgcatggatctggtgctgcagctcaaggacaatgcctccaagctgctcctggctctgatggagagccggcatgacagtgaaaatgctgagcgaatcctcatcagcctgcggccccaggagctggtggacgtcatcaagaaggcctacctgcaggaggaagagcgtgagaactcggaggtgagcccacgtgaagtgggccataacatctatatcctggcgctgcagctctccaggcacaataaacagctgcagcacctgctgaagccggtgaagcgcattcaagaggaggaggccgagggtatctcttccatgctcagcctcaacaacaagcagctgtcacagatgctcaagtcctcagcgccagcacaggaggaggaggaagaccccctggcctactatgagaaccacacgtcccagatcgagattgtgcggcaggaccgcagcatggagcagatcgtgttcccagtgcccggcatctgccagttcctgacggaggaaaccaagcaccggctcttcaccactactgagcaggacgagcagggcagcaaagtgagcgacttcttcgaccagtcctccttcctgcacaacgagatggagtggcagcgcaacgtccgcagcatgccgctgatctactggttctcccgccgcatgaccctgtggggcagcatctccttcaacctggccgtgtttatcaacatcatcattgccttcttctacccttacatggagggcgcgtccacaggcgtgctggactcccctctcatctcattgctcttctggatcctcatctgcttctccatcgcggccctgttcaccaagcgctacagcatccgccccctcatcgtggcgctcatcctgcgctccatctactatctgggcatcgggcccacactcaacatcctgggtgccctcaatctgaccaacaagatcgtgtttgtggtgagcttcgtgggcaaccgtggcaccttcatccggggctataaggccatggtcatggacatggaattcctctaccacgtgggctacatcctgaccagtgtcctgggcctctttgctcatgagctgttctacagcatcctgctctttgacctcatctaccgcgaggagacgctgttcaacgtcatcaagagtgtgacccgcaatggccgctccatcctgctgacagccctgctggccctcatcctggtctacctcttctccatcgtcggcttcctcttcctcaaggatgacttcattctcgaggtcgaccggctgcccaacaaccactccacagccagccccctggggatgccacatggagctgctgcatttgtggacacctgcagtggggacaagatggactgtgtctcagggctctcggtgcctgaggtcctggaagaggacagggagctggacagcacagagcgggcctgtgacactctgttgatgtgcatcgtcactgtcatgaaccatgggctacgcaacggtggtggcgtgggcgacattctccgcaagccctccaaagatgagtctctcttcccagcccgagtggtctatgacctcctgttcttcttcatcgtcatcatcattgtgctgaacctcatctttggggtaatcatcgacaccttcgctgacctgcgtagtgagaagcagaagaaggaggagattcttaagacgacatgcttcatctgtggtctggagagggacaagtttgataacaagacagtgtcatttgaggaacacatcaagctggagcacaacatgtggaactacttgtacttcattgtgctggtccgcgtgaagaacaagaccgactacacgggccctgagagctacgtggcccagatgatcaagaacaagaacctggactggttcccccggatgcgggccatgtcccttgtcagcaatgagggcgagggggagcagaatgagattcggattctccaggacaagctcaactccaccatgaagctggtgtcccacctcactgcccagctcaacgagctcaaggagcagatgacggagcagcggaaacgcaggcaacgcctaggctttgtggatgtccagaactgcattagccgctgaggagagccaccgaaggccccaacaggggatgctcatcactggagactgcgactgggaagaacactgccccctccctcgggttgggtggcccagccagctggccagcctccactcccactctgccagacaccctgacacccacccaggctttgaagagcatggagggggagcctcagagctgacagtcctgcttagagcccttaaaaagacttgaaagttcactgggactcagtttaccttaatgccttagcagaagataaatcctacctagagacctttgttccttaaagcaataactgacaactctttgtagtcctccttgtgggtagttaagagtggggtcacccctttaactccaagcactacattttggcggctgcggcctctgggggaggtggcagttatgctgttactagtgattttagggctttgttatttaacttatttcaagggtgctgtgctcagccctgcccatggctgtgcagctccctccgtgcctcagatctgctgtagccagtgcagacctcactgtcgtgtccatgccacccccggcatggctccaggtggcctggtgactccatgatggacgatcttgctcccaggacctgcctcttcccaggcttcctggggaagagttgtacgcccaggcaacaagggctgagctgcgcttgcgtggctgtttcatgaccgcttgtttttctccttttggtgtaatgttttacaaatcctttggcctgagaactaatatgttaattgccttaaataaattaatagaaatcta

SEQ ID NO: 1411 - DNA, 2376 bp, Homo sapiens
  Genbank Accession No. U02020
cgcgcggcccctgtcctccggcccgagatgaatcctgcggcagaagccgagttcaacatcctcctggccaccgactcctacaaggttactcactataaacaatatccacccaacacaagcaaagtttattcctactttgaatgccgtgaaaagaagacagaaaactccaaattaaggaaggtgaaatatgaggaaacagtattttatgggttgcagtacattcttaataagtacttaaaaggtaaagtagtaaccaaagagaaaatccaggaagccaaagatgtctacaaagaacatttccaagatgatgtctttaatgaaaagggatggaactacattcttgagaagtatgatgggcatcttccaatagaaataaaagctgttcctgagggctttgtcattcccagaggaaatgttctcttcacggtggaaaacacagatccagagtgttactggcttacaaattggattgagactattcttgttcagtcctggtatccaatcacagtggccacaaattctagagagcagaagaaaatattggccaaatatttgttagaaacttctggtaacttagatggtctggaatacaagttacatgattttggctacagaggagtctcttcccaagagactgctggcataggagcatctgctcacttggttaacttcaaaggaacagatacagtagcaggacttgctctaattaaaaaatattatggaacgaaagatcctgttccaggctattctgttccagcagcagaacacagtaccataacagcttgggggaaagaccatgaaaaagatgcttttgaacatattgtaacacagttttcatcagtgcctgtatctgtggtcagcgatagctatgacatttataatgcgtgtgagaaaatatggggtgaagatctaagacatttaatagtatcgagaagtacacaggcaccactaataatcagacctgattctggaaaccctcttgacactgtgttaaaggttttggagattttaggtaagaagtttcctgttactgagaactcaaagggttacaagttgctgccaccttatcttagagttattcaaggggatggagtagatattaataccttacaagagattgtagaaggcatgaaacaaaaaatgtggagtattgaaaatattgccttcggttctggtggaggtttgctacagaagttgacaagagatctcttgaattgttccttcaagtgtagctatgttgtaactaatggccttgggattaacgtcttcaaggacccagttgctgatcccaacaaaaggtccaaaaagggccgattatctttacataggacgccagcagggaattttgttacactggaggaaggaaaaggagaccttgaggaatatggtcaggatcttctccatactgtcttcaagaatggcaaggtgacaaaaagctattcatttgatgaaataagaaaaaatgcacagctgaatattgaactggaagcagcacatcattaggctttatgactgggtgtgtgttgtgtgtatgtaatacataatgtttattgtacagatgtgtggggtttgtgttttatgatacattacagccaaattatttgttggtttatggacatactgccctttcattttttttcttttccagtgtttaggtgatctcaaattaggaaatgcatttaaccatgtaaaagatgagtgctaaagtaagctttttagggccctttgccaataggtagtcattcaatctggtattgatcttttcacaaataacagaactgagaaacttttatatataactgatgatcacataaaacagatttgcataaaattaccatgattgctttatgtttatatttaacttgtatttttgtacaaacaagattgtgtaagatatatttgaagtttcagtgatttaacagtctttccaacttttcatgatttttatgagcacagactttcaagaaaatacttgaaaataaattacattgccttttgtccattaatcagcaaataaaacatggccttaacaaagttgtttgtgttattgtacaatttgaaaattatgtcgggacataccctatagaattactaaccttactgccccttgtagaatatgtattaatcattctacattaaagaaaataatggttcttactggaatgtctaggcactgtacagttattatatatcttggttgttgtattgtaccagtgaaatgccaaatttgaaaggcctgtactgcaattttatatgtcagagattgcctgtggctctaatatgcacctcaagattttaaggagataatgtttttagagagaatttctgcttccactatagaatatatacataaatgtaaaatacttacaaaagtgg

SEQ ID NO: 1412 - DNA, 2566 bp, Homo sapiens
  Genbank Accession No. U04313
ggcacgagttgtgctcctcgcttgcctgttccttttccacgcattttccaggataactgtgactccaggcccgcaatggatgccctgcaactagcaaattcggcttttgccgttgatctgttcaaacaactatgtgaaaaggagccactgggcaatgtcctcttctctccaatctgtctctccacctctctgtcacttgctcaagtgggtgctaaaggtgacactgcaaatgaaattggacaggttcttcattttgaaaatgtcaaagatataccctttggatttcaaacagtaacatcggatgtaaacaaacttagttccttttactcactgaaactaatcaagcggctctacgtagacaaatctctgaatctttctacagagttcatcagctctacgaagagaccctatgcaaaggaattggaaactgttgacttcaaagataaattggaagaaacgaaaggtcagatcaacaactcaattaaggatctcacagatggccactttgagaacattttagctgacaacagtgtgaacgaccagaccaaaatccttgtggttaatgctgcctactttgttggcaagtggatgaagaaatttcctgaatcagaaacaaaagaatgtcctttcagactcaacaagacagacaccaaaccagtgcagatgatgaacatggaggccacgttctgtatgggaaacattgacagtatcaattgtaagatcatagagcttccttttcaaaataagcatctcagcatgttcatcctactacccaaggatgtggaggatgagtccacaggcttggagaagattgaaaaacaactcaactcagagtcactgtcacagtggactaatcccagcaccatggccaatgccaaggtcaaactctccattccaaaatttaaggtggaaaagatgattgatcccaaggcttgtctggaaaatctagggctgaaacatatcttcagtgaagacacatctgatttctctggaatgtcagagaccaagggagtggccctatcaaatgttatccacaaagtgtgcttagaaataactgaagatggtggggattccatagaggtgccaggagcacggatcctgcagcacaaggatgaattgaatgctgaccatccctttatttacatcatcaggcacaacaaaactcgaaacatcattttctttggcaaattctgttctccttaagtggcatagcccatgttaagtcctccctgacttttctgtggatgccgatttctgtaaactctgcatccagagattcattttctagatacaataaattgctaatgttgctggatcaggaagccgccagtacttgtcatatgtagccttcacacagatagacctttttttttttccaattctatcttttgtttccttttttcccataagacaatgacatacgcttttaatgaaaaggaatcacgttagaggaaaaatatttattcattatttgtcaaattgtccggggtagttggcagaaatacagtcttccacaaagaaaattcctataaggaagatttggaagctcttcttcccagcactatgctttccttctttgggatagagaatgttccagacattctcgcttccctgaaagactgaagaaagtgtagtgcatgggacccacgaaactgccctggctccagtgaaacttgggcacatgctcaggctactataggtccagaagtccttatgttaagccctggcaggcaggtgtttattaaaattctgaattttggggattttcaaaagataatattttacatacactgtatgttatagaacttcatggatcagatctggggcagcaacctataaatcaacaccttaatatgctgcaacaaaatgtagaatattcagacaaaatggatacataaagactaagtagcccataaggggtcaaaatttgctgccaaatgcgtatgccaccaacttacaaaaacacttcgttcgcagagcttttcagattgtggaatgttggataaggaattatagacctctagtagctgaaatgcaagaccccaagaggaagttcagatcttaatataaattcactttcatttttgatagctgtcccatctggtcatgtggttggcactagactggtggcaggggcttctagctgactcgcacagggattctcacaatagccgatatcagaatttgtgttgaaggaacttgtctcttcatctaatatgatagcgggaaaaggagaggaaactactgcctttagaaaatataagtaaagtgattaaagtgctcacgttaccttgacacatagtttttcagtctatgggtttagttactttagatggcaagcatgtaacttatattaatagtaatttgtaaagttgggtggataagctatccctgttgccggttcatggattacttctctataaaaaatatatatttaccaaaaaattttgtgacattccttctcccatctcttccttgacatgcattgtaaataggttcttcttgttctgagattcaatattgaatttctcctatgctattgacaataaaatattattgaactacc

SEQ ID NO: 1413 - DNA, 2627 bp, Homo sapiens
  Genbank Accession No. U09117
ttctggtcgcactccgctcggaccccaggccgccggtgctgtcgctactcaagtgagtcccgcggtgcccctcccgccgcgccgcccgacgggcatggactcgggccgggacttcctgaccctgcacggcctacaggatgatgaggatctacaggcgctgctgaagggcagccagctcctgaaggtgaagtccagctcatggaggagagagcggttctacaagttgcaggaggactgcaagaccatctggcaggagtcccgcaaggtcatgcggaccccggagtcccagctgttctccatcgaggacattcaggaggtgcgaatggggcaccgcacggagggtctggagaagttcgcccgtgatgtgcccgaggaccgctgcttctccattgtcttcaaggaccagcgcaatacactagacctcatcgccccatcgccagctgatgcccagcactgggtgctggggctgcacaagatcatccaccactcaggctccatggaccagcgtcagaagctacagcactggattcactcctgcttgcgaaaagctgacaaaaacaaggacaacaagatgagcttcaaggagctgcagaacttcctgaaggagctcaacatccaggtggacgacagctatgcccggaagatcttcagggagtgtgaccactcccagacagactccctggaggacgaggagattgaggccttctacaagatgctgacccagcgggtggagatcgaccgcaccttcgccgaggccgcgggcccaggggagactctgtcggtggatcagttagtgacgttcctgcagcaccagcagcgggaggaggcggcagggcctgcgctggccctctccctcattgagcgctacgagcccagcgagactaccaaggcgcagcggcagatgaccaaggacggcttcctcatgtacttactgtcggctgacggcagcgccttcagcctggcacaccgccgtgtctaccaggacatgggccagccacttagccactacctggtgtcctcttcacacaacacctacctgctggaggaccagctagccgggcccagcagcactgaagcctacatccgggcactgtgcaaaggctgccgatgcctggagcttgactgctgggacgggcccaaccaggaaccaatcatctaccacggctatactttcacttccaagatcctcttctgcgatgtgctcagggccatccgggactatgccttcaaggcgtccccctaccctgtcatcctatccctggagaaccactgcacactggagcagcagcgcgtgatggcgcggcacctgcatgccatcctgggccccatgctgttgaaccgaccactggatggggtcaccaacagcctgccctcccctgagcaactgaaggggaagatcctgctgaaggggaagaagctcggggggctcctcccccctggaggggagggtggccctgaggccactgtggtgtcagacgaagacgaggctgctgagatggaggatgaggcagtgaggagccgtgtgcagcacaagcccaaggaggacaagctcaggctagcacaggagctctctgacatggtcatttactgcaagagtgtccactttgggggcttctccagtcctggcacccctggacaggccttctacgagatggcgtccttctctgagaaccgtgcccttcgactgctccaagaatcaggaaacggctttgtccgccacaacgtggggcacctgagcagaatatacccggctggatggagaacagactcctccaactacagccccgtggagatgtggaatgggggctgccagatcgtggccctgaatttccagacacctgggccagagatggacgtgtaccaggaccgcttccaggacaacggggcctgtgggtacgtgctgaagcccgccttcctgcgagaccccaacggcacctttaacccccgcgccctggctcaggggccctggtgggcacggaagcggctcaacatcagggtcatttcggggcagcagctgccaaaagtcaacaagaataagaattcaattgtggaccccaaagtgacagtggagatccatggcgtgagccgggacgtggccagccgccagactgctgtcatcaccaacaatggtttcaacccatggtgggacacggagtttgcgtttgaggtagttgtgcctgaccttgccctcatccgcttcttggtggaagattatgatgcctcctccaagaatgacttcattggccagagtaccatccccttgaacagcctcaagcaaggataccgccatgtccacctcatgtctaagaacggggaccagcatccatcagccaccctctttgtgaagatctccctccaggactaggctggaggaacccagtggggtcccccctgagtgggctgggccctctgtccacatgtggggacagggctggtgtgcctgctcccagcctcttgctcagagctaggcccccaaattgccttcagccctaacatagtgtctgctgctgcctccctggggaccaggagctagcccagtccctggagctgtccttcattccgttaggaataacaatgcagccctctccaccctccggccagcgagtggtcaaggatttttataaaaa

SEQ ID NO: 1414 - DNA, 2814 bp, Homo sapiens
  Genbank Accession No. U09278
aagaacgcccccaaaatctgtttctaattttacagaaatcttttgaaacttggcacggtattcaaaagtccgtggaaagaaaaaaaccttgtcctggcttcagcttccaactacaaagacagacttggtccttttcaacggttttcacagatccagtgacccacgctctgaagacagaattagctaactttcaaaaacatctggaaaaatgaagacttgggtaaaaatcgtatttggagttgccacctctgctgtgcttgccttattggtgatgtgcattgtcttacgcccttcaagagttcataactctgaagaaaatacaatgagagcactcacactgaaggatattttaaatggaacattttcttataaaacattttttccaaactggatttcaggacaagaatatcttcatcaatctgcagataacaatatagtactttataatattgaaacaggacaatcatataccattttgagtaatagaaccatgaaaagtgtgaatgcttcaaattacggcttatcacctgatcggcaatttgtatatctagaaagtgattattcaaagctttggagatactcttacacagcaacatattacatctatgaccttagcaatggagaatttgtaagaggaaatgagcttcctcgtccaattcagtatttatgctggtcgcctgttgggagtaaattagcatatgtctatcaaaacaatatctatttgaaacaaagaccaggagatccaccttttcaaataacatttaatggaagagaaaataaaatatttaatggaatcccagactgggtttatgaagaggaaatgcttcctacaaaatatgctctctggtggtctcctaatggaaaatttttggcatatgcggaatttaatgataaggatataccagttattgcctattcctattatggcgatgaacaatatcctagaacaataaatattccatacccaaaggctggagctaagaatcccgttgttcggatatttattatcgataccacttaccctgcgtatgtaggtccccaggaagtgcctgttccagcaatgatagcctcaagtgattattatttcagttggctcacgtgggttactgatgaacgagtatgtttgcagtggctaaaaagagtccagaatgtttcggtcctgtctatatgtgacttcagggaagactggcagacatgggattgtccaaagacccaggagcatatagaagaaagcagaactggatgggctggtggattctttgtttcaagaccagttttcagctatgatgccatttcgtactacaaaatatttagtgacaaggatggctacaaacatattcactatatcaaagacactgtggaaaatgctattcaaattacaagtggcaagtgggaggccataaatatattcagagtaacacaggattcactgttttattctagcaatgaatttgaagaataccctggaagaagaaacatctacagaattagcattggaagctatcctccaagcaagaagtgtgttacttgccatctaaggaaagaaaggtgccaatattacacagcaagtttcagcgactacgccaagtactatgcacttgtctgctacggcccaggcatccccatttccacccttcatgatggacgcactgatcaagaaattaaaatcctggaagaaaacaaggaattggaaaatgctttgaaaaatatccagctgcctaaagaggaaattaagaaacttgaagtagatgaaattactttatggtacaagatgattcttcctcctcaatttgacagatcaaagaagtatcccttgctaattcaagtgtatggtggtccctgcagtcagagtgtaaggtctgtatttgctgttaattggatatcttatcttgcaagtaaggaagggatggtcattgccttggtggatggtcgaggaacagctttccaaggtgacaaactcctctatgcagtgtatcgaaagctgggtgtttatgaagttgaagaccagattacagctgtcagaaaattcatagaaatgggtttcattgatgaaaaaagaatagccatatggggctggtcctatggaggatacgtttcatcactggcccttgcatctggaactggtcttttcaaatgtggtatagcagtggctccagtctccagctgggaatattacgcgtctgtctacacagagagattcatgggtctcccaacaaaggatgataatcttgagcactataagaattcaactgtgatggcaagagcagaatatttcagaaatgtagactatcttctcatccacggaacagcagatgataatgtgcactttcaaaactcagcacagattgctaaagctctggttaatgcacaagtggatttccaggcaatgtggtactctgaccagaaccacggcttatccggcctgtccacgaaccacttatacacccacatgacccacttcctaaagcagtgtttctctttgtcagactaaaaacgatgcagatgcaagcctgtatcagaatctgaaaaccttatataaacccctcagacagtttgcttattttattttttatgttgtaaaatgctagtataaacaaacaaattaatgttgttctaaaggctgttaaaaaaaagatgaggactcagaagttcaagctaaatattgtttacattttctggtactctgtgaaagaagagaaaagggagtcatgcattttgctttggacacagtgttttatcacctgttcatttgaagaaaaataataaagtcagaagttcaaaaaaaaaaaaaaaaaaaaaaaaagcggccgctcg

SEQ ID NO: 1415 - DNA, 1407 bp, Homo sapiens
  Genbank Accession No. U10362
atggcggcggaaggctggatttggcgttggggctggggccggcggtgcctgggaaggcctgggcttctcggccccggccctggccccactacacctctctttcttcttttgttgttggggtctgtgactgcggatataactgacggcaacagtgaacatctcaagcgggagcattcgctcattaagccctaccaaggggtcggttccagctctatgcccctctgggacttccagggcagcactatgctcacgagccagtacgtacgtctgacccctgacgagcgcagcaaagagggctctatctggaaccaccagccgtgcttcctcaaagactgggaaatgcacgtccacttcaaagtccacggcacagggaagaagaacctccatggagacggcatcgccttgtggtacacccgggaccgcctcgtgccagggcctgtgtttggaagcaaagataacttccacggcttagccatcttcctggacacctaccccaatgatgagaccactgagcgcgtgttcccgtacatctcggtgatggtgaacaatggctccctgtcctacgaccacagcaaggatgggcgctggaccgagctggcgggctgcacggctgacttccgcaaccgcgatcacgacaccttcctggctgtgcgctactcccggggccgtctgacggtgatgaccgacctggaggacaagaacgagtggaagaactgcattgacatcacgggagtgcgcctgcccaccggctactacttcggggcctccgccggcaccggcgacctgtctgacaatcatgacatcatctccatgaagctgttccagctgatggtggagcacacgcccgacgaggagagcatcgactggaccaagatcgagcccagcgtcaacttcctcaagtcgcccaaagacaacgtggacgaccccacggggaacttccgcagcgggcccctgacggggtggcgggtgttcctgctgctgctgtgcgctctcctgggcatcgttgtctgcgccgtggtgggggccgtggtgttccagaagcggcaggagcggaacaagcgcttctactgagtggcgcctccggcggggcctgtccctgggcccaggagccaatgtgaacttttttttttaccgggattataaaagaacaacaagatgaccttatttcttaactgtttcaaataaatgattaaagtattttcatacattttgcttcttgcccagcagggacaggtggcagagccgaggcttagggtctggcaccccccacagctggagacggaggctctcctggggctggtgtctcaggagcaggggtctgtgtctacagatgggctgtggcccctgcaggcagctgttgaacactggagggtcccccggaccacactggggtgggctcctgaggac

SEQ ID NO: 1416 - DNA, 2473 bp, Homo sapiens
  Genbank Accession No. U11863
tcacagccctgccgggcaaaggctggaagcagagcgaactgggagcagagcacacagagccgtggagcgagagatgccggccctgggctgggccgtggctgccatcctgatgctgcagacggccatggcggagccctccccggggactctgcccaggaaggcaggggtgttttcagacctaagcaaccaagagctgaaggcagtgcacagcttcctctggtccaagaaggagctgaggctgcagccctccagtaccaccaccatggccaagaacaccgtgtttctcatcgagatgctgctgcccaagaagtaccatgtgctgaggtttctggataaaggtgaaaggcatcctgtgcgggaagcccgtgccgtcatcttctttggtgaccaggagcatcccaatgtcaccgagtttgctgtggggcccctgccagggccctgctacatgcgagcactgtcccccaggcctgggtaccagtcctcctgggcatcgaggcccatctccacagcagagtatgccctcctctaccacaccctgcaggaagccaccaagcccctgcatcagttcttcctcaataccacaggcttctcattccaagactgccatgacagatgcctggccttcaccgatgtggccccccggggtgtggcttctggccagcgccgcagttggcttatcatacagcgctatgtagaaggctactttctgcaccccactgggctggagctcctcgtggatcatgggagcacagatgctgggcactgggccgtggagcaggtgtggtacaacgggaagttctatgggagcccagaggaactggctcggaagtatgcagatggagaggtggacgtggtggtcctggaggacccgctgcctgggggcaaggggcatgacagcacagaggagccgcccctcttctcctcccacaagccccgcggggacttccccagccccatccatgtgagcggcccccgcttggtccagccccacggccctcgcttcaggctggagggcaacgctgtgctctacggcggctggagctttgccttccggctgcgctcctccttcgggctgcaggtcctgaacgtgcacttcggcggagagcgcattgcctatgaggtcagcgtgcaagaggcagtggcgctgtatggaggacacacacctgcaggcatgcagaccaagtacctcgatgtcggctggggcctgggcagcgtcactcatgagttagcccccggcatcgactgcccggagaccgccaccttcctggacactttccactactatgatgccgatgacccggtccattatccccgagccctctgcctctttgaaatgcccacaggggtgccccttcggcggcactttaattccaactttaaaggtggcttcaacttctatgcggggctgaagggccaggtgctggtgctgcggacaacttcaactgtctacaattatgattacatttgggactttatcttctaccccaacggggtgatggaggccaagatgcatgccactggctacgtccacgccaccttctacacccccgaggggctgcgccacggcactcgcctgcacacccacctgattggcaacatacacactcacttggtgcactaccgcgtagacctggatgtggcaggcaccaagaacagcttccagacactgcagatgaagctagaaaacatcaccaacccctggagcccgagacaccgcgtggtccagccaactctggagcagacgcagtactcctgggagcgccaggcggccttccgcttcaaaaggaagctgcctaagtacctgctctttaccagcccccaggagaacccctggggccacaagcgcagctaccgcctgcagatccactccatggccgaccaggtgctgcccccaggctggcaggaggagcaggccatcacctgggcaaggactgaggggggccagcccagggccctgagccaagctcgttcgcctgtgcctggcaggtaccccctggcagtgaccaagtaccgggagtcagagctgtgcagcagcagcatctaccaccagaacgacccctgggacccgcccgtggtctttgagcagtttcttcacaacaacgagaacattgaaaatgaggacctggtggcctgggtgacggtgggcttcctgcacatcccccactcagaggacattcccaacacagccacacctgggaactccgtgggcttcctgctccggccattcaacttcttcccagaggacccctccctggcatccagagacactgtgatcgtgtggcctcgggacaacggccccaactacgtccagcgctggatccctgaggacagggactgctcgatgcctcccccttttagctacaatgggacctatagacctgtgtgaccagcccccagttcctcccccagttcctcccaggaagcccaggagcctcactggggcagacaataaaccctcagagcctcaaaaaaa

SEQ ID NO: 1417 - DNA, 8287 bp, Homo sapiens
  Genbank Accession No. U12128
ctgattatgaagtgcctcagagccaacctattaagcttggagatcatctcaacagcatactgcttggaatgtgtgaggatgttatttacgctcgagtttctgttcggactgtgctggatgcttgcagtgcccacattaggaatagcaattgtgcaccctcattttcctacgtgaaacacttggtaaaactggttctgggaaatctttctggggtaatatgcacgtgtcactagctgaggccctggaggttcggggtggaccacttcaggaggaagaaatatgggctgtattaaatcaaagtgctgaaagtctccaagaattattcagaaaagtaagcctagctgatcctgctgcccttggcttcatcatttctccatggtctctgctgttgctgccatctggtagtgtgtcatttacagatgaaaatatttccaatcaggatcttcgagcattcactgcaccagaggttcttcaaaatcagtcactaacttctctctcagatgttgaaaagatccacatttattctcttggaatgacactgtattggggggctgattatgaagtgcctcagagccaacctattaagcttggagatcatctcaacagcatactgcttggaatgtgtgaggatgttatttacgctcgagtttctgttcggactgtgctggatgcttgcagtgcccacattaggaatagcaattgtgcaccctcattttcctacgtgaaacacttggtaaaactggttctgggaaatctttctgggacagatcagctttcctgtaacagtgaacaaaagcctgatcgaagccaggctattcgagatcgattgcgaggaaaaggattaccaacaggaagaagctctacttctgatgtactagacatacaaaagcctccactctctcatcagacctttcttaacaaagggcttagtaaatctatgggatttctgtccatcaaagatacacaagatgagaattatttcaaggacattttatcagataattctggacgtgaagattctgaaaatacattctccccttaccagttcaaaactagtggcccagaaaaaaaacccatccctggcattgatgtgctttctaagaagaagatctgggcttcatccatggacttgctttgtacagctgacagagacttctcttcaggagagactgccacatatcgtcgttgtcaccctgaggcagtaacagtgcggacttcaactactcctagaaaaaaggaggcaagatactcagatggaagtatagccttggatatctttggccctcagaaaatggatccaatatatcacactcgagaattgcccacctcctcagcaatatcaagtgctttggaccgaatccgagagagacaaaagaaacttcaggttctgagggaagccatgaatgtagaagaaccagttcgaagatacaaaacttatcatggtgatgtctttagtacctccagtgaaagtccatctattatttcctctgaatcagatttcagacaagtgagaagaagtgaagcctcaaagaggtttgaatccagcagtggtctcccaggggtagatgaaaccttaagtcaaggccagtcacagagaccgagcagacaatatgaaacaccctttgaaggcaacttaattaatcaagagatcatgctaaaacggcaagaggaagaactgatgcagctacaagccaaaatggcccttagacagtctcggttgagcctatatccaggagacacaatcaaagcgtccatgcttgacatcaccagggatccgttaagagaaattgccctagaaacagccatgactcaaagaaaactgaggaatttctttggccctgagtttgtgaaaatgacaattgaaccatttatatctttggatttgccacggtctattcttactaagaaagggaagaatgaggataaccgaaggaaagtaaacataatgcttctgaacgggcaaagactggaactgacctgtgataccaaaactatatgtaaagatgtgtttgatatggttgtggcacatattggcttagtagagcatcatttgtttgctttagctaccctcaaagataatgaatatttctttgttgatcctgacttaaaattaaccaaagtggccccagagggatggaaagaagaaccaaagaaaaagaccaaagccactgttaattttactttgtttttcagaattaaattttttatggatgatgttagtctaatacaacatactctgacgtgtcatcagtattaccttcagcttcgaaaagatattttggaggaaaggatgcactgtgatgatgagacttccttattgctggcatccttggctctccaggctgagtatggagattatcaaccagaggttcatggtgtgtcttactttagaatggagcactatttgcccgccagagtgatggagaaacttgatttatcctatatcaaagaagagttacccaaattgcataatacctatgtgggagcttctgaaaaagagacagagttagaatttttaaaggtctgccaaagactgacagaatatggagttcattttcaccgagtgcaccctgagaagaagtcacaaacaggaatattgcttggagtctgttctaaaggtgtccttgtgtttgaagttcacaatggagtgcgcacattggtccttcgctttccatggagggaaaccaagaaaatatctttttctaaaaagaaaatcacattgcaaaatacatcagatggaataaaacatggcttccagacagacaacagtaagatatgccagtacctgctgcacctctgctcttaccagcataagttccagctacagatgagagcaagacagagcaaccaagatgcccaagatattgagagagcttcgtttaggagcctgaatctccaagcagagtctgttagaggatttaatatgggacgagcaatcagcactggcagtctggccagcagcaccctcaacaaacttgctgttcgacctttatcagttcaagctgagattctgaagaggctatcctgctcagagctgtcgctttaccagccattgcaaaacagttcaaaagagaagaatgacaaagcttcatgggaggaaaagcctagagagatgagtaaatcataccatgatctcagtcaggcctctctctatccacatcggaaaaatgtcattgttaacatggaacccccaccacaaaccgttgcagagttggtgggaaaaccttctcaccagatgtcaagatctgatgcagaatctttggcaggagtgacaaaacttaataattcaaagtctgttgcgagtttaaatagaagtcctgaaaggaggaaacatgaatcagactcctcatccattgaagaccctgggcaagcatatgttctaggaatgactatgcatagttctggaaactcttcatcccaagtacccttaaaagaaaatgatgtgctacacaaaagatggagcatagtatcttcaccagaaagggagatcaccttagtgaacctgaaaaaagatgcaaagtatggcttgggatttcaaattattggtggggagaagatgggaagactggacctaggcatatttatcagttcagttgcccctggaggaccagctgacttggatggatgcttgaagccaggagaccgtttgatatctgtgaatagtgtgagtctggagggagtcagccaccatgctgcaattgaaattttgcaaaatgcacctgaagatgtgacacttgttatctctcagccaaaagaaaagatatccaaagtgccttctactcctgtgcatctcaccaatgagatgaaaaactacatgaagaaatcttcctacatgcaagacagtgctatagattcttcttccaaggatcaccactggtcacgtggtaccctgaggcacatctcggagaactcctttgggccgtctgggggcctgcgggaaggaagcctgagttctcaagattccaggactgagagtgccagcttgtctcaaagccaggtcaatggtttctttgccagccatttaggtgaccaaacctggcaggaatcacagcatggcagcccttccccatctgtaatatccaaagccaccgagaaagagactttcactgatagtaaccaaagcaaaactaaaaagccaggcatttctgatgtaactgattactcagaccgtggagattcagacatggatgaagccacttactccagcagtcaggatcatcaaacaccaaaacaggaatcttcctcttcagtgaatacatccaacaagatgaattttaaaactttttcttcatcacctcctaagcctggagatatctttgaggttgaactggctaaaaatgataacagcttggggataagtgtcacggtactgtttgacaagggaggtgtgaatacgagtgtcagacatggtggcatttatgtgaaagctgttattccccagggagcagcagagtctgatggtagaattcacaaaggtgatcgcgtcctagctgtcaatggagttagtctagaaggagccacccataagcaagctgtggaaacactgagaaatacaggacaggtggttcatctgttattagaaaagggacaatctccaacatctaaagaacatgtcccggtaaccccacagtgtaccctttcagatcagaatgcccaaggtcaaggcccagaaaaagtgaagaaaacaactcaggtcaaagactacagctttgtcactgaagaaaatacatttgaggtaaaattatttaaaaatagctcaggtctaggattcagtttttctcgagaagataatcttataccggagcaaattaatgccagcatagtaagggttaaaaagctctttcctggacagccagcagcagaaagtggaaaaattgatgtaggagatgttatcttgaaagtgaatggagcctctttgaaaggactatctcagcaggaagtcatatctgctctcaggggaactgctccagaagtattcttgcttctctgcagacctccacctggtgtgctaccggaaattgatactgcgcttttgaccccacttcagtctccagcacaagtacttccaaacagcagtaaagactcttctcagccatcatgtgtggagcaaagcaccagctcagatgaaaatgaaatgtcagacaaaagcaaaaaacagtgcaagtccccatccagaagagacagttacagtgacagcagtgggagtggagaagatgacttagtgacagctccagcaaacatatcaaattcgacctggagttcagctttgcatcagactctaagcaacatggtatcacaggcacagagtcatcatgaagcacccaagagtcaagaagataccatttgtaccatgttttactatcctcagaaaattcccaataaaccagagtttgaggacagtaatccttcccctctaccaccggatatggctcctgggcagagttatcaaccccaatcagaatctgcttcctctagttcgatggataagtatcatatacatcacatttctgaaccaactagacaagaaaactggacacctttgaaaaatgacttggaaaatcaccttgaagactttgaactggaagtagaactcctcattaccctaattaaatcagaaaaaggaagcctgggttttacagtaaccaaaggcaatcagagaattggttgttatgttcatgatgtcatacaggatccagccaaaagtgatggaaggctaaaacctggggaccggctcataaaggttaatgatacagatgttactaatatgactcatacagatgcagttaatctgctccgggctgcatccaaaacagtcagattagttattggacgagttctagaattacccagaataccaatgttgcctcatttgctaccggacataacactaacgtgcaacaaagaggagttgggtttttccttatgtggaggtcatgacagcctttatcaagtggtatatattagtgatattaatccaaggtccgtcgcagccattgagggtaatctccagctattagatgtcatccattatgtgaacggagtcagcacacaaggaatgaccttggaggaagttaacagagcattagacatgtcacttccttcattggtattgaaagcaacaagaaatgatcttccagtggtccccagctcaaagaggtctgctgtttcagctccaaagtcaaccaaaggcaatggttcctacagtgtggggtcttgcagccagcctgccctcactcctaatgattcattctccacggttgctggggaagaaataaatgaaatatcgtaccccaaaggaaaatgttctacttatcagataaagggatcaccaaacttgactctgcccaaagaatcttatatacaagaagatgacatttatgatgattcccaagaagctgaagttatccagtctctgctggatgttgtggatgaggaagcccagaatcttttaaacgaaaataatgcagcaggatactcctgtggtccaggtacattaaagatgaatgggaagttatcagaagagagaacagaagatacagactgcgatggttcacctttacctgagtattttactgaggccaccaaaatgaatggctgtgaagaatattgtgaagaaaaagtaaaaagtgaaagcttaattcagaagccacaagaaaagaagactgatgatgatgaaataacatggggaaatgatgagttgccaatagagagaacaaaccatgaagattctgataaagatcattcctttctgacaaacgatgagctcgctgtactccctgtcgtcaaagtgcttccctctggtaaatacacgggtgccaacttaaaatcagtcattcgagtcctgcggggtttgctagatcaaggaattccttctaaggagctggagaatcttcaagaattaaaacctttggatcagtgtctaattgggcaaactaaggaaaacagaaggaagaacagatataaaaatatacttccctatgatgctacaagagtgcctcttggagatgaaggtggctatatcaatgccagcttcattaagataccagttgggaaagaagagttcgtttacattgcctgccaaggaccactgcctacaactgttggagacttctggcagatgatttgggagcaaaaatccacagtgatagccatgatgactcaagaagtagaaggagaaaaaatcaaatgccagcgctattggcccaacatcctaggcaaaacaacaatggtcagcaacagacttcgactggctcttgtgagaatgcagcagctgaagggctttgtggtgagggcaatgacccttgaagatattcagaccagagaggtgcgccatatttctcatctgaatttcactgcctggccagaccatgatacaccttctcaaccagatgatctgcttacttttatctcctacatgagacacatccacagatcaggcccaatcattacgcactgcagtgctggcattggacgttcagggaccctgatttgcatagatgtggttctgggattaatcagtcaggatcttgattttgacatctctgatttggtgcgctgcatgagactacaaagacacggaatggttcagacagaggatcaatatattttctgctatcaagtcatcctttatgtcctgacacgtcttcaagcagaagaagagcaaaaacagcagcctcagcttctgaagtgacatgaaaagagcctctggatgcatttccatttctctccttaacctccagcagactcctgctctctatccaaaataagatcacagagcagcaagttcatacaacatgcatgttctcctctatcttagaggggtattcttcttgaaaataaaaaatattgaaatgctgtatttttacagctactttaacctatgataattatttacaaaattttaacactaaccaaacaatgcagatcttagggatgattaaaggcagcatttgatgatagcagacattgttacaaggacatggtgagtctatttttaatgcaccaatcttgtttatagcaaaaatgttttccaatattttaataaagtagttattttataggggatacttgaaaccagtatttaagctttaaatgacagtaatattggcatagaaaaaagtagcaaatgtttactgtatcaatttctaatgtttactatatagaatttcctgtaatatatttatatactttttcatgaaaatggagttatcagttatctgtttgttactgcatcatctgtttgtaatcattatctcactttgtaaataaaaacacaccttaaaacatg

SEQ ID NO: 1418 - DNA, 2470 bp, Homo sapiens
  Genbank Accession No. U15932
aatcgcgaaacccggcgagcggcgcgctggctatcgagcgagcggggcggaaccgggagttgcgccgccgctcgggcgccgggctccgtcgcggccgcagccccgcgggtcgccctcccgtgcctcgcccgcggacaccctggccgtggacaccctggccgtgggcacccgcggggcgcggcgcgggcgctgcgcggcggcggcggcggcatgaaggtcacgtcgctcgacggcggccacgtgcgcaagatgctccgcaaggaggcggcggcgcgctgcgtggtgctcgactgccggccctatctggccttcgctgcctcgaacgtgcgcggctcgctcaacgtcaacctcaactcggtggtgctgcggcgggcccggggcggcgcggtgtcggcgcgctacgtgctgcccgacgaggcgcggcgcgcgcggctcctgcaggagggcggcggcggcgtcgcggccgtggtggtgctggaccagggcagccgccactggcagaagctgcgagaggagagcgcgtttgtcgtcctcacctcgctactcgcttgcctacccgccggcccgcgggtctacttcctcaaagggggatatgagactttctactcggaatatcctgagtgttgcgtggatgtaaaacccatttcacaagagaagattgagagtgagagagccctcatcagccagtgtggaaaaccagtggtaaatgtcagctacaggccagcttatgaccagggtggcccagttgaaatccttcccttcctctaccttggaagtgcctaccatgcatccaagtgcgagttcctcgccaacttgcacatcacagccctgctgaatgtctcccgacggacctccgaggcctgcatgacccacctacactacaaatggatccctgtggaagacagccacacggctgacattagctcccactttcaagaagcaatagacttcattgactgtgtcagggaaaagggaggaaaggtcctggtccactgtgaggctgggatctcccgttcacccaccatctgcatggcttaccttatgaagaccaagcagttccgcctgaaggaggccttcgattacatcaagcagaggaggagcatggtctcgcccaactttggcttcatgggccagctcctgcagtacgaatctgagatcctgccctccacgcccaacccccagcctccctcctgccaaggggaggcagcaggctcttcactgataggccatttgcagacactgagccctgacatgcagggtgcctactgcacattccctgcctcggtgctggcaccggtgcctacccactcaacagtctcagagctcagcagaagccctgtggcaacggcccaatcctgctaaaactgggatggaggaatcggcccagccccaagagcaactgtgatttttgtttttaagactcatggacatttcatacctgtgcaatactgaagacctcattctgtcatgctgccccagtgagatagtgagtggtcaccaggcttgcaaatgaacttcagacggacctcagggtaggttctcgggactgaaggaaggccaagccattacgggagcacagcatgtgctgactactgtacttccagacccctgccctcttgggactgcccagtccttgcacctcagagttcgccttttcatttcaagcataagccaataaatacctgcagcaacgtgggagaaagaagttgctggaccaggagaaaaggcagttatgaagccaattcattttgaaggaagcacaatttccaccttattttttgaactttggcagtttcaatgtctgtctctgttgcttcggggcataagctgatcaccgtctagttgggaaagtcaccctacagggtttgtagggacatgatcagcatcctgatttgaaccctgaaatgttgtgtagacaccctcttgggtccaatgaggtagttggttgaagtagcaagatgttggcttttctggattttttttgccatgggttcttcactgaccttggactttggcatgattcttagtcatacttgaacttgtctcattccacctcttctcagagcaactcttcctttgggaaaagagttcttcagatcatagaccaaaaaagtcataccttcgaggtggtagcagtagattccaggaggagaagggtacttgctaggtatcctgggtcagtggcggtgcaaactggtttcctcagctgcctgtccttctgtgtgcttatgtctcttgtgacaattgttttcctccctgcccctggaggttgtcttcaactgtggacttctgggatttgcagattttgcaacgtggtactacttttttttctttttgtctgttagttatttctccaggggaaaaggcaataattttctaagacccgtgtgaatgtgaagaaaagcagtatgttactggttgttgttgttgttcttgttttttatatgtaaaataaaaatagtgaaaggag

SEQ ID NO: 1419 - DNA, 2280 bp, Homo sapiens
  Genbank Accession No. U17077
ccgcccgccaccagctacgccccgtccgacgtgccctcgggggtcgcgctgttcctcaccatccctttcgccttcttcctgcccgagctgatatttgggttcttggtctggaccatggtagccgccacccacatagtataccccttgctgcaaggatgggtgatgtatgtctcgctcacctcgtttctcatctccttgatgttcctgttgtcttacttgtttggattttacaaaagatttgaatcctggagagttctggacagcctgtaccacgggaccactggcatcctgtacatgagcgctgccgtcctacaagtacatgccacgattgtttctgagaaactgctggacccaagaatttactacattaattcggcagcctcgttcttcgccttcatcgccacgctgctctacattctccatgccttcagcatctattaccactgatgcacaggcgccaggccaagggggaaatgctctttgaaagctccaattattggtccccaaaagcagcttccaacgtttgccatctggatgacaaacggaagatccactaaaacgtccacgggattaacagaacgtccttgcagactgagcgatgacaccacactttgtttggacatttaaattcactctgctgaataggaggaagcttttctttttcctgggaaaacaactgtctcttggaattatctgaccatgaacttgctcttctagacaactcacatcaaagccctcactccactaatggagaatcctagccccactaatgccaagtctgtttggggattttgcctcagctatgggcttccctagagtaggtctaggggaatactcagtctgatcttttttttgtttgttttattttgttttttttgagacggagtctcgctcttcctccaaggctggagtgcagtgacgcgatctccactcactgcaggctccgcctcccgggttcccgccattctcctgcctcagcctcccgagtagccgggactacaggcgcccaccaccatgcccggctaatttagttgtatttttagtagagatggggtttcaccgtattagccaggatggtctcgatctcctgacctcgtgatccgcccgcctcggcctcccaaagtgctgggattacaggcgtgagccaccgtgcccggcctgattctcttaaaattgaagaggtgctgccaaggccttcagatctaacgcagatgcatagaccttgttcctggtacttgttcagcctgtgctggggagccgtggtcccgagttccctgggaggctgacagggtcaagccaccctgcccaccaccctcccacttcccctcccctttcctctccagcattaggattcaagggaaatctgcatgaagccaattttgagggtagacgtgtggggaaaataaatcattatacagtaagacctggggcttgaggggtggggaatggggagggaagggcatagcctgctcctccatgagtctgacatctcggaaactgagcagctgccggacgcctgggtcaggaatccaagaccccacctcttaaggactggttcctcagaaagcaccctcagggaaaaaggtgaaaacattacatccgtggattctcctgccacaaccgcattggaagaaaaggctgccgcaacatctcagcgaggagtgaaggacccatgtcccaggaaccgcgctgcgccacctgcactcacccccctcacattctcttaagcacccggtggccctccgaggctggcggaatggtggtgcccacggggttgggcaagggctcaccaggacctcaacgggcaaagttgtgcacactaaaatatcaaatcaaggtgcttggttttaaagtaaatgtttttctaaagaaagctgtgttcttctgttgacccagacgaatagggcacagccctgtaactgcacgtgccttctgtcattgggaatgaaataaattattacgagaaagggacttgtcctaactggtttgaggccttacagttttgtatctacatttttcccctcctggggtttgcggggacagggacagaactacaggagtcatgggaaagaaaattctggcttcactactgctcactgctcactttctgatcactctgatactttttttttttttttttttttgcaacctgataccttgaaaagcttctatgtgtctctccttttgttgcctggcagctgtctaggatgatcactgattactatttactaagtagccacatgcaaataaaagttgtttggtaaaatggaaaaaaaaaaa

SEQ ID NO: 1420 - DNA, 2244 bp, Homo sapiens
  Genbank Accession No. U19495
gcacgggacaggccgggccacacccaccggggcgagctcggagggcggcgctctgggcggagggcccggcggctcggcccagggcgcgttacctcgtcgccggggccggagagggcgggcggaggcacggggcctggaggcgccaggcggaggatgcgggcgacacggtggcggcggcgaccgcgcgaccgggcgggcgggcgggcaggggcgagcggagggagggagcggactgcggcaggatctgtcgaggaaaaatcttgcggccggcgattccccgccttttaagcgcagcctgcactccccccaccccacgcaggggcgggccttccccaacgcgggcgcccactggccgccgcgcgccgctcccctccagctcgcctgcgcctctcactctccgtcagccgcattgcccgctcggcgtccggcccccgacccgcgctcgtccgcccgcccgcccgcccgcccgcgccatgaacgccaaggtcgtggtcgtgctggtcctcgtgctgaccgcgctctgcctcagcgacgggaagcccgtcagcctgagctacagatgcccatgccgattcttcgaaagccatgttgccagagccaacgtcaagcatctcaaaattctcaacactccaaactgtgcccttcagattgtagcccggctgaagaacaacaacagacaagtgtgcattgacccgaagctaaagtggattcaggagtacctggagaaagctttaaacaagtaagcacaacagccaaaaaggactttccgctagacccactcgaggaaaactaaaaccttgtgagagatgaaagggcaaagacgtgggggagggggccttaaccatgaggaccaggtgtgtgtgtggggtgggcacattgatctgggatcgggcctgaggtttgccagcatttagaccctgcatttatagcatacggtatgatattgcagcttatattcatccatgccctgtacctgtgcacgttggaatttttattactggggtttttctaagaaagaaattgtattatcaacagcattttcaagcagttagttccttcatgatcatcacaatcatcatcattctcattctcattttttaaatcaacgagtacttcaagatctgaatttggcttgtttggagcatctcctctgctcccctggggagtctgggcacagtcaggtggtggcttaacagggagctggaaaaagtgtcctttcttcagacactgaggctcccgcagcagcgcccctcccaagaggaaggcctctgtggcactcagataccgactggggctgggcgccgccactgccttcacctcctctttcaacctcagtgattggctctgtgggctccatgtagaagccactattactgggactgtgctcagagacccctctcccagctattcctactctctccccgactccgagagcatgcattaatcttgcttctgcttctcatttctgtagcctgatcagcgccgcaccagccgggaagagggtgattgctggggctcgtgccctgcatccctctcctcccagggcctgccccacagctcgggccctctgtgagatccgtctttggcctcctccagaatggagctggccctctcctggggatgtgtaatggtccccctgcttacccgcaaaagacaagtctttacagaatcaaatgcaattttaaatctgagagctcgctttgagtgactgggttttgtgattgcctctgaagcctatgtatgccatggaggcactaacaaactctgaggtttccgaaatcagaagcgaaaaaatcagtgaataaaccatcatcttgccactaccccctcctgaagccacagcagggtttcaggttccaatcagaactgttggcaaggtgacatttccatgcataaatgcgatccacagaaggtcctggtggtatttgtaactttttgcaaggcatttttttatatatatttttgtgcacatttttttttacgtttctttagaaaacaaatgtatttcaaaatatatttatagtcgaacaattcatatatttgaagtggagccatatgaatgtcagtagtttatacttctctattatctcaaactactggcaatttgtaaagaaatatatatgatatataaatgtgattgcagcttttcaatgttagccacagtgtattttttcacttgtactaaaattgtatcaaatgtgacattatatgcactagcaataaaatgctaattgtttcatggta

SEQ ID NO: 1421 - DNA, 1284 bp, Homo sapiens
  Genbank Accession No. U19557
cctctgcttcctctaggaacacaggagttccagatcacatcgagttcaccatgaattcactcagtgaagccaacaccaagttcatgttcgatctgttccaacagttcagaaaatcaaaagagaacaacatcttctattcccctatcagcatcacatcagcattagggatggtcctcttaggagccaaagacaacactgcacaacaaattagcaaggttcttcactttgatcaagtcacagagaacaccacagaaaaagctgcaacatatcatgttgataggtcaggaaatgttcatcaccagtttcaaaagcttctgactgaattcaacaaatccactgatgcatatgagctgaagatcgccaacaagctcttcggagaaaagacgtatcaatttttacaggaatatttagatgccatcaagaaattttaccagaccagtgtggaatctactgattttgcaaatgctccagaagaaagtcgaaagaagattaactcctgggtggaaagtcaaacgaatgaaaaaattaaaaacctatttcctgatgggactattggcaatgatacgacactggttcttgtgaacgcaatctatttcaaagggcagtgggagaataaatttaaaaaagaaaacactaaagaggaaaaattttggccaaacaagaatacatacaaatctgtacagatgatgaggcaatacaattcctttaattttgccttgctggaggatgtacaggccaaggtcctggaaataccatacaaaggcaaagatctaagcatgattgtgctgctgccaaatgaaatcgatggtctgcagaagcttgaagagaaactcactgctgagaaattgatggaatggacaagtttgcagaatatgagagagacatgtgtcgatttacacttacctcggttcaaaatggaagagagctatgacctcaaggacacgttgagaaccatgggaatggtgaatatcttcaatggggatgcagacctctcaggcatgacctggagccacggtctctcagtatctaaagtcctacacaaggcctttgtggaggtcactgaggagggagtggaagctgcagctgccaccgctgtagtagtagtcgaattatcatctccttcaactaatgaagagttctgttgtaatcaccctttcctattcttcataaggcaaaataagaccaacagcatcctcttctatggcagattctcatccccatagatgcaattagtctgtcactccatttagaaaatgttcacctagaggtgttctggtaaactga

SEQ ID NO: 1422 - DNA, 956 bp, Homo sapiens
  Genbank Accession No. U21931
gaattccaacccaaaagccttcggagaatcgtaaaaggaatgcacacagagttgcaaacaatatcacactgtttggaggagccggtctgctttccagatgtctgtagccagacaccaccatggattttttttattgcttttagaataggcgaagccatccaacacacacagaatcactcattaagtccagtttccatggtataaagagaaggcaatgatcgcttctgccaaaatgtcattctgtccagtatgcaggtggtctgtctcatatttgcatcgggtaatctattgctggcactggcttgatgaatggttgaatttaaccaaatggttaactgttttgtctcagatgcaacctggggtgggaggaaacttttacagcctcataggaaggaaaaatacagtattcgttcccttggaaactcccaccagctctgcatgttttgctgcagaaaagtctcttttttacgcaataccttctgatacaaccaggcgctacccggtcttgttttccagctgagactgctgtacgaatgcaaccccatggcctacgtcatggagaaggctgggggaatggccaccactgggaaggaggccgtgttagacgtcattcccacagacattcaccagagggcgccggtgatcttggggtcccccgacgacgtgctcgagttcctgaaggtgtatgagaagcactctgcccagtgagcacctgccctgcctgtatctggagaattgcctctacctggaccttttgtctcacacagcagtaccctgacctgctgtgcaccttacattcctagagagcagaaataaaaagcatgactatttccaccatcaaatgctgtagaatgcttggcactccctaaccaaatgctgtctccataatgccactggtgttaagatatattttgagtggatggaggagaaataaacttattcctccttaaaaaaaa

SEQ ID NO: 1423 - DNA, 6803 bp, Homo sapiens
  Genbank Accession No. U22970
agatctatcatgatggccacatgaacacaggcttcactggtcttaccatatgcccatgacccagaagcagccagcctgagagaacaatggaacaaagtgacttaatttccaaagttctgggggtttataaacagcatatggtatgtcacatgactactgtgggattggaaaaagatcatgtaaatagagcactttgcacagaccctggcatgcagcaagtgctcaataaatgataggtgttgtttactaattggactgaatggtgaaaggcctgtgtgccccagggggagctggtgatcaggcttcactaagcccagtatggccgtggctctcatctcagtgtgacatgctttgaatacccttagcggctccaaaagtcctcagcttgaagtgcatttttctgccagcaggcagcacacaaatgttccgctgggcggagctgggagagaggggaaaatgaaactctgcagagtgcaggagctgggagagaggggaaaatgaaactgcagagtgcagaaatagaaactccgacagggattggctgcctagggtgagacgtgggaggatccacaagtgatgataaaaagccagccttcagccggagaaccgtttactcgctgctgtgcccatctatcagcaggctccgggctgaagattgcttctcttctctcctccaaggtaaactcaggagcttatgaagtgtgggcattcaagctgccaccctctgccaggctgcctgtctgcctgtaaatctcatgttctgagagccaggaggccccttctcctgggaggcagcactcctgggtcccttttagtgctctgggctgggacttgtctaagaggatgggttggagatttttagggagatgggatgcaaaaccccaagtggcatgagacccagcttacaggtgcaatatcagcgatctgtggccttaacactgtcacctcttggagccttaattacttcctctgtaaaaggaaagttaagttgcctttgctgctcaaaggactggagtattttagaatcccctttattataggatccaatgtgacagtgagttcatctttaaggatagatgaagccatctggagtggttgttaaaaatgtgggcttggtggccaggcgtggtggttcacgcctgtaatcccagcactttgggaggccgagacccacggatcacgaggtcaggagatcgagaccatcctggctaacacagtgaaaccctgtctctactaaaaatacaaaaaaaattagccgggcttggtggtgggcgcctgtagtctcagctactcgggaggctgaggcaggcaggagaatggcatgaacctgggaggtggagcttgcagtgagatgagattgcgccactgcactccagcctgggcgacagagaaagactccatctcaaaaaaaaaaaaaaaaaaaatgtgggcttgggtattagccaattgtgggtttaaaccctgactttgccatgacctggctaggcagccttgggaatattacttaacctctctgagcttcagtttccttatctataacatgtggttgataacaatggtacctacttcgtggtgttgttataggtacaagtggactgcgtgccataaagtgctaagtactcaatacatgagaggagtttcttgtttttctttttaacttaagaaaatagcattgatctgacaaagatcatattagaggtgagtctgagggcatatgcattttccagttttgtggtataaaggaaagagcataggttcatgaattctgactgtcttgaatgtgtacccatgttgcacaatttgctgtgtgacctttatcccttgtgatattgtaaaatatattttttcatcccccagttcctggcatacaactcctaaaatccttggaatcttcaaagtgataaatatcttttgagtgataactgtctaataagttgactgatggctggcatttcctctggggaggggagaggggctgaaggttaagctgattaccaatgggcagtgatttaatcagtcatgcctatgtaatgaagcctccataaaaacacaaaaggacagggtttgacaagcttccagatagccgaatacaggaggtctccagtgggtggtgcttctggagaggaatggaaactccatgccctttctcccataccttgccctatgcatctcttcatctggagcatttgtaatatccataaggaaccagtaaatgtagctgggtatggtggctgatgcctgtaatctcagcactttgggaggctgaggcaggcagattgcgtgagttcaggagttcaagatcagcctgggcaacatggtgaaaccccatctcaaaaaaaaaaaaaaaaattagttgggcgtggtggtgcatacctgtagtcccagctatctggaggctgaggtgggaggatcacttgagcctgggaggcgaaggtctcagtgagctgagatggggccactgcactccagcctgagcaatagagtgagaccctgtctcaaaacaacaacaagatcaattttttttttttaaagaaagaaaccagtatatgtaagtaaagtgtttccctgagttctgtgagctgctctagcaaattagtaaaactgcaggagggaattgtgggaaccccagtttatagtcagtcagaaacacaggtaaaacaacctagggcttcgattggcagtctgggggactgaaccctcaacatgtgggatcggccactatctacccatagtggtgtcagaattgaatttggggaccctcagctggtgttcaccagaggactgattgtttgcttgctggtggggagaaacccccacacttctgctgtcagaagcctctcgtacggtgagggaaactgagtttctttttccacacacccttctgtgctttctttctgaaaaaaaaattaagttgatgtgaggccaacgtttggtgccagtagatattcaatgcattgtaagaatgagtttgtcttaaaaatttttttaaagcaaattctatgcgtcaggcactgttcaaagtgcgggatacagcgtggaacagttattaaattaacaagtaccctctgaaatagactctattaataccccaattttagaaataaacaaactgaagcccagagaagcaaagtaccctagtatcctgcccaaggtcacttgggtacaaggccaagaacaaccacagtcatgatattgacatctgcggacgttaccacgtgccaaacaccgtgcgaatccgcacagaatccgcacacccaccggttggggcagggacatctctgccactgatgcggagaggaaacggattcccgaggctcctgagagggatcctgggttccattcaccacacctcgctgctttttactgattcagttggaactggaagggaaaacaacggagctgatgagctccaaaaatgctccggggaccatctccctctcgcccgttcgcaggtctagtgacggagcccgcgcgcggcgccaccatgcggcagaaggcggtatccgttttcttgtgctacctgctgctcttcacttgcagtggggtggaggcaggtgagaatgcgggtaaggatgcaggtaaggggacaggtaagggtgcaggtaaggatgcaagtaagggtgcaggtaaggatgcgggtaaggatgcaggtaaagatgcgggtaaggatgcaggtaaggatgcgggtaaggatgcaggtaagggtgcaggtaaggatgcgggtaaggatgcaggtaaggatgcaggtaagggtgcaggtaaggatgcaggtaaggatgtgggtaaggatgcaggtaagggtgcaggtaagggaacagataagggtgcaggtaaggggacaagtaaggaggcatataagggtgctgggggatgggaggagtgtgggataaaggagagagtttcagggtccggggtgtagagggtctggcgtgcttctgtagagaccctggcgtccattccaatggacagcgcagggttggtgtcgccagagtcccagattcaaatcccactactctgttcattcctccatcctaccgaaatttactcgatgctagttctgtgccagctcggcgcctaggggaaagtcccttcccctctgtgaggctctctgagtaggagagtggtggcccccgcctccaggagtggtcctgagcatcagacacagagtaggggacccctgtgtcccaccccaacaaccccactacgctttgtctgctctcctgcaggtaagaaaaagtgctcggagagctcggacagcggctccgggttctggaaggccctgaccttcatggccgtcggaggaggtgggtctggagggcgaggatctcgggcaggcggggcgggcctctgccgcggacgctccctcacctgctcctgttcctccaggactcgcagtcgccgggctgcccgcgctgggcttcaccggcgccggcatcgcggccaactcggtggctgcctcgctgatgagctggtctgcgatcctgaatgggggcggcgtgcccgccggggggctagtggccacgctgcagagcctcggtgagtgcggggcctgggcctggtgggacgttctttactattattttcatcatacatctggggaaactgaggcactcaggaattaagtaatttactcaagtaattaagtagtttaccaggaattaagtgattctttatttatttattttgagacagagtctggctgtgtcacccaggcaggctgaagtgcagtggtgtgatcttggctcactgcaacctctgcctccctggctcaagcgattttcctgccacagcctcccaagtagctgggattacaggcacacgccaccacgcccggctaatttttgtatttttagtagagatggggtttcaccatgttggccaggctggctcaaactcctgacctcagctgatccgcccgcctcggcgtcccatagtgctaggattacaggcgtgagtcaccgcgtccggccagaaattaagtaacttactcaagtctccctgctagtttagaccagagcctagattctgacccagtcagtacaatgcgagaagccccattctcagcctcaaaggctgggtgcctcactgatgctttggccaaatcacaagcctcagttccctcagcggtgcgtggggatgatcatcctcagtttaacattttttgaatctgctcaatctcagagaccacagtagcaaagaaacatagtagagtaactcaaatcaatctcacaccaaactggtcttgacttgcactttttgaacaccatggagggaacagataacagagctcacagtgactcttctatcgattgatcaatctattgatctatttattatagataaaggtcaaaacaaggtctcacactgccaggttggaatgcagtgcatgatcacagctcacagcagcctcgaactcccaggttcaagctatcttcctgcctcagattcccaagtagctgggactataggcgcataccgccacacactggcttttttttttttttttttttttttttttgtagagacggggtctcattgtgttgcccaggatggtcttgaattcctgggctcaagcaatcctcccactttggcctcccaaagtgttgagactgcaagcatgagccactgtgctggcccagagtgactcataaaaaatggccttacttccctctctctcctctctccccacccacccccacctctctctcgcgctctgaggcctccaaaatcctggagaaaacctgcccctgacaaacttccctctctgcctttctgaacctcgcatctcctcttctctcaattctgaatggcaaaagcccaaagaaccagcccaaaagaagagagccctgctcagacggggccacacccctgcaatgggaggggaagagtgtgggcgagcccagggacacctctgggctatcagctagttgtcctctcacatggcacatagctgtgacaagatgaaatgatccctggcttgtgaaccccccacacccacacagggctccatgaaggtggctgttagcatgattaataacatggcgtttccatggcagacatcaggtgaaggagccattatttttgcctttttcatcactgaaacacatctctgatttgggatgtcaaggcaaggtaaaaatgggactcactttgtagtagtgccatcccctctcagggcctctgtttctccatctagacataaggggttggactcaaccaatggtttccagacatttggattcccaggcctggcacttgggcccagtgactcatctgtgtttgctttacaggggctggtggcagcagcgtcgtcataggtaatattggtgccctgatgcggtacgccacccacaagtatctcgatagtgaggaggatgaggagtagccagcagctcccagaacctcttcttccttcttggcctaactcttccagttaggatctagaactttgcctttttttttttttttttttttttttgagatgggttctcactatattgtccaggctagagtgcagtggctattcacagatgcgaacatagtacactgcagcctccaactcctagcctcaagtgatcctcctgtctcaacctcccaagtaggattacaagcatgcgccgacgatgcccagaatccagaactttgtctatcactctccccaacaacctagatgtgaaaacagaataaacttcacccagaaaacactttgtcctgctgtcaatcatgtttgcagtgagaagcccaaaacaatctggctctggcctgcaccatccacacacccccattcccattttcccctcgag

SEQ ID NO: 1424 - DNA, 1521 bp, Homo sapiens
  Genbank Accession No. U23070
ctggcgcgggcgggagctgcggcggatacccttgcgtgctgtggagaccctactctcttcgctgagaacggccgctagcggggactgaaggccgggagcccactcccgacccggggctagcgtgcgtccctagagtcgagcggggcaagggagccagtggccgccgacgggggaccgggaaacttttctgggctcctggagagccctgtagccgcgctccatgctccggcagcggcccgaaacccagccccgccgctgacggagcccgccgctccgggcagggcccatgccctgcgcgctccgggggtcgtagctgccgccgagccggggctccggaagccggcgggggcgccgcggccgtgcggggcgtcaatggatcgccactccagctacatcttcatctggctgcagctggagctctgcgccatggccgtgctgctcaccaaaggtgaaattcgatgctactgtgatgctgcccactgtgtagccactggttatatgtgtaaatctgagctcagcgcctgcttctctagacttcttgatcctcagaactcaaattccccactcacccatggctgcctggactctcttgcaagcacgacagacatctgccaagccaaacaggcccgaaaccactctggcaccaccatacccacattggaatgctgtcatgaagacatgtgcaattacagagggctgcacgatgttctctctcctcccaggggtgaggcctcaggacaaggaaacaggtatcagcatgatggtagcagaaaccttatcaccaaggtgcaggagctgacttcttccaaagagttgtggttccgggcagcggtcattgccgtgcccattgctggagggctgattttagtgttgcttattatgttggccctgaggatgcttcgaagtgaaaataagaggctgcaggatcagcggcaacagatgctctcccgtttgcactacagctttcacggacaccattccaaaaaggggcaggttgcaaagttagacttggaatgcatggtgccggtcagtgggcacgagaactgctgtctgacctgtgataaaatgagacaagcagacctcagcaacgataagatcctctcgcttgttcactggggcatgtacagtgggcacgggaagctggaattcgtatgacggagtcttatctgaactacacttactgaacagcttgaaggccttttgagttctgctggacaggagcactttatctgaagacaaactcatttaatcatctttgagagacaaaatgacctctgcaaacagaatcttggatatttcttctgaaggattatttgcacagacttaaatacagttaaatgtgttatttgcttttaaaattataaaaagcaaagagaagactttgtacacactgtcaccagggttatttgcatccaagggagctggaattgagtacctaaataaacaaaaatgtgccctatgtaagcttctacatcttgatttattgtaaagatttaaaagaaatatatatattttgtctga

SEQ ID NO: 1425 - DNA, 3901 bp, Homo sapiens
  Genbank Accession No. U25997
cagtttgcaaaagccagaggtgcaagaagcagcgactgcagcagcagcagcagcagcggcggtggcagcagcagcagcagcggcggcagcagcagcagcagcggaggcaccggtggcagcagcagcatcaccagcaacaacaacaaaaaaaaatcctcatcaaatcctcacctaagctttcagtgtatccagatccacatcttcactcaagccaggagagggaaagaggaaaggggggcaggaaaaaaaaaaaacccaacaacttagcggaaacttctcagagaatgctccaaaactcagcagtgcttctggtgctggtgatcagtgcttctgcaacccatgaggcggagcagaatgactctgtgagccccaggaaatcccgagtggcggctcaaaactcagctgaagtggttcgttgcctcaacagtgctctacaggtcggctgcggggcttttgcatgcctggaaaactccacctgtgacacagatgggatgtatgacatctgtaaatccttcttgtacagcgctgctaaatttgacactcagggaaaagcattcgtcaaagagagcttaaaatgcatcgccaacggggtcacctccaaggtcttcctcgccattcggaggtgctccactttccaaaggatgattgctgaggtgcaggaagagtgctacagcaagctgaatgtgtgcagcatcgccaagcggaaccctgaagccatcactgaggtcgtccagctgcccaatcacttctccaacagatactataacagacttgtccgaagcctgctggaatgtgatgaagacacagtcagcacaatcagagacagcctgatggagaaaattgggcctaacatggccagcctcttccacatcctgcagacagaccactgtgcccaaacacacccacgagctgacttcaacaggagacgcaccaatgagccgcagaagctgaaagtcctcctcaggaacctccgaggtgaggaggactctccctcccacatcaaacgcacatcccatgagagtgcataaccagggagaggttattcacaacctcaccaaactagtatcattttaggggtgttgacacaccaattttgagtgtactgtgcctggtttgatttttttaaagtagttcctattttctatcccccttaaagaaaattgcatgaaactaggcttctgtaatcaatatcccaacattctgcaatggcagcattcccaccaacaaaatccatgtgatcattctgcctctcctcaggagaaagtaccctcttttaccaacttcctctgccatgtcttttcccctgctcccctgagaccacccccaaacacaaaacattcatgtaactctccagccattgtaatttgaagatgtggatccctttagaacggttgccccagtagagttagctgataaggaaactttatttaaatgcatgtcttaaatgctcataaagatgttaaatggaattcgtgttatgaatctgtgctggccatggacgaatatgaatgtcacatttgaattcttgatctctaatgagctagtgtcttatggtcttgatcctccaatgtctaattttctttccgacacatttaccaaattgcttgagcctggctgtccaaccagactttgagcctgcatcttcttgcatctaatgaaaaacaaaaagctaacatctttacgtactgtaactgctcagagctttaaaagtatctttaacaattgtcttaaaaccagagaatcttaaggtctaactgtggaatataaatagctgaaaactaatgtactgtacataaattccagaggactctgcttaaacaaagcagtatataataactttattgcatatagatttagttttgtaacttagctttatttttcttttcctgggaatggaataactatctcacttccagatatccacataaatgctccttgtggccttttttataactaagggggtagaagtagttttaattcaacatcaaaacttaagatgggcctgtatgagacaggaaaaaccaacaggtttatctgaaggaccccaggtaagatgttaatctcccagcccacctcaacccagaggctactcttgacttagacctatactgaaagatctctgtcacatccaactggaaattccaggaaccaaaaagagcatccctatgggcttggaccacttacagtgtgataaggcctactatacattaggaagtggtagttctttactcgtcccctttcatcggtgcctggtactctggcaaatgatgatggggtgggagactttccattaaatcaatcaggaatgagtcaatcagcctttaggtctttagtccgggggacttggggctgagagagtataaataaccctgggctgtccagccttaatagacttctcttacattttcgtcctgtagcacgctgcctgccaaagtagtcctggcagctggaccatctctgtaggatcgtaaaaaaatagaaaaaaagaaaaaaaaaagaaagaaagagggaaaaagagctggtggtttgatcatttctgccatgatgtttacaagatggcgaccaccaaagtcaaacgactaacctatctatgaacaacagtagtttctcagggtcactgtccttgaacccaacagtcccttatgagcgtcactgcccaccaaaggtcaatgtcaagagaggaagagagggaggaggggtaggactgcaggggccactccaaactcgcttaggtagaaactattggtgctcgactctcactaggctaaactcaagatttgaccaaatcgagtgatagggatcctggtgggaggagagagggcacatctccagaaaaatgaaaagcaatacaactttaccataaagcctttaaaaccagtaacgtgctgctcaaggaccaagagcaattgcagcagacccagcagcagcagcagcagcacaaacattgctgcctttgtccccacacagcctctaagcgtgctgacatcagattgttaagggcatttttatactcagaactgtcccatccccaggtccccaaacttatggacactgccttagcctcttggaaatcaggtagaccatattctaagttagactcttcccctccctcccacacttcccacccccaggcaaggctgacttctctgaatcagaaaagctattaaagtttgtgtgttgtgtccattttgcaaacccaactaagccaggaccccaatgcgacaagtagttcatgagtattcctagcaaatttctctctttcttcagttcagtagatttccttttttcttttcttttttttttttttttttttttggctgtgacctcttcaaaccgtggtacccccccttttctccccacgatgatatctatatatgtatctacaatacatatatctacacatacagaaagaagcagttctcacatgttgctagttttttgcttctctttcccccaccctactccctccaattccccccttaaacttccaaagcttcgtcttgtgtttgctgcagagtgattcgggggctgacctagaccagtttgcatgattcttctcttgtgatttggttgcactttagacatttttgtgccattatatttgcattatgtatttataatttaaatgatatttaggtttttggctgagtactggaataaacagtgagcatatctggtatatgtcattatttattgttaaattacattttttaagctccatgtgcatataaaggttatgaaacatatcatggtaatgacagatgcaagttattttatttgcttattttttataattaaagatgccatagcataatatgaagcctttggtgaattccttctaagataaaaataataataaagtgttacgttttattggtttcaaaaaaaaaaaaaaaaaaaa

SEQ ID NO: 1426 - DNA, 2638 bp, Homo sapiens
  Genbank Accession No. U27655
gaggaaaggggaaatgcggcccgctccccactcagtgccactctgtgccactccgtgccaggccctgagggcacccggttgctgcttccttccgtctttccccaaggactatcagagatgccagcgtgacccctgacacgtgtgtgcagcagcctgcagctgccccaagccatggctgaacactgactcccagctgtgggcttcaccattacagactccccagggcttcaaagacttctcagcttcgagcatggcttttggctgtcagggcagctgtacaatagtggatgtttgagacggaggcagatgagaagagggagatggccttggaggaagggaaggggcctggtgccgaggattccccacccagcaaggagccctctcctggccaggagcttcctccaggacaagaccttccacccaacaaggactccccttctgggcaggaacccgctcccagccaagaaccactgtccagcaaagactcagctacctctgaaggatcccctccaggcccagatgctccgcccagcaaggatgtgccaccatgccaggaaccccctccagcccaagacctctcaccctgccaggacctacctgctggtcaagaacccctgcctcaccaggaccctctactcaccaaagacctccctgccatccaggaatcccccacccgggaccttccaccctgtcaagatctgcctcctagccaggtctccctgccagccaaggcccttactgaggacaccatgagctccggggacctactagcagctactggggacccacctgcggcccccaggccagccttcgtgatccctgaggtccggctggatagcacctacagccagaaggcaggggcagagcagggctgctcgggagatgaggaggatgcagaagaggccgaggaggtggaggagggggaggaaggggaggaggacgaggatgaggacaccagcgatgacaactacggagagcgcagtgaggccaagcgcagcagcatgatcgagacgggccagggggctgagggtggcctctcactgcgtgtgcagaactcgctgcggcgccggacgcacagcgagggcagcctgctgcaggagccccgagggccctgctttgcctccgacaccaccttgcactgctcagacggtgagggcgccgcctccacctggggcatgccttcgcccagcaccctcaagaaagagctgggccgcaatggtggctccatgcaccacctttccctcttcttcacaggacacaggaagatgagcggggctgacaccgttggggatgatgacgaagcctcccggaagagaaagagcaaaaacctagccaaggacatgaagaacaagctggggatcttcagacggcggaatgagtcccctggagcccctcccgcgggcaaggcagacaaaatgatgaagtcattcaagcccacctcagaggaagccctcaagtggggcgagtccttggagaagctgctggttcacaaatacgggttagcagtgttccaagccttccttcgcactgagttcagtgaggagaatctggagttctggttggcttgtgaggacttcaagaaggtcaagtcacagtccaagatggcatccaaggccaagaagatctttgctgaatacatcgcgatccaggcatgcaaggaggtcaacctggactcctacacgcgggagcacaccaaggacaacctgcagagcgtcacgcggggctgcttcgacctggcacagaagcgcatcttcgggctcatggaaaaggactcgtaccctcgctttctccgttctgacctctacctggaccttattaaccagaagaagatgagtcccccgctttaggggccactggagtcgagctcagcgttcacaccaggcgggctgggtcccctgcccacctgcctccctgccccctgtgacggagggggcaagcaagcccccagaggccgtgtctctggacagacggatagacatacggaagcgaggcctggaccaagagaggcccaggctactggaggagtagaaggatgggccccgtggggtccccactgccccggtacgagggggcccaagaccctggcaggtcaggggccctggccaagccagatctggagctgctgctccctgctgcggagaccgcggaggcttcgcgttgaccaagttccttaaagaactggctgatggggcaggaggtccaggcctgggctctcgggccctcctagagggccattggagcttgcagctcagacccccactttgagttttatttatttaaatagtagttggatgcttggcacgtcgtcctgtaataggaaacccttgcctcatcagttttcctgatttacaagtgcaatattttagccaatgccttgggagaagctgccatgcaaaggtggacaccattctccagcttcaggggatatgctcgtcccgggcaccggtggcaggcagctggccttctggactaaggcagcctggggggacactgcagtctggctacacacagagatctggcaccccctgggtggagtgtccctcgggggctttgggaaagcatggcaccctcagaccacacagtagccaagttctggagcaaataaaaggcctgtgttatttcttgttcttgaaaaaaa

SEQ ID NO: 1427 - DNA, 1030 bp, Homo sapiens
  Genbank Accession No. U28964
gcctgtgagcagcgagatccagggacagagtctcagcctcgccgctgctgccgccgccgccgcccagagactgctgagcccgtccgtccgccgccaccacccactccggacacagaacatccagtcatggataaaaatgagctggttcagaaggccaaactggccgagcaggctgagcgatatgatgacatggcagcctgcatgaagtctgtaactgagcaaggagctgaattatccaatgaggagaggaatcttctctcagttgcttataaaaatgttgtaggagcccgtaggtcatcttggagggtcgtctcaagtattgaacaaaagacggaaggtgctgagaaaaaacagcagatggctcgagaatacagagagaaaattgagacggagctaagagatatctgcaatgatgtactgtctcttttggaaaagttcttgatccccaatgcttcacaagcagagagcaaagtcttctatttgaaaatgaaaggagattactaccgttacttggctgaggttgccgctggtgatgacaagaaagggattgtcgatcagtcacaacaagcataccaagaagcttttgaaatcagcaaaaaggaaatgcaaccaacacatcctatcagactgggtctggcccttaacttctctgtgttctattatgagattctgaactccccagagaaagcctgctctcttgcaaagacagcttttgatgaagccattgctgaacttgatacattaagtgaagagtcatacaaagacagcacgctaataatgcaattactgagagacaacttgacattgtggacatcggatacccaaggagacgaagctgaagcaggagaaggaggggaaaattaaccggccttccaacttttgtctgcctcattctaaaatttacacagtagaccatttgtcatccatgctgtcccacaaatagttttttgtttacgatttatgacaggtttatgttacttctatttgaatttctatatttcccatgtggtttttatgtttaatattaggg

SEQ ID NO: 1428 - DNA, 4098 bp, Homo sapiens
  Genbank Accession No. U30246
ggtggcctctgtggccgtccaggctagcggcggcccgcaggcggcggggagaaagactctctcacctggtcttgcggctgtggccaccgccggccaggggtgtggagggcgtgctgccggagacgtccgccgggctctgcagttccgccgggggtcgggcagctatggagccgcggcccacggcgccctcctccggcgccccgggactggccggggtcggggagacgccgtcagccgctgcgctggccgcagccagggtggaactgcccggcacggctgtgccctcggtgccggaggatgctgcgcccgcgagccgggacggcggcggggtccgcgatgagggccccgcggcggccggggacgggctgggcagacccttggggcccaccccgagccagagccgtttccaggtggacctggtttccgagaacgccgggcgggccgctgctgcggcggcggcggcggcggcggcagcggcggcggctggtgctggggcgggggccaagcagacccccgcggacggggaagccagcggcgagagcgagccagctaaaggcagcgaggaagccaagggccgcttccgcgtgaacttcgtggacccagctgcctcctcgtcggctgaagacagcctgtcagatgctgccggggtcggagtcgacgggcccaacgtgagcttccagaacggcggggacacggtgctgagcgagggcagcagcctgcactccggcggcggcggcggcagtgggcaccaccagcactactattatgatacccacaccaacacctactacctgcgcaccttcggccacaacaccatggacgctgtgcccaggatcgatcactaccggcacacagccgcgcagctgggcgagaagctgctccggcctagcctggcggagctccacgacgagctggaaaaggaaccttttgaggatggctttgcaaatggggaagaaagtactccaaccagagatgctgtggtcacgtatactgcagaaagtaaaggagtcgtgaagtttggctggatcaagggtgtattagtacgttgtatgttaaacatttggggtgtgatgcttttcattagattgtcatggattgtgggtcaagctggaataggtctatcagtccttgtaataatgatggccactgttgtgacaactatcacaggattgtctacttcagcaatagcaactaatggatttgtaagaggaggaggagcatattatttaatatctagaagtctagggccagaatttggtggtgcaattggtctaatcttcgcctttgccaacgctgttgcagttgctatgtatgtggttggatttgcagaaaccgtggtggagttgcttaaggaacattccatacttatgatagatgaaatcaatgatatccgaattattggagccattacagtcgtgattcttttaggtatctcagtagctggaatggagtgggaagcaaaagctcagattgttcttttggtgatcctacttcttgctattggtgatttcgtcataggaacatttatcccactggagagcaagaagccaaaagggttttttggttataaatctgaaatatttaatgagaactttgggcccgattttcgagaggaagagactttcttttctgtatttgccatcttttttcctgctgcaactggtattctggctggagcaaatatctcaggtgatcttgcagatcctcagtcagccatacccaaaggaacactcctagccattttaattactacattggtttacgtaggaattgcagtatctgtaggttcttgtgttgttcgagatgccactggaaacgttaatgacactatcgtaacagagctaacaaactgtacttctgcagcctgcaaattaaactttgatttttcatcttgtgaaagcagtccttgttcctatggcctaatgaacaacttccaggtaatgagtatggtgtcaggatttacaccactaatttctgcaggtatattttcagccactctttcttcagcattagcatccctagtgagtgctcccaaaatatttcaggctctatgtaaggacaacatctacccagctttccagatgtttgctaaaggttatgggaaaaataatgaacctcttcgtggctacatcttaacattcttaattgcacttggattcatcttaattgctgaactgaatgttattgcaccaattatctcaaacttcttccttgcatcatatgcattgatcaatttttcagtattccatgcatcacttgcaaaatctccaggatggcgtcctgcattcaaatactacaacatgtggatatcacttcttggagcaattctttgttgcatagtaatgttcgtcattaactggtgggctgcattgctaacatatgtgatagtccttgggctgtatatttatgttacctacaaaaaaccagatgtgaattggggatcctctacacaagccctgacttacctgaatgcactgcagcattcaattcgtctttctggagtggaagaccacgtgaaaaactttaggccacagtgtcttgttatgacaggtgctccaaactcacgtccagctttacttcatcttgttcatgatttcacaaaaaatgttggtttgatgatctgtggccatgtacatatgggtcctcgaagacaagccatgaaagagatgtccatcgatcaagccaaatatcagcgatggcttattaagaacaaaatgaaggcattttatgctccagtacatgcagatgacttgagagaaggtgcacagtatttgatgcaggctgctggtcttggtcgtatgaagccaaacacacttgtccttggatttaagaaagattggttgcaagcagatatgagggatgtggatatgtatataaacttatttcatgatgcttttgacatacaatatggagtagtggttattcgcctaaaagaaggtctggatatatctcatcttcaaggacaagaagaattattgtcatcacaagagaaatctcctggcaccaaggatgtggtagtaagtgtggaatatagtaaaaagtccgatttagatacttccaaaccactcagtgaaaaaccaattacacacaaagttgaggaagaggatggcaagactgcaactcaaccactgttgaaaaaagaatccaaaggccctattgtgcctttaaatgtagctgaccaaaagcttcttgaagctagtacacagtttcagaaaaaacaaggaaagaatactattgatgtctggtggctttttgatgatggaggtttgaccttattgataccttaccttctgacgaccaagaaaaaatggaaagactgtaagatcagagtattcattggtggaaagataaacagaatagaccatgaccggagagcgatggctactttgcttagcaagttccggatagacttttctgatatcatggttctaggagatatcaataccaaaccaaagaaagaaaatattatagcttttgaggaaatcattgagccatacagacttcatgaagatgataaagagcaagatattgcagataaaatgaaagaagatgaaccatggcgaataacagataatgagcttgaactttataagaccaagacataccggcagatcaggttaaatgagttattaaaggaacattcaagcacagctaatattattgtcatgagtctcccagttgcacgaaaaggtgctgtgtctagtgctctctacatggcatggttagaagctctatctaaggacctaccaccaatcctcctagttcgtgggaatcatcagagtgtccttaccttctattcataaatgttctatacagtggacagccctccagaatggtacttcagtgcctagtgtagtaacctgaaatcttcaatgacacattaacatcacaatggcgaatggtgacttttctttcacgatttcattaatttgaaagcacacaggaaagcttgctccattgataacgtgtatggagacttcggttttagtcaattccatatctcaatcttaatggtgattcttctctgttgaactgaagtttgtgagagtagttttcctttgctacttgaatagcaataaaagcgtgttaactttttgg

SEQ ID NO: 1429 - DNA, 2036 bp, Homo sapiens
  Genbank Accession No. U30521
tttcctctttctctaagagtctctctctccctttccctctctctccccccaatctgtctttctagcatgttgccctttttcaaccacatttgtgtttcaggtgtagagaggagagagagtgaacagggagcggggcttttgtctgttggtctccctggactgaagagagggagaatagaagcccaagactaagattctcaaaatggtttattacccagaactctttgtctgggtcagtcaagaaccatttccaaacaaggacatggagggaaggcttcctaagggaagacttcctgtcccaaaggaagtgaaccgcaagaagaacgatgagacaaacgctgcctccctgactccactgggcagcagtgaactccgctccccaagaatcagttacctccactttttttaatcgtaacacctccatttgtattacatatggtgtatgggtattgatgaggtcatggtatcatatatgggatttttttctgtgtaaatcatcaagtataagaagaaactatgggactctgagccttgctttagagaatttacagtggacaaataggtgtcatcaaaccagtttttaatcattctgactcaagtgaaaacgctcagaatttcacactgtgaatccacgtttacaacccttacaggtgggccttcaggcctggttcgctacaacaatgtcttccacaactcaaactcccaccgcgctcacacaaccggtccactcctgccttttcactcacacagctcccgactgcttcttgcagaggctgagagtccccccccccacctttttttttcatttagatgtaacaaacctagtagtttatgttcatcaattgtctgtatatctctatattttatccatgtactcttttgatgtatagaagtagtttgaaactcattgtttccttgtggtaagtgaccgagatgctgccacaggacctgagacactgatgaatggtgctattttggactttcaacatgctccttggcgaggtagctctgatggagttattttttatttccatgttctaagaaggtgttggtactctgtttccctgaatgttgttctctagactggattgacttgttttccttgtgtcttcagtgtggctttcttcctcagtgttgtaggttgagcgaatgctaccagagtgtgagagaccattgtctcgttggctggcgctcacggacatgcagtcacggtagcgggagcaatcacaaaactgtaatttacttaccaaatctcttcctttccgtagcctcgcctgcctgacttagagaaagaaaagcaataattttacaggcattttgaggtgtctctttgggttctttctgtttgaaaggatatttgtcgaaaaaaagagcaaaaccgttttaaataaactccccctggaaaaaaacccaaaacactggcatctgagtaggaatatgaaaatgacaccttttccaaatattaaattggaaaacaaggtctacaaaatcatgatacttttttaaaaggcagagcattcttttttcggcaattttgataagcaaggtgtagatttacatttttgtccttgctcccaacgaaatggataaacaaaaataaattaccatctactcatggaatgttgttgtgttagccagtctgaaagcccaccttaatttttatataactgtctttagctcttcttttgacagggcaggccttgttctgaactgtttcgcttctgactgttaaacaccgatgacgcatgcactgcacttcttcgttttcttcttgctcccccattggcctgagtttcttgtgcattactcctctccctccttcgttagaataggtatatcagctgtgtaaatagagcaagaaaacagtattctgcatctgtggcatttatgtagagttgcagttgtgtactgctgaaaatgcaggcttttgtaacagtgtgatctttactgatgcactcatgacaagtacccaatgtattttagctattttagtagtatttgttcaataaatacgcaagctgtaaggtaactgtctg

SEQ ID NO: 1430 - DNA, 2827 bp, Homo sapiens
  Genbank Accession No. U37519
tggcgatgctactgtttaattgcaggaggtgggggtgtgtgtaccatgtaccagggctattagaagcaagaaggaaggagggagggcagagcgccctgctgagcaacaaaggactcctgcagccttctctgtctgtctcttggcacaggcacatggggaggcctcccgcaggtggggggccaccagtccaggggtgggagcactacagggcacgagttggtttgggagctgccagtctcctgggaggatcgcagtcagcagagcagggctgaggcctgggggtaggagcagagcctgcgcatctggaggcagcatgtccaagaaagggagtggaggtgcagcgaaggacccaggggcagagcccacgctggggatggaccccttcgaggacacactgcggcggctgcgtgaggccttcaactgagggcgcacgcggccggccgagttccgggctgcgcagctccagggcctgggccacttccttcaagaaaacaagcagcttctgcgcgacgtgctggcccaggacctgcataagccagctttcgaggcagacatatctgagctcatcctttgccagaacgaggttgactacgctctcaagaaccttcaggcctggatgaaggatgaaccacggtccacgaacctgttcatgaagctggactcggtcttcatctggaaggaaccctttggcctggtcctcatcatcgcaccctggaactacccattgaacctgaccctggtgctcctggtgggcaccctccccgcagggaattgcgtggtgctgaagccgtcagaaatcagccagggcacagagaaggtcctggctgaggtgctgccccagtacctggaccagagctgctttgccgtggtgctgggcggaccccaggagacagggcagctgctagagcacaagttggactacatcttcttcacagggagccctcgtgtgggcaagattgtcatgactgctgccaccaagcacctgacgcctgtcaccctggagctggggggcaagaacccctgctacgtggacgacaactgcgacccccagaccgtggccaaccgcgtggcctggttctgctacttcaatgccggccagacctgcgtggcccctgactacgtcctgtgcagccccgagatgcaggagaggctgctgcccgccctgcagagcaccatcacccgtttctatggcgacgacccccagagctccccaaacctgggccgcatcatcaaccagaaacagttccagcggctgcgggcattgctgggctgcggccgcgtggccattgggggccagagcaacgagagcgatcgctacatcgcccccacggtgctggtggacgtgcaggagacggagcctgtgatgcaggaggagatcttcgggcccatcctgcccatcgtgaacgtgcagagcgtggacgaggccatcaagttcatcaaccggcaggagaagcccctggccctgtacgccttctccaacagcagacaggttgtgaaccagatgctggagcggaccagcagcggcagctttggaggcaatgagggcttcacctacatatctctgctgtccgtgccattcgggggagtcggccacagtgggatgggccggtaccacggcaagttcaccttcgacaccttctcccaccaccgcacctgcctgctcgccccctccggcctggagaaattaaaggagatccgctacccaccctataccgactggaaccagcagctgttacgctggggcatgggctcccagagctgcaccctcctgtgagcgtcccacccgcctccaacgggtcacacagagaaacctgagtctagccatgaggggcttatgctcccaactcacattgttcctccagaccgcaggctcccccagcctcaggttgctggagctgtcacatgactgcatcctgcctgccagggctgcaaagcaaggtcttgcttctatctgggggacgctgctcgagagaggccgagaggccgcagaacatgccaggtgtcctcactcaccccaccctccccaattccagccctttgccctctcggtcagggttggccaggcccagtcacaggggcagtgtcaccctggaaaatacagtgccctgccttcttaggggcatcagccctgaacggttgagagcgtggagccctccaggcctttgctctcccctctaggcacacgcgcacttccacctctgccccatcccaactgcaccagcactgcctcccccagggatcctctcacatcccacactggtctctgcaccacccctctggttcacaccgcaccctgcactcacccacagcagctccatccactgggaaaactggggtttgcatcactccactgcacagtgttagtgggacctgggggcaagtcccttgacttctctgagcctcagtttccttatgtgaaagttgctggaaccaaaatggagtcacttatgccaaactctaataaaatggagtcgggggggcacatagaagccctcacacacacatgcccgtaacaggatttatcaccaagacacgcctgcatgtaagaccagacacagggcgtatggaaaagcacgtcctcaaagactgtagtattccagatgagctgcagatgcttacctaccacggccgtctccaccagaaaaccatcgccaactcctgcgatcagcttgtgacttacaaaccttgtttaaaagctgcttacatggacttctgtcctttaaaacgttccccttggctgtggccctctgtgtatgcctgggatccttccaagcactcatagcccagataggaatcctctgctcctcccaaataaattcatctgttc

SEQ ID NO: 1431 - DNA, 1427 bp, Homo sapiens
  Genbank Accession No. U38260
attaacccaggagatgggggtcgaggagagaccccggggagtagagagagagaaactcactccccgagtccccgaccctccccaagcaaggttataatataacttatcctctcatgcttttttcctgccccttctccccaaatcatcaacaatagaagaagaagaaaacatgtcaggacacaaatgcagttatccctgggacttacaggatcgatatgctcaagataagtcagttgtaaataagatgcaacagaaatattgggagacgaagcaggcctttattaaagccacagggaagaaggaagatgaacatgttgttgcctctgacgcggacctggatgccaagctagagctgtttcattcaattcagagaacctgtctggacttatcgaaagcaattgtactctatcaaaagaggatatgtttcttgtctcaagaagaaaacgaactgggaaaatttcttcgatcccaaggtttccaagataaaaccagagcaggaaagatgatgcaagcgacaggaaaggccctctgcttttcttcccagcaaaggttggccttacgaaatcctttgtgtcgatttcaccaagaagtggagacttttcggcatcgggccatctcagatacttggctgacggtgaaccgcatggaacagtgcaggacggaatatagaggagcactattatggatgaaggacgtgtctcaggagcttgatccagacctctacaagcaaatggagaagttcaggaaggtacaaacacaagtgcgccttgcaaaaaaaaactttgacaaattgaagatggatgtttgtcaaaaagtggatcttcttggagcgagcagatgcaatctcttgtctcacatgctagcaacataccagcttgcctgggaccagtggcagggaccccggaacctgaaggtgctgacaaagatgacctgctgctgttgagtgagatcttcaatgcttcctccttggaagagggcgagttcagcaaagagtgggccgctgtgtttggagacggccaagtgaaggagccagtgcccactatggccctgggagagccagaccccaaggcccagacaggctcaggtttccttccttcgcagcttttagaccaaaatatgaaagacttacaggcctcgctacaagaacctgctaaggctgcctcagacctgactgcctggttcagcctcttcgctgacctcgacccactctcaaatcctgatgctgttgggaaaaccgataaagaacacgaattgctcaatgcatgaatctgtacccttcgggagggcactcacatgccgcccccagcagctcccctgggggctagcagaagtataaagtgatcagtatgctgttttaataattatgtgccattttaataaaatgaaagggtcaacggccctgtttatattggtataaaaaaaaaaaa

SEQ ID NO: 1432 - DNA, 1445 bp, Homo sapiens
  Genbank Accession No. U38980
tttttttttttgatgttctccagtgcctcagtggcagcagaactggccctgtatcaggccgctaccgccactccatgaccaacctccctgcatacccccccccccagcacccctcccacaggaccgcttctgtgtttgggacccaccaggcctttgcaccatacaacaaaccctcactctccggggcccggtctgcgcccaggctgaacaccacgaacgcctgggacgcagctcctccttccctggggagccagcccctctaccgctccagcctctcccacctgggaccgcagcacctgcccccaggatcctccacctccggtgcagtcagtgcctccctccccagcggtccctcaagcagcccaggcgagcgtccctgccactgtgcccatgcagatgccaagccagcagagtcagcaggcgctcgctggagcgacccgaagccagagcagagcagagcaggtcataaaactacacggaagagctgaaagtgcccccagatgaggactgcatcatctgcatggagaagctgtccgcagcgtctggatacagcgatgtgactgacagcaaggcaatggggcccctggctgtgggctgcctcaccaagtgcagccacgccttccacctgctgtgcctcctggccatgtactgcaacggcaataagggccctgagcaccccaatcccggaaagccgttcactgccagagggtttcccgccagtgctaccttccagacaacgccagggccgcaagcctccaggggcttccagaacccggagacactggctgacattccggcctccccacagctgctgaccgatggccactacatgacgctgcccgtgtctccggaccagctgccctgtgacgaccccatggcgggcagcggaggcgcccccgtgctgcgggtgggccatgaccacggctgccaccagcagccacgtatctgcaacgcgcccctccctggccctggaccctatcgtacagaacctgctaaggccatcaaacctattgatcggaagtcagtccatcagatttgctctgggccagtggtactgagtctaagcactgcagtgaaggagttagtagaaaacagtctggatgctggtgccactaatattgatctaaagcttaaggactatggaatggatctcattgaagtttcaggcaatggatgtggggtagaagaagaaaacttcgaaggcttaatgatgtcaccatttctacctgccacgtctcggcgaaggttgggactcgactggtgtttgatcacgatgggaaaatcatccagaagaccccctacccccaccccagagggaccacagtcagcgtgaagcagttattttctacgctacctgtgcgccataaggaatttcaaaggaatattaagaagaaacatgctgcttccccttcgccttctgccgtgattgtcagttttaaccggaa

SEQ ID NO: 1433 - DNA, 2114 bp, Homo sapiens
  Genbank Accession No. U40434
aggaattccggtggccggccactcccgtctgctgtgacgcgcggacagagagctaccggtggacccacggtgcctccctccctgggatctacacagaccatggccttgcaacggctcgacccctgttggtcctgtggggaccgccctggcagcctcctgttcctgctcttcagcctcggatgggtgcatcccgcgaggaccctggctggagagacagggacggagtctgcccccctggggggagtcctgacaaccccccataacatttccagcctctcccctcgccaactccttggcttcccgtgtgcggaggtgtccggcctgagcacggagcgtgtccgggagctggctgtggccttggcacagaagaatgtcaagctctcaacagagcagctgcgctgtctggctcaccggctctctgagccccccgaggacctggacgccctcccattggacctgctgctattcctcaacccagatgcgttctcggggccccaggcctgcacccgtttcttctcccgcatcacgaaggccaatgtggacctgctcccgaggggggctcccgagcgacagcggctgctgcctgcggctctggcctgctggggtgtgcgggggtctctgctgagcgaggctgatgtgcgggctctgggaggcctggcttgcgacctgcctgggcgctttgtggccgagtcggccgaagtgctgctaccccggctggtgagctgcccgggacccctggaccaggaccagcaggaggcagccagggcggctctgcagggcgggggacccccctacggccccccgtcgacatggtctgtctccacgatggacgctctgcggggcctgctgcccgtgctgggccagcccatcatccgcagcatcccgcagggcatcgtggccgcgtggcggcaacgctcctctcgggacccatcctggcggcagcctgaacggaccatcctccggccgcggttccggcgggaagtggagaagacagcctgtccttcaggcaagaaggcccgcgagatagacgagagcctcatcttctacaagaagtgggagctggaagcctgcgtggatgcggccctgctggccacccagatggaccgcgtgaacgccatccccttcacctacgagcagctggacgtcctaaagcataaactggatgagctctacccacaaggttaccccgagtctgtgatccagcacctgggctacctcttcctcaagatgagccctgaggacattcgcaagtggaatgtgacgtccctggagaccctgaaggctttgcttgaagtcgacaaagggcacgaaatgagtcctcaggctcctcggcggcccctcccacaggtggccaccctgatcgaccgctttgtgaagggaaggggccagctagacaaagacaccctagacaccctgaccgccttctaccctgggtacctgtgctccctcagccccgaggagctgagctccgtgccccccagcagcatctgggcggtcaggccccaggacctggacacgtgtgacccaaggcagctggacgtcctctatcccaaggcccgccttgctttccagaacatgaacgggtccgaatacttcgtgaagatccagtccttcctgggtggggcccccacggaggatttgaaggcgctcagtcagcagaatgtgagcatggacttggccacgttcatgaagctgcggacggatgcggtgctgccgttgactgtggctgaggtgcagaaacttctgggaccccacgtggagggcctgaaggcggaggagcggcaccgcccggtgcgggactggatcctacggcagcggcaggacgacctggacacgctggggctggggctacagggcggcatccccaacggctacctggtcctagacctcagcgtgcaagagaccctctcggggacgccctgcctcctaggacctggacctgttctcaccgtcctggcactgctcctagcctccaccctggcctgagggccccactcccttgctggccccagccctgctggggatccccgcctggccaggagcaggcacgggtgatccccgttccaccccaagagaactcgcgctcagtaaacgggaacatgccccctgcagac

SEQ ID NO: 1434 - DNA, 11233 bp, Homo sapiens
  Genbank Accession No. U43842
gaattccttccgtagcttcaccagacacctaattggccaagaaggtttgaagacctgatgtggttcttaattggggatggggaattaagggctactgtatctataggattatcttttcacttgcatagacctatttggtgtgttcagggcatagtgatactataattgccatatttaacagtttataaagttcaagcccagcatattctttgcctgtttaatgatgtcttggtatcagccttttaatggtacttatcagcatagaaaatggaaacaaaataacttttaaaacagtagctctcaagctttagtgtgctcagaatgaccagagaaccttgtgaaatatacagatttctgggtccagatctggggcaggaccaggaagtctgcatttcatctgcacccccaccctactctgaggcttatagtcctgagaacatgctttgaaaaaggctgtcccaagggctcgcagacaggctattgaccagctactctttcttgatgttctccaggaaaaacccaacaaaggaatgcctttcattgagtagtagcagcataggagcaatagttgctcctgaattatggtgggtttcccctcttcatcaatgtgctttaagggtacagtttcatttggtctatctaccatgttctataaaaacatgaaaattcacaggtaagtttgagatacagaaaataactaaactgattcttctcacgaactctgatcactaggctgtggttgatttagctctctaaccaacaagtaatttgttctttggcatgagtaaggggggaaaaggaggagtgggtaaaagcagctgataacagatggcttgcgcccatctaaaatgtggggagagaaataaagctgtcccaagagaactaaagctgagttctctcgtcatatatctgaagattcatatcaggggtctaaacatggtatgtcgggtagcttaattggaaactcctggactgtgagtgtcacagactcatggatgggccaatcagtggccactttagtgtctgggctgcagcaaaatgagacaatagctgtcattcacaaacctttggaattaaaaaaaccccgaaatgacattggtgctttaaagtaaaataaagtcctgcctttaagtccagcatatcactgttgtttctgagtttaaatattaagaaccacatttcgttaatgattaaaacaacagtgattgatttaggggctcagtgagcatttaatctgtcctgacttcaggtaccatgctaaaggagcacaatgcctgatgctgcaggagaaacattaggtaactatttaatggagttttaattttctgttattatttttaataattaattgtgattttgactatttggaagctacaggtatattttgtcctccttttggggtggtgttattgccctgccctgttttaatcagtggttcttagagaaagtgaactcaggagtgacttaaaatgaaggaagacggactttggctaaaattacaattaaataatcaaatcattttcaaatataaagggagcatgcagatgatctggcccaatcctttcattctgcagatgagaaaactgagactcataggaatgaaaagacttgcccaaagccatacagcttgtttctgttgtttggtgcattaggccaaaagacctaggcctaatagatggaaaagatggcaggatgtcttggccttgctctgacagttgcttctctgatctcagatatttcccaccctttgtaatctgtgttccacacaggaagtagttcttgttttttaaatatcgaaggtgtataaacgtaaagtttttatagatgagccacccagggccaatatctgtttaagtaaagacctaaatgctttgcagagacagtaaagtgtcatgtctgtcccagggaaagaaatccaggacaggaaatgctcagtcttccagcactcctctggctacctggagctcaggctatgagcctcaacccctccctgaagcattagctctggagcagaggctgtgatttacttcagagatctgggcaagtccctttaacctggtagtccttcctttccttgtttgtaaaacagagagatgaggctgatagctccctcacagctccatcagaggcagtgtgtgaaattagttcctgtttgggaaggtttaaaagccaccacattccacctccctgctaatatgattactaaaatgtttttatatgaaagggccaattcctcatctcccctcttcctttaaaaacagaccaaggggcatcttttcttgtctccctgtggcctaaaaggttactgcttctgtggttatctccttggaaagacagagtgtcaggactcttaggtacaccaaaaatgaacaaaaaaatcaacaacaaccataacaccaacaaaaataactgctgtgtcggttcttaagacggcttctgagctagaaacagatttttctaactgtaaaaaacgtggccccagcctgtctgcaggccacctctgtctttaggccttggggggaggagggaagtgagctcatttactggggtctacctcagggtcatcaccaaggtgttctacaaaacgcactttaagaatgttttggaaggaaattcaccttttaacagcccaagaggtatctctctctggcacacagttctgcacacagcctgtttctcaacgtttggaaatcttttaacagtttatggaaggccaccttttaaaccgatccaacagctcctttctccataacctgattttagaggtgtttcattatctctaattactcagggtaaatggtgattactcagtgttttaatcatcagtttgggcagcagttacactaaactcagggaagcccagactcccatgggtatttttggaaggtacggcgactagtcggtgcatgctttctagtacctccgcacgtggtccccaggtgagccccagccgcttcccagagctggaggcagcggcgtcccagctccgacggcagctgcggactcgggcgctgcctgggcttccgggacccgggcctgctaggcgaggtcgggcggctggaggggaggatgtgggcggggctcccatccccagaaagggaggcgagcgagggaggagggaaggagggaggggccgccggggaagaggaggaggaaggaaagaaagaaagcgagggagggaaagaggaggaaggaagatgcgagaaggcagaggaggagggagggagggaaggagcgcggagcccggcccggaagctaggtgagtgtggcatccgagctgagggacgcgagcctgagacgccgctgctgctccggctgagtatctagcttgtctccccgatgggattcccgtccaagctatctcgagcctgcagcgccacagtccccggccctcgcccaggttcactgcaaccgttcagaggtccccaggagctgctgctggcgagcccgctactgcagggacctatggtgagcaaggctacctggtgaggggagacaggcagagggggtctaggagcctccttggggggaagaagctggtcacaggctgtgaccgaggcaaaaggtggcctaattattttccaatagtggtgctggaggtggggatgctggcgctgaaagacctttaaatatcggctactgcccctgcccaggccttctctgtccagcagtccctgggagattctcacctttgggaagtgcggggcaggagagcagaaacaagagaagcccttggtaggggggtcgttgggaaaaactgtggggtcttgggctgaacgcgttgcccacgggctggaggttgcgatccccggacggaaagcgcgggaggaggaaggagagaaccggctctgaggtccagagagagtgagggggcagagcgacggcgagatggggagagaacacctagctggagcaggttctgcggtagagagcgcagtcctgctggcctctggagagtgcgcgccgctacggaggctgcgtcgaggggagtgtcacccaatctggcccccagctggcggggcgccctgagagcttgcgaactgcagttgcaggacgcgccttctccacgagctattttcgtcgacttgcggaacccaaggaacctcgcctctatcatttcacggtgtagggtccctagagacgacagccaagatcccaggggctcccaggacgcttgttcctgcggtgtcgtgtcctatggggagttcctggcgggacgaaaggcggacgcgcggctcttcctggccctccaggcccggaaccgacgggaaaggttcccgtgattcccgagtccctgcaggcttcttccagcgggagttggtccgggggccttagaggcctccaagcactgctttggaggatggtttccaaggatcgcggtttgtgagttgaaggctttgtgagaggttaaacccccaaaagatacatacttggtaaactgaggctacctgtaaacacatttcggcattaggagaagattcgagtagggaagtgaaggacaaccaccccgagttacattcctttcccccaataaaaagctctggggatgaaagttcttttggcttttatcttttcgatttaaaaatttgagaagaaaaatgtgactagagatgaatcctggtgaatccgaaattgaaacacaactcccccttccccttcctatcctctcggttttagaaccgcgctctcccgccccaggagattccttggggccgagggttttccggggaacccgggcgcccgccccttctactgtccctttgccccgcgggcacagcttgcctccgtctgctttctctacttctggacctctcctcgccgggctttttaaagggcttctgcgtctcaaaacaaaacaaaaaaaccctttgctcttcccaaccctttcgcagcccgccccagcggtggcgcgggaccagcaaaggcgaaagccgcgcggctcttgccgggcgcggacggtcgcgcaggggcgcccgcggcctccgcacccggacctgaggtgttggtcgactccgggcatccacggtcgggagggagggctgagctgttcgatcctttacttttcttcctcaaagtctacctgccaatgcccctaagaagaaaaccaagtatgtgcgtggagagtggggcggcaggcaacccgagttcttgagctccggagcgacccaaagcagcaactgggaacagcctcaggaaagggaggtcgggtggagtgggctttggggcaggagtcatggggcccgggccccggggacgacctggcgctcccggccctgctgaacgctgagttgcgcctagtcgggttttcgaagaggcccttgcgcagagcgacccacgcgcgcggcagcatcttcgattagtcaggacatcccagtaactgcttgaactgtaggtaggtaaaattcttgaaggagtatttgctgcgtgcgactctgctgctggtgcaacggaggaagggggtgggggaaggaagtggcgggggaaggagtgtggtggtggtttaaaaaataagggaagccgaggcgagagagacgcagacgcagaggtcgagcgcaggccgaaagctgttcaccgttttctcgactccggggaacatggtgggatttcctttctgcgccgggtcgggagttgtaaaacctcggccacattaagatctgaaaactgtgatgcgtcctttctgcagagacgcctctttctgaatctgcccggagcttcgagccccggcgtctgtccctcagcctggcatggcttcttcgggggtctgctttgcatggggagaggggccacgcagcggcggactaggtttggggattctcggtaatggacccggagcaatgactaacagccgctccctctcactttcccacagcgatcaccctctaacaccctccctcccattcccggccccgcgcgtgacaaggtcggctgctttcagccgggagctagatcggtggcccggctcttcggagccttagcaggcgttcgccaaggggtgactggctgtcattgggagcaatatttggccttgaggagaccctggggaggaagtggcggggagctcgtgtttgcttgtgtgtgtgtgggggggggggtgtgtgtacacgcgcgtgggcagggtccctctgcgctttcctttttaagtgcctctcggtggtgaggctttgggcgggtgagactttcccgacctcgctcccggccccacttaagccgggttcgagctgggagacgcagtcccttcagtgcgccccaaatcctctggcttcaggtggcccggcgcgggggcccagcacgacgcaccgcgccgagaaccgggttctccgtgcgctgcgccagtagccctgggagcgcggcggccgcggggcaccggccgagggctctgccgagcgccgccgggagctcctcccggaccgctgaggctcgggcggcgggcgcggaggttggcctcgcctggaggggcgggcccgcgaggggcggggggctgtggaggaggggagggcgcgcaggccctttcgccgcctgccgcgggaggggcctcggcgctcacgtgactccgaggggctggaagaaaaacagagcctgtctgcggtggagtctcattatattcaaatattccttttaggagccattccgtagtgccatcccgagcaacgcactgctgcagcttccctgagcctttccagcaagtttgttcaagattggctgtcaagaatcatggactgttattatatgccttgttttctgtcagtgagtagacacctcttccttccccctctccggaattcactctgccctcaccacccctgctcgccggctgtcccttccgtcggacctcctttacaatatccacactctgctccctggcagcactgtcgctcccttcttggcccggcagccggggcgctggaagcgtacgggttccttttaaagtgctgctagcgcgcactcgccctctcagcgttgcaagaaaggggagcgcgagggagctaaagagatgaaagcccggggttgtaccttgagggctaaccactcccttcccctatccaacttgtctgggagagcccccagtgtctccgtggcgcgttcccactctcttgtcaaaactcacagaggtctctccggaatcgtctctcaccccttccctggggatgagcgggcacgatcaggcacttttggctgaatatttcaaactcatcggccacaataaaataagccctcaagccacccggttagctcccagaccaccttctcggcttctggaccctgtcgccctctgtcttcgcccagcccctgcctctcactttccctccctctggctctgaaccaactggaagttgtgaaagttgggctctgagggtggaggaaaagggagagaagctgaaggtctaaagtggagagcaatgccattttaattctccctcccccaccccttttcaccccctcaatgttaactgtttatccttcaagaagccacgctgagatcatggcccagatagcagttaggacaaaaaaagattaacaggatggaggctatctgatttggggttatttgactgtaaacaagttagaccaagtaattacagggcaattcttactttcaggccgtgcatggctgcagctggtgggtgggcgggtggtgtgagggagaagacacaaacttgatctttctgacctgctttccatcttgcccctccatttctagccctaaatgcatatgcagacacatctctatttctccctatttattggtgtttgtttattctttaaccttccactcccctccccctccccagagacaccatgattcctggtaaccgaatgctgatggtcgttttattatgccaagtcctgctaggaggcgcgagccatgctagtttgatacctgagacggggaagaaaaaagtcgccgagattcagggccacgcgggaggacgccgctcagggcagagccatgagctcctgcgggacttcgaggcgacacttctgcagatgtttgggctgcgccgccgcccgcagcctagcaagagtgccgtcattccggactacatgcgggatctttaccggcttcagtctggggaggaggaggaagagcagatccacagcactggtcttgagtatcctgagcgcccggccagccgggccaacaccgtgaggagcttccaccacgaaggtcagtctcttcccccagtctgcgtgggggagggctggtgggactggctagaggggcagtgaaagccctggggaagaagagttcgggttacatcaaaccccagtccaggaggctgaggaacagagctgcttacctccaagaatttgcagagctgccgccgaacttattttttggagacagagggggaggtgttcaggggaaggggaatgacagcactcagacgtgggctagccccagcggtgtgtttttgctatatcaaagccttttctgctaggttttctgcccgtttttttcaaagcacctactgaatttaatattacagctgtgtgtttgtcgggtttattcaataggggccttgtaatccgatctgaatgtttcctagcggatgtttcttttccaaagtaaatctgagttattaatccaccagcatcattactgtgttggaatttattttcccctctgtaacatgatcaacaaggcatgctctgtgtttccaagatcgctggggaaatgtttagtaacatactcaatagtggaagagggagagggtggttgtctccatgtttcctcctgcctgtgctctgttggcccctctttttctttacaaccacttgtaaagaaaactgtggacacaaagccaaggtggggggtttaaaagaggagtctgattgtggtgccatagaggagttgacacatagaaattattagacatatcaaggaggctggatatagtttctgtctttggtgcttgagaaatgctagctacattttgctggtttgttagctgccccacttatctgctccttcaaattaaggggtatgcttattttcccccagtaggtttcccctgcataagcagaattcaccattcattgcccaaccctgagctatctcttgactcttccatctttgaaaaaagttcatatgctttttcttttccccttccttcctaactgtgcctagaacatctggagaacatcccagggaccagtgaaaactctgcttttcgtttcctctttaacctcagcagcatccctgagaacgaggcgatctcctctgcagagcttcggctcttccgggagcaggtggaccagggccctgattgggaaaggggcttccaccgtataaacatttatgaggttatgaagcccccagcagaagtggtgcctgggcacctcatcacacgactactggacacgagactggtccaccacaatgtgacacggtgggaaacttttgatgtgagccctgcggtccttcgctggacccgggagaagcagccaaactatgggctagccattgaggtgactcacctccatcagactcggacccaccagggccagcatgtcaggattagccgatcgttacctcaagggagtgggaattgggcccagctccggcccctcctggtcacctttggccatgatggccggggccatgccttgacccgacgccggagggccaagcgtagccctaagcatcactcacagcgggccaggaagaagaataagaactgccggcgccactcgctctatgtggacttcagcgatgtgggctggaatgactggattgtggccccaccaggctaccaggccttctactgccatggggactgcccctttccactggctgaccacctcaactcaaccaaccatgccattgtgcagaccctggtcaattctgtcaattccagtatccccaaagcctgttgtgtgcccactgaactgagtgccatctccatgctgtacctggatgagtatgataaggtggtactgaaaaattatcaggagatggtagtagagggatgtgggtgccgctgagatcaggcagtccttgaggatagacagatatacacaccacacacacacaccacatacaccacacacacacgttcccatccactcacccacacactacacagactgcttccttatagctggacttttatttaaaaaaaaaaaaaaaaaaatggaaaaaatccctaaacattcaccttgaccttatttatgactttacgtgcaaatgttttgaccatattgatcatatattttgacaaaatatatttataactacgtattaaaagaaaaaaataaaatgagtcattattttaaaggtaaatcatgatttttttttctccttaatcctttctcttttccttcgggctcatctcttttgaatgaggcttttttctgttcaggtgagttggaggctggatggaagtcaaaaggtggtacctggaggtggttaagttgtagggacaggaagtaaactgttggcagagagagatggtaattgccagcatgaattgttttctatttctatttaatgttaacaaggatgcagtatcctctcccatctggatgacacatgccttggagaaacactgggatgaaaggagtgtaggtcagattaaagacttcatttcaggccccttgtacatcttctgtttcactcacctgttgaggtgtatcacagctgagcgtgatgaggtctcaaccctagaaaaatgatacccacctctgctttcatgatacctcagggtatctccagttattacaggtaccaatgtgatatttccaaatcaaaactaatttgtacactaacatcataatgtgtgtgtgaaggcatgtttttaaacttattttttttttctccaggtaggactcttttgttttttcttttgtctttttttttttgaaacaagttctctctttgttgccccaggctggtcttgaactcctgggctcaagcaatcttctcatttcggcctctttgggattacaggcatgcactgctattttgtcttttttttttttttgtaacaaataatgtaccctaccttcaaaaagtttgatgactactgttttaatatgccacttgatagaatttcccattgtttcttgactttttcccttgtcctcttttcccaatgtgaaggccttcatcaagtttaggatcccaacagattgggctgggtgggggttgacaatggggtcagatactaaagggtcagaatttctaagcaggcactgtgaaggtgtcccactattatacagaaatctcgag

SEQ ID NO: 1435 - DNA, 756 bp, Homo sapiens
  Genbank Accession No. U43916
atgttggtattgctggctggtatctttgtggtccacatcgctactgttattatgctatttgttagcaccattgccaatgtctggttggtttccaatacggtagatgcatcagtaggtctttggaaaaactgtaccaacattagctgcagtgacagcctgtcatatgccagtgaagatgccctcaagacagtgcaggccttcatgattctctctatcatcttctgtgtcattgccctcctggtcttcgtgttccagctcttcaccatggagaagggaaaccggttcttcctctcaggggccaccacactggtgtgctggctgtgcattcttgtgggggtgtccatctacactagtcattatgcgaatcgtgatggaacgcagtatcaccacggctattcctacatcctgggctggatctgcttctgcttcagcttcatcatcggcgttctctatctggtcctgagaaagaaataaggccggacgagttcatggggatctggggggtggggaggaggaagccgttgaatctgggagggaagtggaggttgctgtacaggaaaaaccgagataggggaggggggagggggaagcaaaggggggaggtcaaatcccaaaccattactgaggggattctctactgccaagcccctgccctggggagaaagtagttggctagtactttgatgctcccttgatggggtccagagagcctccctgcagccaccagacttggcctccagctgttcttagtgacac

SEQ ID NO: 1436 - DNA, 2916 bp, Homo sapiens
  Genbank Accession No. U45878
  unsure (1)..(2907): n = a or c or g or t
agcagagctttcccnccatgnnagaagcttcatgagtcacacattacatctttgggttgattgaatgccactgaaacatttctagtagcctggagnagttgacctacctgtggagatgcctgccattaaatggcatcctgatggcttaatacacatcactcttctgtgnagggttttaattttcaacacagcttactctgtagcatcatgtttacattgtatgtataaagattatacnaaggtgcaattgtgtatttcttccttaaaatgtatcagtataggatttagaatctccatgttgaaactctaaatgcatagaaataaaaataataaaaaatttttcattttgccttttcagcctagtattaaaactgataaaagcaaagccatgcacaaaactacctccctagagaaaggctagtcccttttcttccccattcatttcattatgaacatagtagaaaacagcatattcttatcaaatttgatgaaaagcgccaacacgtttgaactgaaatacgacttgtcatgtgaactgtaccgaatgtctacgtattccacttttcctgctggggttcctgtctcagaaaggagtcttgctcgtgctggtttctattacactggtgtgaatgacaaggtcaaatgcttctgttgtggcctgatgctggataactggaaaagaggagacagtcctactgaaaagcataaaaagttgtatcctagctgcagattcgttcagagtctaaattccgttaacaacttggaagctacctctcagcctacttttccttcttcagtaacacattccacacactcattacttccgggtacagaaaacagtggatatttccgtggctcttattcaaactctccatcaaatcctgtaaactccagagcaaatcaagaattttctgccttgatgagaagttcctacccctgtccaatgaataacgaaaatgccagattacttacttttcagacatggccattgacttttctgtcgccaacagatctggcacgagcaggcttttactacataggacctggagacagagtggcttgctttgcctgtggtggaaaattgagcaattgggaaccgaaggataatgctatgtcagaacacctgagacattttcccaaatgcccatttatagaaaatcagcttcaagacacttcaagatacacagtttctaatctgagcatgcagacacatgcagcccgctttaaaacattctttaactggccctctagtgttctagttaatcctgagcagcttgcaagtgcgggtttttattatgtgggtaacagtgatgatgtcaaatgcttttgctgtgatggtggactcaggtgttgggaatctggagatgatccatgggttcaacatgccaagtggtttccaaggtgtgagtacttgataagaattaaaggacaggagttcatccgtcaagttcaagccagttaccctcatctacttgaacagctgctatccacatcagacagcccaggagatgaaaatgcagagtcatcaattatccatttggaacctggagaagaccattcagaagatgcaatcatgatgaatactcctgtgattaatgctgccgtggaaatgggctttagtagaagcctggtaaaacagacagttcagagaaaaatcctagcaactggagagaattatagactagtcaatgatcttgtgttagacttactcaatgcagaagatgaaataagggaagaggagagagaaagagcaactgaggaaaaagaatcaaatgatttattattaatccggaagaatagaatggcactttttcaacatttgacttgtgtaattccaatcctggatagtctactaactgccggaattattaatgaacaagaacatgatgttattaaacagaagacacagacgtctttacaagcaagagaactgattgatacgattttagtaaaaggaaatattgcagccactgtattcagaaactctctgcaagaagctgaagctgtgttatatgagcatttatttgtgcaacaggacataaaatatattcccacagaagatgtttcagatctaccagtggaagaacaattgcggagactaccagaagaaagaacatgtaaagtgtgtatggacaaagaagtgtccatagtgtttattccttgtggtcatctagtagtatgcaaagattgtgctccttctttaagaaagtgtcctatttgtaggagtacaatcaagggtacagttcgtacatttctttcatgaagaagaaccaaaacatcgtctaaactttagaattaatttattaaatgtattataactttaacttttatcctaatttggtttccttaaaatttttatttatttacaactcaaaaaacattgttttgtgtaacatatttatatatgtatctaaaccatatgaacatatattttttagaaactaagagaatgataggcttttgttcttatgaacgaaaaagaggtagcactacaaacacaatattcaatccaaatttcagcattattgaaattgtaagtgaagtaaaacttaagatatttgagttaacctttaagaattttaaatattttggcattgtactaataccgggaacatgaagccaggtgtggtggtatgtacctgtagtcccaggctgaggcaagagaattacttgagcccaggagtttgaatccatcctgggcagcatactgagaccctgcctttaaaaacnaacagnaccaaanccaaacaccagggacacatttctctgtcttttttgatcagtgtcctatacatcgaaggtgtgcatatatgttgaatcacattttagggacatggtgtttttataaagaattctgtgagnaaaaatttaataaagcaaccnaaattactcttaaaaaaaaaaaaaaaaaaaaaa

SEQ ID NO: 1437 - DNA, 3931 bp, Homo sapiens
  Genbank Accession No. U46689
gcccgggcgctctcagcaggatggccaacaccttccctctccatccatacaccccgccgccccctggcccgtggccgcgctcggttcccgcactgctcattccaccccctacatcccagcccgctgccagagccggggagagggcgggggccgcgtgggcgaggccgtgaacagcggctgtcacgtgggccgcccaggccaataggggtgaggctttgggtcgagctcagtcctcccccggcgcctccgactggcagtgggactcagcgggcgtggaggtcgcggctgagcgagcgagccctgggcgagtgaattgtggctgtgggttgacggtggagacaccccccggagggaggcggagggaagggaggcgaggcctcgacctgcatgcttcccgcctcccactccccagcgcccccggaccgtgcagttctctgcaggaccaggccatggagctcgaagtccggcgggtccgacaggcgttcctgtccggccggtcgcgacctctgcggtttcggctgcagcagctggaggccctgcggaggatggtgcaggagcgcgagaaggatatcctgacggccatcgccgccgacctgtgcaagagtgaattcaatgtgtacagtcaggaagtcattactgtccttggggaaattgattttatgcttgagaatcttcctgaatgggttactgctaaaccagttaagaagaacgtgctcaccatgctggatgaggcctatattcagccacagcctctgggagtggtgctgataatcggagcttggaattaccccttcgttctcaccattcagccactgataggagccatcgctgcaggaaatgctgtgattataaagccttctgaactgagtgaaaatacagccaagatcttggcaaagcttctccctcagtatttagaccaggatctctatattgttattaatggtggtgttgaggaaaccacggagctcctgaagcagcgatttgaccacattttctatacgggaaacactgcggttggcaaaattgtcatggaagctgctgccaagcatctgacccctgtgactcttgaactgggagggaaaagtccatgttatattgataaagattgtgacctggacattgtttgcagacgcataacctggggaaaatacatgaattgtggccaaacctgcattgcacccgactatattctctgtgaagcatccctccaaaatcaaattgtatggaagattaaggaaacagtgaaggaattttatggagaaaatataaaagagtctcctgattatgaaaggatcatcaatcttcgtcattttaagaggatactaagtttgcttgaaggacaaaagatagcttttggtggggagactgatgaggccacacgctacatagccccaacagtacttaccgatgttgatcctaaaaccaaggtgatgcaagaagaaatttttggaccaattcttccaatagtgcctgtgaaaaatgtagatgaggccataaatttcataaatgaacgtgaaaagcctctggctctttatgtattttcgcataaccataagctcatcaaacggatgattgatgagacatccagtggaggtgtcacaggcaatgacgtcattatgcacttcacgctcaactctttcccatttggaggagtgggttccagtgggatgggagcttatcacggaaaacatagttttgatactttttctcatcagcgtccctgtttattaaaaagtttaaagagagaaggtgctaacaaactcagatatcctcccaacagccagtcaaaggtggattggggaaaattttttctcttgaaacggttcaacaaagaaaaactcggtctcctgttgctcactttcctgggtattgtagccgctgtgcttgtcaaggcagaatattactgaagaatgatcctgttcaacctcctagtgcctctactgaattattcctcttttaaatggttaatgaaccaataatttttaaatcataccaaaaatagtaagaaaatatgcaaacactctgtgatcaaacttaaaagtcattgccattcatcattaataaaagttgccatttcaactacgtcccaacattccctaatagggtattcagggaacctgtcttaaattgtgcttatctaaatcttggaactttgagctaggggaggagaatgtattagactaaatacaaactgcggggttgtaagggagtctcagaacctcactgaatccttcactccagttaatggcactgctcacttcctgcctctgctgccaccatcactgtgtgaagctttcaagagcttggtacttcccagggctaccggcagtcctctgtagtccagagaggtgagattagatcttcttggttccctgtgaggtttcaggcactaaaactctatgtggggaagggaggggttactcctcctccaatgggactcaaggacttgacctccaggagtaggcccctggtcagaagtgccatctcaccagtggtcttcattcttcctcattcattctttatcatcctgtgttctgtttagttgcaacaatctcttgtgactaatgtcactcaaagcatcttgtaacctagggcttcctggaagttagttgccaaagtcatgcaagcatcacctgtcattcttgtgttggagttatagaattctacatcttataaaacctaactggcatttaaaaaatactgtggccgggcgtggtggctcatgcctgtaatcccagcactttgggaggccgaggtgggaggattgcttgagtccaggaatttgagaccagcctggacaacacagtgagacctcatctctatcaaaaaataaaaattagctagatgtggtggcatgagcctgtgttcccagctgcttaggaggctgaagcaggaggattgattgagcctgcgaggccaaggctgcagcaggctgtgattgcaccactgcacttcagcttgggcaacagagcaagaccctgtctccgaaacaaataaaaaatactgtaataaaagtacttataaacatactaatcctctttcaggaccctaaagttgcaggttagtaggtcttcaaggacaaatctgtaagtttcttttctgtagtgcaagtaaaatttcactttttgaaactatagagagatccctttctgattagcctacagaacttaaagtgagggaaccatttcctctcacagacaaagaggcctgggatattaggactttggggtttgagagcatcatggggcagacagatggtggatggtctggacaagaagcgagtaagccactgcggttggtcatactgaagggaattgatggcaagaggatcccctgagcaagtcagaagttactctcatcagtcgttcatggtcacaacctgaggtactctgctgagtgggcaaggctgaagtaagaggcctgtggaatgcagcattacctgctggacagagcagggcaggcagttctatgccttggagctcctgactgcagggactctgtccccacactcagaaagactcagctcactcaatgagagaatgtgatttactttatagaacgtataatcaactttgttgaataatttgttctattaaggctgtctaaaatgtgatgtcttcatcatagtatgaagtgttgaaaattaataacgagcctagtttaggaaaaagctgcttaaaactgtggctctaagagagtaatcataaaataccttagataaaattgcactatggaattttcattgagtatgtttaaattattggcttgtctactaatacatctgcttcaaaatgaacatatttcataaaattggcatcaattttaatgacgctcctggtatggaacctcagatataccctattggagacaatcctttgatcataaattctccccaactataaatcattttatgtctttaaaaaaaaaaaaa

SEQ ID NO: 1438 - DNA, 1057 bp, Homo sapiens
  Genbank Accession No. U47292
  unsure (1)..(1057): n = a or c or g or t
ggaggtccgccggcaagagtgaacggtccacttttcccacccgcttagtgaatagtgtgtccctgaactcggagtgtgcgaggtaaaaaaaagaccagcaagatccaagaaaatgggnaaagagctactggcccttgaaggatgccttttcttttccttttgttaggatatcaaagcactccaaagagcgaaatatttcatgttcaggattttccgagtgattttttttattgtagcctaaaggtccacctagaaaatgttcacttgtctggggagaatgcgccccacagaggaaactctggcctggggtgggaagatttggtccctttacacccctccccgggaaaggagctccttcttcagtaggaagctcctgggcaaagtgatgcacgcccaccccagcttcgcagcctaggcactcccatttctggggttcccttaccaaccatcttgcatttaaacttctagactgccattactaagagaggctggttccagaggatgcatctggctcaccgggtgttccgaaaccaaagaagaaacttcgccttatcagcttcatatttcatgaaatcctgggttttcttaaccatcttttcctcattttcaatggtttaacatataatttctttaaataaaacccttaaaatctgctaaatttctttttggtttcattaacacagaggtggtaatggtggtgtgcgtgtgtacacatgtatgggtgtgtgtacccatgtatgggtgtgtgtacccatgtatgggtgtgtgtatatgtgcgaatgtgcatatgtgtgagtgtatatgcagggtttttttgtgtgtgttttgagacagagtcttgctctgtcacccaggctagagtgcaatggtgcaatcttggntcactgcaacctcctcctcccaggttcaagctatcctcctgnctcagcctcccgagtagntgggattacaggtgnccaccatcacactggntaattttggggttttagnagagatggggtttcacatgtgggncaggctggtctcgactcctgacatcaagtggcctcccaagtgg

SEQ ID NO: 1439 - DNA, 2044 bp, Homo sapiens
  Genbank Accession No. U47414
ccggtcggatgccggaccgggggcaccgctgaggcggtgggtccccgacctgcgagacaggtttggaagcccccgctgcgcccagtccgtgcggaccgcgaggccgcgggcgggtggaggcgcgtctccggcacgatgaaggatttgggggcagagcacttggcaggtcatgaaggggtccaacttctcgggttgttgaacgtctacctggaacaagaagagagattccaacctcgagaaaaagggctgagtttgattgaggctaccccggagaatgataacactttgtgtccaggattgagaaatgccaaagttgaagatttaaggagtttagccaacttttttggatcttgcactgaaacttttgtcctggctgtcaatattttggacaggttcttggctcttatgaaggtgaaacctaaacatttgtcttgcattggagtctgttcttttttgctggctgctagaatagttgaagaagactgcaatattccatccactcatgatgtgatccggattagtcagtgtaaatgtactgcttctgacataaaacggatggaaaaaataatttcagaaaaattgcactatgaattggaagctactactgccttaaactttttgcacttataccatactattatactttgtcatacttcagaaaggaaagaaatactgagccttgataaactagaagctcagctgaaagcttgcaactgccgactcatcttttcaaaagcaaaaccatctgtattagccttgtgccttctcaatttggaagtggaaactttgaaatctgttgaattactggaaattctcttgctagttaaaaaacattccaagattaatgacactgagttcttctactggagagagttggtttctaaatgcctagccgagtattcttctcctgaatgttgcaaaccagatcttaagaagttggtttggatcgtttcaaggcgcacagcccagaacctccacaacagctactatagtgttcctgagctgccaacgatacctgaggggggttgttttgatgaaagtgaaagtgaggactcttgtgaagatatgagttgtggagaggagagtctcagcagctctcctcccagtgatcaagagtgcaccttctttttcaacttcaaagtggcacaaacactgtgctttccatcttagaaatctgattgttctgtcagaatttatatttacagggtttcaaagcaataaatgggggaataggtagtttcctggtttagcccccatctagtcaggaattaatatactggaatacctaccttctatttgttattcagatcagatctggcctattttcatatttatcctaagccatcaaatggggtagtgcctcttaaaccattaacagtactttagacattggcactttatttttctcgtagatctttagctactttggggaggagggaaggtgctgataccttcaatttgttacttttcaagatttttaaaaataactagtgtagcttatcttaaacattttataaaaccttcagatgtctttaagcagattggaagtatgcaagtgcttccttagcagggacagtggataatccttaatggtttatcatagatttcaccctccccccttctcagaagagtgagtatgctcttaaatgtcaaacacatttttgttgttttgttttttaaatgatcagtgtctatttgatgtgatgcagatcttataaatttgggaattataatattgacatttctgtgatttttatatatgtaatgtcttaattgagatttgtgttaaggcagaaataattaggctagggctcttagttttcattcctattgccccaagtattgtcaaactatggtattattttaatgttactttaaaaatccataatctgctagttttgcatgtacttatatgaaaacagtgcagtaagttgaaaactcagtatctatggaattgataaatgttgatctggtgtagtatattttatccgcattttcttatattaaaaaatgttctgcatgattacattttatttgcctttgt

SEQ ID NO: 1440 - DNA, 5926 bp, Homo sapiens
  Genbank Accession No. U48959
ccggctgcctctgctgcagttcagagcaacttcaggagcttcccagccgagagcttcaggacgcctttcctgtcccactggcccagttgccacaacaaacaacagagaagacggtgaccatgggggatgtgaagctggttgcctcgtcacacatttccaaaacctccctcagtgtggatccctcaagagttgactccatgcccctgacagaggcccctgctttcattttgccccctcggaacctctgcatcaaagaaggagccaccgccaagttcgaagggcgggtccggggttacccagagccccaggtgacatggcacagaaacgggcaacccatcaccagcgggggccgcttcctgctggattgcggcatccgggggactttcagccttgtgattcatgctgtccatgaggaggacaggggaaagtatacctgtgaagccaccaatggcagtggtgctcgccaggtgacagtggagttgacagtagaaggaagttttgcgaagcagcttggtcagcctgttgtttccaaaaccttaggggatagattttcagcttcagcagtggagacccgtcctagcatctggggggagtgcccaccaaagtttgctaccaagctgggccgagttgtggtcaaagaaggacagatgggacgattctcctgcaagatcactggccggccccaaccgcaggtcacctggctcaagggaaatgttccactgcagccgagtgcccgtgtgtctgtgtctgagaagaacggcatgcaggttctggaaatccatggagtcaaccaagatgacgtgggagtgtacacgtgcctggtggtgaacgggtcggggaaggcctcgatgtcagctgaactttccatccaaggtttggacagtgccaataggtcatttgtgagagaaacaaaagccaccaattcagatgtcaggaaagaggtgaccaatgtaatctcaaaggagtcgaagctggacagtctggaggctgcagccaaaagcaagaactgctccagcccccagagaggtggctccccaccctgggctgcaaacagccagcctcagcccccaagggagtccaagctggagtcatgcaaggactcgcccagaacggccccgcagaccccggtccttcagaagacttccagctccatcaccctgcaggccgcaagagttcagccggaaccaagagcaccaggcctgggggtcctatcaccttctggagaagagaggaagaggccagctcctccccgtccagccaccttccccaccaggcagcctggcctggggagccaagatgttgtgagcaaggctgctaacaggagaatccccatggagggccagagggattcagcattccccaaatttgagagcaagccccaaagccaggaggtcaaggaaaatcaaactgtcaagttcagatgtgaagtttccgggattccaaagcctgaagtggcctggttcctggaaggcacccccgtgaggagacaggaaggcagcattgaggtttatgaagatgctggctcccattacctctgcctgctgaaagcccggaccagggacagtgggacatacagctgcactgcttccaacgcccaaggccaggtgtcctgtagctggaccctccaagtggaaaggcttgccgtgatggaggtggccccctccttctccagtgtcctgaaggactgcgctgttattgagggccaggattttgtgctgcagtgctccgtacgggggaccccagtgccccggatcacttggctgctgaatgggcagcccatccagtacgctcgctccacctgcgaggccggcgtggctgagctccacatccaggatgccctgccggaggaccatggcacctacacctgcctagctgagaatgccttggggcaggtgtcctgcagcgcctgggtcaccgtccatgaaaagaagagtagcaggaagagtgagtaccttctgcctgtggctcccagcaagcccactgcacccatcttcctgcagggcctctctgatctcaaagtcatggatggaagccaggtcactatgactgtccaagtgtcagggaatccaccccctgaagtcatctggctgcacaatgggaatgagatccaagagtcagaggacttccactttgaacagagaggaactcagcacagcctttggatccaggaagtgttcccggaggacacgggcacgtacacctgcgaggcctggaacagcgctggagaggtccgcacccaggccgtgctcacggtacaagagcctcacgatggcacccagccctggttcatcagtaagcctcgctcagtgacagcctccctgggccagagtgtcctcatctcctgcgccatagctggtgacccctttcctaccgtgcactggctcagagatggcaaagccctctgcaaagacactggccacttcgaggtgcttcagaatgaggacgtgttcaccctggttctaaagaaggtgcagccctggcatgccggccagtatgagatcctgctcaagaaccgggttggcgaatgcagttgccaggtgtcactgatgctacagaacagctctgccagagcccttccacgggggagggagcctgccagctgcgaggacctctgtggtggaggagttggtgctgatggtggtggtagtgaccgctatgggtccctgaggcctggctggccagcaagagggcagggttggctagaggaggaagacggcgaggacgtgcgaggggtgctgaagaggcgcgtggagacgaggcagcacactgaggaggcgatccgccagcaggaggtggagcagctggacttccgagacctcctggggaagaaggtgagtacaaagaccctatcggaagacgacctgaaggagatcccggccgagcagatggatttccgtgccaacctgcagcggcaagtgaagccaaagactgtgtctgaggaagagaggaaggtgcacagcccccagcaggtcgattttcgctctgtcctggccaagaaggggacttccaagacccccgtgcctgagaaggtgccaccgccaaaacctgccaccccggattttcgctcagtgctgggtggcaagaagaaattaccagcagagaatggcagcagcagtgccgagaccctgaatgccaaggcagtggagagttccaagcccctgagcaatgcacagccttcagggcccttgaaacccgtgggcaacgccaagcctgctgagaccctgaagccaatgggcaacgccaagcctgccgagaccctgaagcccatgggcaatgccaagcctgatgagaacctgaaatccgctagcaaagaagaactcaagaaagacgttaagaatgatgtgaactgcaagagaggccatgcagggaccacagataatgaaaagagatcagagagccaggggacagccccagccttcaagcagaagctgcaagatgttcatgtggcagagggcaagaagctgctgctccagtgccaggtgtcttctgaccccccagccaccatcatctggacgctgaatggaaagaccctcaagaccaccaagttcatcatcctctcccaggaaggctcactctgctccgtctccatcgagaaggcactgcctgaggacagaggcttatacaagtgtgtagccaagaatgacgctggccaggcggagtgctcctgccaagtcaccgtggatgatgctccagccagtgagaacaccaaggccccagagatgaaatcccggaggcccaagagctctcttcctcccgtgctaggaactgagagtgatgcgactgtgaaaaagaaacctgcccccaagacacctccgaaggcagcaatgccccctcagatcatccagttccctgaggaccagaaggtacgcgcaggagagtcagtggagctgtttggcaaagtgacaggcactcagcccatcacctgtacctggatgaagttccgaaagcagatccaggaaagcgagcacatgaaggtggagaacagcgagaatggcagcaagctcaccatcctggccgcgcgccaggagcactgcggctgctacacactgctggtggagaacaagctgggcagcaggcaggcccaggtcaacctcactgtcgtggataagccagaccccccagctggcacaccttgtgcctctgacattcggagctcctcactgaccctgtcctggtatggctcctcatatgatgggggcagtgctgtacagtcctacagcatcgagatctgggactcagccaacaagacgtggaaggaactagccacatgccgcagcacctctttcaacgtccaggacctgctgcctgaccacgaatataagttccgtgtacgtgcaatcaacgtgtatggaaccagtgagccaagccaggagtctgaactcacaacggtaggagagaaacctgaagagccgaaggatgaagtggaggtgtcagatgatgatgagaaggagcccgaggttgattaccggacagtgacaatcaatactgaacaaaaagtatctgacttctacgacattgaggagagattaggatctgggaaatttggacaggtctttcgacttgtagaaaagaaaactcgaaaagtctgggcagggaagttcttcaaggcatattcagcaaaagagaaagagaatatccggcaggagattagcatcatgaactgcctccaccaccctaagctggtccagtgtgtggatgcctttgaagaaaaggccaacatcgtcatggtcctggagatcgtgtcaggaggggagctgtttgagcgcatcattgacgaggactttgagctgacggagcgtgagtgcatcaagtacatgcggcagatctcggagggagtggagtacatccacaagcagggcatcgtgcacctggacctcaagccggagaacatcatgtgtgtcaacaagacgggcaccaggatcaagctcatcgactttggtctggccaggaggctggagaatgcggggtctctgaaggtcctctttggcaccccagaatttgtggctcctgaagtgatcaactatgagcccatcggctacgccacagacatgtggagcatcggggtcatctgctacatcctagtcagtggcctttcccccttcatgggagacaacgataacgaaaccttggccaacgttacctcagccacctgggacttcgacgacgaggcattcgatgagatctccgacgatgccaaggatttcatcagcaatctgctgaagaaagatatgaaaaaccgcctggactgcacgcagtgccttcagcatccatggctaatgaaagataccaagaacatggaggccaagaaactctccaaggaccggatgaagaagtacatggcaagaaggaaatggcagaaaacgggcaatgctgtgagagccattggaagactgtcctctatggcaatgatctcagggctcagtggcaggaaatcctcaacagggtcaccaaccagcccgctcaatgcagaaaaactagaatctgaagaagatgtgtcccaagctttccttgaggctgttgctgaggaaaagcctcatgtaaaaccctatttctctaagaccattcgcgatttagaagttgtggagggaagtgctgctagatttgactgcaagattgaaggatacccagaccccgaggttgtctggttcaaagatgaccagtcaatcagggagtcccgccacttccagatagactacgatgaggacgggaactgctctttaattattagtgatgtttgcggggatgacgatgccaagtacacctgcaaggctgtcaacagtcttggagaagccacctgcacagcagagctcattgtggaaacgatggaggaaggtgaaggggaaggggaagaggaagaagagtgaaacaaagccagagaaaagcagtttctaagtcatattaaaaggactatttctctcaaaatcca

SEQ ID NO: 1441 - DNA, 1110 bp, Homo sapiens
  Genbank Accession No. U51712
cctgagaagggtctagcggacgcaggtcaccagctgggcaacattcagaaagttagtcttcctatgctcattttcctgggctgttacagaagaagactggaagaggtaatttccaaggttcttcccagctctgaagttgtgtgtcaaagcgcgcagggaccatgtcggcggagaccgcgagcggccccacagaggaccaggtggaaatcctggagtacaacttcaacaaggtcgacaagcacccggattccaccacgctgtgcctcatcgcggccgaggcaggcctttccgaggaggagacccagaaatggtttaagcagcgcctggcaaagtggcggcgctcagaaggcctgccctcagagtgcagatccgtcacagactaaggagatggcaggcattgacagcttcactccatgaaggccatctctgtttctctcctccgcttaaccaagctgttgtggtttttcagcatagtgttgtatgttccattgctagctgtcctgctgtttaacacagtgttgtattttttttctaaatgtacataattagaaaagaaaataacaataggaagctatgtgtatcttctgtgtaaagcagtggcttcactggaaaaatggtgtggctagcatttccctttgagtcatgatgacagatggtgtgaaaaccatctaagtttgcttttgaccatcacctcccagtagcaatttgctttcataatccatttagcaatccaggcctctgttgaaaagataatatgagggagaagggaacacatttccttctgaacttacttccctaagtcactttccttatgtatcatctaatacaatgatggttgagtgaaaatacagaaggggtgtttgagtattcagatttcataaaacacttccttggaatatagctgcattaacttggaaagaagcctgttgggccagaagacagaaactccaactggcaaaaaagcaagcaatctaagaaaaaaaaccaccaaagttcttgaatttactatatttaaatgcattggttaagtttattttgctaaataaagtgaactgctttttgtctctaaaatgatattctaaataaaaccttaactttttgttgaaaaaa

SEQ ID NO: 1442 - DNA, 5767 bp, Homo sapiens
  Genbank Accession No. U51903
gagggaggagagttcacttttacttcagtgtcagcgcgcggcggccgtggctggctctggcgagagagcaccgagggagtgggtcgcagatcttcgggcggctaggggaaatcggcgagaggcgggatccgagcgcgccggcggggcgcagagcccgcgagcctggccagcgagggtagccgcggggggcgcgccccgggcgggcccccggagacgcgcaggatgccacacgaagagctgccgtcgctgcagagaccccgctatggctctattgtggacgatgaaaggctctctgcagaggagatggatgagaggaggcggcagaacattgcttatgaatatctgtgccacttagaggaagccaaaaggtggatggaagtttgcttagttgaagaattgccaccaaccactgaattggaagaagggctccggaatggagtttaccttgcaaagttagccaagttctttgccccgaaaatggtatcagagaaaaagatctatgatgtggaacaaacacgttataagaagtctggccttcattttcgacacacagataataccgtccagtggttaagagcgatggagtctattggtctacccaagatattttatccagaaacaacagatgtctatgatcggaaaaacataccaagaatgatatattgcattcacgcactgagtttgtatctgttcaaactaggaatagcaccccagatccaggatttgttgggcaaagtagacttcacagaggaggaaatcagtaatatgagaaaagaacttgagaaatatggaatacagatgccatctttcagcaaaataggtggtattctggccaatgaactgtccgtggatgaagctgcattacatgctgcagttatagccattaatgaagcagttgaaaaaggaatagcagagcaaaccgttgtaacactaagaaacccaaatgcggttttaactttagtggatgacaaccttgcaccagaatatcagaaagaactctgggatgccaaaaagaaaaaagaggaaaatgcaagactgaagaatagctgtatttcagaagaagaaagagatgcttatgaagaactgctgacacaagcagaaatccaaggcaatattaataaagtcaacaggcaggctgcagtggaccatatcaatgctgtcattccggaaggtgaccccgagaatacgctgcttgcactgaagaaaccagaggcccagctgcctgctgtttatccctttgctgctgccatgtatcagaacgaacttttcaacctccagaaacagaacaccatgaactacttggcccacgaggagcttttgattgctgtggaaatgttgtctgctgttgctttactaaaccaggccttggaaagcaacgatcttgtgtctgtgcagaatcaactcagaagccccgcaataggcttaaacaatctggacaaggcatatgtggaacgttatgcaaacacactactctctgttaaactagaagttttatcccaagggcaagataacttaagctggaatgaaattcagaattgtattgatatggttaatgctcaaattcaagaagaaaatgaccgagttgtagctgtagggtacatcaatgaagctattgatgaagggaatcctttgaggactttagaaactttgctcctacctactgcgaatattagtgatgtggacccagcccatgcccagcactaccaggatgttttataccatgctaaatcacagaaactcggagactctgagagtgtttccaaagtgctttggctggatgagatacagcaagccgtcgatgaggccaacgtggacgaggacagagcaaaacaatgggttactctggtggttgatgttaatcagtgtttggaaggaaaaaaatcaagtgatattttgtctgtattgaagtcttccacttctaatgcaaatgacataatcccggagtgtgctgacaaatactatgatgcccttgtgaaggcaaaagagctcaaatctgaaagagtgtctagtgacggttcatggctcaaactcaacctgcacaaaaaatatgactactattacaacactgattcaaaagagagttcctgggtcacacctgaatcatgcttctataaagaatcatggctcacaggaaaagaaatcgaggacattattgaggaagtcacagtaggttacattcgtgagaatatatggtctgcttcagaagagttgcttcttcgctttcaagccacaagctcaggacccatccttagggaagagtttgaagctagaaaatcatttttgcatgaacaagaagagaatgtggtcaaaatacaggctttttggaaaggatataaacaacggaaggagtatatgcacaggcggcaaacgttcattgataatactgattctgttgtgaagattcagtcctggttccgaatggcaactgcaagaaagagctatctttcaagactacagtatttcagagatcataataatgaaattgtgaaaatacagtcactgttgagagcgaacaaagctagagatgactacaaaacattggttggctctgaaaacccaccattaacagtaattcgcaaatttgtatacctgctggaccaaagtgatttggatttccaggaggaactagaggttgcacgattaagggaagaagtagtgaccaagatcagggccaatcaacagctggaaaaagacctgaacctgatggacatcaagattggactgctggtgaagaacaggatcacactagaggatgtaatttcacacagtaaaaagctgaacaagaaaaaaggaggagaaatggaaatactgaataacaccgacaaccaaggaataaaaagtttgagtaaggagaggagaaaaacactagaaacatatcagcagctgttttaccttttacagaccaaccctttatacttggctaagctgattttccagatgccacagaacaagtccactaaatttatggatactgttattttcacactatataattatgcctctaatcagcgagaagaatatctacttctcaagctttttaaaactgctctggaggaagaaataaaatcaaaagtggaccaggtacaggacatagttactggtaaccctacagtcatcaagatggtcgtcagcttcaatagaggtgcccggggacagaacaccctgcgccaactcctggctccagtggtaaaagagatcatcgacgacaagtcgctgattatcaacacaaaccctgtagaggtgtacaaggcttgggtgaaccaactagaaacacagactggagaggccagcaagttgccttatgatgtgaccacagaacaagctctaacatacccagaagtgaaaaataaactggaggcttccattgagaacctgagaagggtcaccgacaaagtcctgaattctatcatttcttcccttgatctactgccttatggattgaggtatatagccaaagtactgaagaattcgatccatgagaaattccccgatgcaacagaagatgagctattaaagattgttggaaacctcctgtactatcggtacatgaatccagccattgtagctccagatggctttgatatcatcgacatgacagctggaggtcagataaattctgaccaaaggagaaacttaggatcagtggccaaggttcttcagcacgcagcctccaacaagctgtttgaaggagaaaatgagcatctctcatctatgaacaattatttatcagagacgtatcaggaattcaggaaatatttcaaagaagcatgtaatgtccctgagccagaagagaagtttaatatggacaaatacacagacctggtgacagtcagcaaaccagtcatttatatttcaattgaagaaatcatcagcacacactcactcctgttggaacaccaggatgcaattgcccctgagaaaaatgacttactgagtgaattgctggggtcgctgggagaggtgccaaccgtggaatcttttcttggggaaggagcagttgaccccaatgaccctaacaaggcaaatacactaagtcagctttcaaagaccgagatttctcttgtcttgacaagcaaatatgacatagaggacggtgaagctatagatagccgaagcctcatgataaagaccaagaagctgataattgatgtgatccggaaccagccagggaacacattgacagaaatcttagagacaccagcaactgcgcaacaggaggtagaccatgccacggacatggtgagccgtgcaatgatagattccaggactccagaagaaatgaagcatagccaatctatgattgaagatgcacagctgcctcttgagcagaagaagaggaaaatccagaggaatcttcggacgttggaacagactggacacgtgtcatccgaaaataaataccaagacattctcaatgagattgccaaggatattcgaaatcaaagaatctatcgtaagcttcgaaaagctgaattggcaaaacttcagcagaccctgaatgcacttaacaagaaggcagcattttatgaagagcaaatcaattattatgacacctacataaagacttgtttagacaacttaaaaagaaaaaatactcggagatcaattaaactagatggaaaaggagaacccaaaggggcgaagagagcgaagccagtgaagtacactgcagcaaagctgcatgagaaaggtgtcctgctagatatagatgatcttcaaacaaaccagtttaagaatgttacatttgatatcatagctactgaagatgtaggcattttcgatgtaagatcaaaattccttggtgttgagatggaaaaggtgcaactcaatattcaggatttacttcagatgcaatatgaaggagtagctgtaatgaaaatgtttgataaggttaaagtgaatgtaaaccttctcatatacctgctgaacaagaagttctatggaaagtgaagtgcctacagaaatttcttggattctgtatcatctggattaggaaatgaatttgtttaatatttttgtttttaaacatgattgaaatcactgcttataaatgtgtgattttttttaaatgaccaaaactgttctgaagaatgtacccaggtgcctttttgctaatttgatactataatagaatgagacataaaatgaattaatggaaacatatccacactgtactgtgatataggtactctgatttaaaactttggacatcctgtgatctgttttaaagttggggggtgggaaatttagctgactagggacaaacatgtaaacctattttcctatgaaaaaagttttaaatgtcccacttgaataacgtaattcttcatagtttttttaatctatggataaatggaaacctaattatttgtaatgaattatttagacagttctaagccctgtcttctgggagttatcaattttaaagagaacttttgtgcaattcaaatgaagtttttataagtaattgaaaatgacaacacaataacactttctgtataaaagtatatattttatgtgatttattcctactaaatgaaagtgcactactgcctcatgtaaagactcttgcacgcagagcctttaagtgactaaggaacaacatagatagtgagcatagtccccacctccacccctcacaatttatttgaatacttcaattgtgcctctcaattttttgtaatgctaaaaaatcagtatctagatggtttttaaatgtattctctggaaattgttttatgtaaaataaatgttacttaattccatt

SEQ ID NO: 1443 - DNA, 690 bp, Homo sapiens
  Genbank Accession No. U52100
cagcacatcccgctctgggctttaaacgtgacccctcgcctcgactcgccctgccctgtgaaaatgttggtgcttcttgctttcatcatcgccttccacatcacctctgcagccttgctgttcattgccaccgtcgacaatgcctggtgggtaggagatgagttttttgcagatgtctggagaatatgtaccaacaacacgaattgcacagtcatcaatgacagctttcaagagtactccacgctgcaggcggtccaggccaccatgatcctctccaccattctctgctgcatcgccttcttcatcttcgtgctccagctcttccgcctgaagcagggagagaggtttgtcctaacctccatcatccagctaatgtcatgtctgtgtgtcatgattgcggcctccatttatacagacaggcgtgaagacattcacgacaaaaacgcgaaattctatcccgtgaccagagaaggcagctacggctactcctacatcctggcgtgggtggccttcgcctgcaccttcatcagcggcatgatgtacctgatactgaggaagcgcaaatagagttccggagctgggttgcttctgctgcagtacagaatccacattcagataaccattttgtatataatcattattttttgaggtttttctagcaaaccgtattgtttcctttaaaagccaaaa

SEQ ID NO: 1444 - DNA, 4040 bp, Homo sapiens
  Genbank Accession No. U52426
tcgacctggacctgggcaccgccagccgcctgggcacgggactgggcgggggcgctgacctcggcctaggaggcccaggatcccggagacgcccgcgccctcaggaccctgcgggtcgcacgccctccccagcttctgctgctcgccgctcttcggcagggcgaggtcaggtgcccccttctcgcctctcttctcttctcttcctcctccacttctgtgcccgcggagactccggccgccccttccgcaggggtgtagtaatctgcggagctgacagcagccccgcagccaccctgcccgaagtctccggaagcggcacgagctcaggccgccgcagccccggcgacccactgttggacctgaggagccagccctcctcccgcacccaaacttggagcacttgacctttggctgttggagggggcaggctcgcgggtggctggacagctgcggacgcgcgagggcatcttgcctggagaccgtcggctgcactcccgggctcctggctttgctctgggatcccgaggtgtccacatcagacgcatgttgactgagacctagagtcatggatgtatgcgtccgtcttgccctgtggctcctctgggggctcctcctgcaccagggccagagcctcagccatagtcacagtgagaaggcgacaggaaccagctcgggggccaactctgaggagtccactgcagcagagttttgccgaattgacaagcccctgtgtcacagtgaggatgagaaactcagcttcgaggcagtccgtaacatccacaaactgatggacgatgatgccaatggtgatgtggatgtggaagaaagtgatgagttcctgagggaagacctcaattaccatgacccaacagtgaaacacagcaccttccatggtgaggataagctcatcagcgtggaggacctgtggaaggcatggaagtcatcagaagtatacaattggaccgtggatgaggtggtacagtggctgatcacatatgtggagctgcctcagtatgaggagaccttccggaagctgcagctcagtggccatgccatgccaaggctggctgtcaccaacaccaccatgacagggactgtgctgaagatgacagaccggagtcatcggcagaagctgcagctgaaggctctggatacagtgctctttgggcctcctctcttgactcgccataatcacctcaaggacttcatgctggtggtgtctatcgttattggtgtgggcggctgctggtttgcctatatccagaaccgttactccaaggagcacatgaagaagatgatgaaggacttggaggggttacaccgagctgagcagagtctgcatgaccttcaggaaaggctgcacaaggcccaggaggagcaccgcacagtggaggtggagaaggtccatctggaaaagaagctgcgcgatgagatcaaccttgctaagcaggaagcccagcggctgaaggagctgcgggagggtactgagaatgagcggagccgccaaaaatatgctgaggaggagttggagcaggttcgggaggccttgaggaaagcagagaaggagctagaatctcacagctcatggtatgctccagaggcccttcagaagtggctgcagctgacacatgaggtggaggtgcaatattacaacatcaagaagcaaaatgctgagaagcagctgctggtggccaaggagggggctgagaagataaaaaagaagagaaacacactctttggcaccttccacgtggcccacagctcttccctggatgatgtagatcataaaattctaacagctaagcaagcactgagcgaggtgacagcagcattgcgggagcgcctgcaccgctggcaacagatcgagatcctctgtggcttccagattgtcaacaaccctggcatccactcactggtggctgccctcaacatagaccccagctggatgggcagtacacgccccaaccctgctcacttcatcatgactgacgacgtggatgacatggatgaggagattgtgtctcccttgtccatgcagtcccctagcctgcagagcagtgttcggcagcgcctgacggagccacagcatggcctgggatctcagagggatttgacccattccgattcggagtcctccctccacatgagtgaccgccagcgtgtggcccccaaacctcctcagatgagccgtgctgcagacgaggctctcaatgccatgacttccaatggacgccaccggctgatcgagggggtccacccagggtctctggtggagaaactgcctgacagccctgccctggccaagaaggcattactggcgctgaaccatgggctggacaaggcccacagcctgatggagctgagcccctcagccccacctggtggctctccacatttggattcttcccgttctcacagccccagctccccagacccagacacaccatctccagttggggacagccgagccctgcaagccagccgaaacacacgcattccccacctggctggcaagaaggctgtggctgaggaggataatggctctattggcgaggaaacagactccagcccaggccggaagaagtttcctctcaaaatctttaagaagcctcttaagaagtaggcaggatggggtggcagtaaagggacagcttgtccttccctgggtgttctgtctctccttccctcccttccttcaagataactggccccaagagtggggcatgggaagggctggtccaggggtctgggcactgtacatacctgccccctcatccttgggtccttcattattatttattaactgaccaccatggcctgcctgccctgcctccgtcccaaccatgggctgctgctgtcactccctctccacttcagtgcatgtcttagttgctgttccctcagctcccagctccacctctggggttcagcttctgtctctgctgtcccagttttgaggtttggtttcttgtttctgtctcttgctttcaggctcctccctcccaccactccccaacttcccctagcagttgcagggaagataggacgagtagcttctgacatgtgtgcctcagatctgttccacccactcacagtggttctgtttgctccagactggggctagggctaatctttgaagtttgttctttggtattgatgtgggtcagaaggaggcctcatcctaatctcactcaggcctccagggatccatgggggagtgaaaccaattctcagagaacaacccaccagagacttttaaagagaggccaggcttgggaatgggttgggagaggcatctgttcattggagcatgagtggatgccagaactgtaggttataaggcagtcactttttctctctactcccacccacacctgcctccctcttacccctgctccccacactgcaggaggatttgtctctaagaggtgctgccccaaagctccccaagcatcaatactcctagggctcaggacaagtggctcccctggccaggagagccacagccatgatacaggcctcttatggagccctggagttgttgggcaaggatgctgtcattttttgaaccaaaagacaaacaggttaaaaggaaaaaaagtaatctgaatttcccaagtgcctacgctgcatattccccttgttagatcccattttcatgttactttgtagccttggcccagaggctcaaaaaggacacaaccagtttggggaaggggtggctaaggaagatggtataggtgaaggcggctgtgtgaccactttcccccacccttcccaccctctagacaactctctcccttacctgtttttgctatggctgtaaaggtatttttcctctgccccactccctgccatacctttatcctgggatcctattttgggcctggggtgggtatacctggggctggtcttaggagggtgctaggctgcagactgccttgtactccctggacaccctcaaatgggggtttctgtgttatttcataaaattctttgaagtccaataaagcatgtaggagattttaaccacaaaaaaa

SEQ ID NO: 1445 - DNA, 554 bp, Homo sapiens
  Genbank Accession No. U52969
gccagaaccggtggagcagcgacccctgagcagtgttctctgtgctgagcggcgggactgagctgttgagttagagccaacatgagtgagcgacaaggtgctggggcaaccaatggaaaagacaagacatctggtgaaaatgatggacagaagaaagttcaagaagaatttgacattgacatggatgcaccagagacagaacgtgcagcggtggccattcagtctcagttcagaaaattccagaagaagaaggctgggtctcagtcctagtgggagaaccccctcctagtccacctgaaaacaccaaattcaaccatcatctgtcaagaaattaaaagaacaacaccctagagagaagtcatccacacacaatccacacacgcatagcaaacctccaatgcatgtacagaaacctgtgatatttatacccttgtaggaaggtatagacaatggaattgtgagtagcttaatctctatgtttctctccattttcattcctcctgcaactattttccttgatgttgtaataaaatgaagttacgatgagtgaaaaa

SEQ ID NO: 1446 - DNA, 1147 bp, Homo sapiens
  Genbank Accession No. U55984
  unsure (1)..(1147): n = a or c or g or t
ttttttttgcatttcctaccttttgacatatatatatatatttatatattttnnacaccttgaggatatcactattccaattgttcccatatgaatacaggtgtggtctctattggatataaatgtgtcttttattcgattttacgtccaggacttggtttgctgtcccaactgcacataaatgtcccttttttgtttgagttattggttgtgtgcgttttcctttttgcataagaaatatgtccatttagtccagaggctcttgctttatccggatgacggagggtacacggggcgtccgctcagttcccgccgaaggacgtattcgctgaactgggacgagtctactcctcccccacaggagcccacgatttcaaatcctctttgctgcaacctctcgaggacctggactgagttgaggtgacagtagccatttagtggaaacctgatgacgtgcgtcgagtcgtgattccagcctgcattgacagagttacacatcacgtcgccgatctctggaaatacttcttctatcaaggatttgtcaccgcttagcgtgatcctttctccgaggtctggggncacacgcacgacgaggcactcacaggggcttgaaaatcgaccagtttctctgtcctgcttccatctttccatctccaacaacatgggatgaagctgaaaatattttgcctcttcatataacaatgtgtagtccttgaaatcatcaggaatgaggagtttggatgttcgtagnaaattcaaganatanctgaacatctgtccatctctgtcaatgaaatagtcctgtttgagactgcccaacncaatgggctctgtaccancnacnagtcttccgattctggattcagggtatttggtgagggtggccagcctgctggtgtacatgtggccgcccacatcaatgtggacaggcgcantggattttgtgagttgtnctggagtagggatnccttggttgttcagtggagatgcaggggatctagtgatcagaggtcttgacatattgggccgactgtcctgggtgggggaaacaatagcaggtgaaactattgtgggagaattggtgcttctgtcccattggcttctggaagaagaggcagggggtcgtgttcacggaaaccaccaccac

SEQ ID NO: 1447 - DNA, 883 bp, Homo sapiens
  Genbank Accession No. U57646
ctccagcccagcctcgctagctccgcctgcgtacgtgctcccgcctccgactcaaaatgcctgtctggggaggtggaaacaagtgtggggcctgtgggaggaccgtgtaccacgcagaagaggtgcagtgtgatggcaggagcttccaccgctgctgctttctctgcatggtttgcaggaaaaatttagatagcacaacagtggcaattcacgatgaagagatctactgcaaatcctgctacggaaagaagtatgggccaaaaggctacggttatggccagggcgctggcacgcttaacatggaccgtggcgagaggctgggcatcaaaccagagagtgttcagcctcacaggcctacaacaaatccaaacacttctaaatttgctcagaaatatggaggtgctgagaagtgttccagatgtggggattctgtatatgctgccgagaagataattggagctggaaagccctggcacaaaaactgtttccgatgtgcaaagtgtgggaagagtcttgaatcaacaactctgactgaaaaagaaggtgaaatctattgtaaaggatgctatgcaaagaactttgggcccaagggatttggctatggccaaggagcaggggctcttgttcatgcccagtaagatgtaaaccctgaactaaacatcacacactgagaatctcttcataatctaggcacagataatctttaacactaaactactgtgaaattctaccagcattaagtactgtatatcgccctgtacttggataggctggctaactcgtaggaagagagcactgtatggtatccttttgctttattcaccagcattttgggggaacatttcttttacattttaaataaaacttcagcttgaaaaaaaaa

SEQ ID NO: 1448 - DNA, 2529 bp, Homo sapiens
  Genbank Accession No. U59185
cttggctcttacaatgctcacttgttttcacaatgcagcaaaatgaaatgccttagaaaaagagtaacattccagaaaacggtgtaatttatttttcttccttaattgccccatctgtggaggatttctttgctgaacaccacatcaaagggatcttctgcatttaaaatagaagaggcatcatgctgaagagggaggggaaggtccaaccttacactaaaaccctggatggaggatggggatggatgattgtgattcattttttcctggtgaatgtgtttgtgatggggatgaccaagacttttgcaattttctttgtggtctttcaagaagagtttgaaggcacctcagagcaaattggttggattggatccatcatgtcatctcttcgtttttgtgcaggtcccctggttgctattatttgtgacatacttggagagaaaactacctccattcttggggctttcgttgttactggtggatatctgatcagcagctgggccacaagtattccttttctttgtgtgactatgggacttctacccggtttgggttctgctttcttataccaagtggctgctgtggtaactaccaaatacttcaaaaaacgattggctctttctacagctattgcccgttctgggatgggactgacttttcttttggcaccctttacaaaattcctgatagatctgtatgactggacaggagcccttatattatttggagctatcgcattgaatttggtgccttctagtatgctcttaagacccatccatatcaaaagtgagaacaattctggtattaaagataaaggcagcagtttgtctgcacatggtccagaggcacatgcaacagaaacacactgccatgagacagaagagtctaccatcaaggacagtactacgcagaaggctggactacctagcaaaaatttaacagtctcacaaaatcaaagtgaagagttctacaatgggcctaacaggaacagactgttattaaagagtgatgaagaaagtgataaggttatttcgtggagctgcaaacaactgtttgacatttctctctttagaaatcctttcttctacatatttacttggtcttttctcctcagtcagttagcatacttcatccctacctttcacctggtagccagagccaaaacactggggattgacatcatggatgcctcttaccttgtttctgtagcaggtatccttgagacggtcagtcagattatttctggatgggttgctgatcaaaactggattaagaagtatcattaccacaagtcttacctcatcctctgcggcatcactaacctgcttgctcctttagccaccacatttccactacttatgacctacaccatctgctttgccatctttgctggtggttacctggcattgatactgcctgtactggttgatctgtgtaggaattctacagtaaacaggtttttgggacttgccagtttctttgctgggatggctgtcctttctggaccacctatagcaggctggttatatgattatacccagacatacaatggctctttctacttctctggcatatgctatctcctctcttcagtttcctttttttttgtaccattggccgaaagatggaaaaacagtctgacctgaaagaaagaagactgcaatcaagtgagagctaaacaaaagaaaacctaaactaatgtcattggaaacaaaagcttgaaagaaacacatcgcatctacatttgtaacatgagaaggaaaacaatttttttttttttttttttgagacggagtctcgctctttcgcccaggctggagtgcagtggcgcaatctcggctcactgtaatctccgcctcctgggttcaagggattctcctgcctcagcctcccaagtagctgggactacaggcacacgccaccacacccagctaattttttgtatttttagtagaggcggggtttcaccatgttagccaggatggtctccatctcctgacctcgtgatccgcccgccttgtcctccaaagtgctgggattacaggcatgagccactgggcgcggccagataagtttttaaggttccttcttgctttagcattctgagaaatgtctaattggtagtaagacaagagtaatagcaacctgtattgttagtatttaaccaaataggctaaaattttaatcaggtaccttatgtattaaatagaaatcggaatgtaccataataaatccaaactctcaattacgccatggtaattcagtcactaaaatatgtaaagatagaaaattttttaatttaaagaagtgtgaaacatagccattgattgatcagaattctggaatctgaatattaaaaccttacttagtgactggaatggtatatgctccctccaaaagtttatctttgtttattgattaaaggtaatccttactttctttgtattacttaggttctcaattaaaggtaatccttactttctttgtattacttaggttcttaaatttctatgataaacatgtattgct

SEQ ID NO: 1449 - DNA, 1751 bp, Homo sapiens
  Genbank Accession No. U60205
gcgagatgactgcagagatttgaaaaatggcaacaaatgaaagtgtcagcatctttagttcagcatccttggctgtggaatatgtagattcacttttacctgagaatcctctgcaagaaccatttaaaaatgcttggaactatatgttgaataattatacaaagttccagattgcaacatggggatcccttatagttcatgaagccctttatttcttattctgtttacctggatttttatttcaatttataccttatatgaaaaaatacaaaattcaaaaggataagccagagacatgggaaaaccaatggaagtgtttcaaagttcttctctttaatcacttctgtatccagctgcctttgatttgtggaacctattattttacagagtatttcaatattccttatgattgggaaagaatgccaagatggtattttcttttggcaagatgctttggttgtgcagtcattgaagatacttggcactattttctgcatagactcttacaccacaaaagaatatacaagtatattcataaagttcatcatgagtttcaggctccatttggaatggaagctgaatatgcacatcctttggagactctaattcttggaactggatttttcattggaatcgtgcttttgtgtgatcatgtaattcttctttgggcatgggtgaccattcgtttattagaaactattgatgtccatagtggttatgatattcctctcaaccctttaaatctgatccctttctatgctggttctcggcatcatgatttccaccacatgaacttcattggaaactatgcttcaacatttacatggtgggatcgaatttttggaacagactctcagtataatgcctataatgaaaagaggaagaagtttgagaaaaagactgaataaatatctcacgtaaaccttcctgaaagataaacgttttcctgaattcagaaactagtagctaacattgcttctggagagcagaaataagcatgtcttctggctactaagtgataaaaagaacattaacaacctttaattaccttcctagtgggaactttttctactttacctacaagttctatatatgtagaaatgaataaatatatatttaagtacagttttcatgaggaagttttaaaagaccatgttcctaagcttccaagaaggttttggatactagaagtattaatctatggcttttctcccagtaaaaccataggcctgaagttcacattgggtctttaaatcttttagatatatactggtcatttcagaaaattcttcatagtggtattggccttatatttaactttttttttattttttttttgagacaaagccacactctgtctccttgtctggagtgtggtggcacagtctcagctcactgcaacctctgcctcccagttcaagcaattcttctgcctcagcctcccaagtagctgggattacaggcacccgccaccacgcccagctaatttttgtatttttgtagagatggggtttctcgatgttggccaggctggtctcaaacttctgacctcaagtgatctgcccaccttggcctcccaaagtgctgggattacaggtgtaagccactgcgcccggcctttttaactttaaacatgttttagaattcacctaaagatcaaaatatcatggattgaacctcatcaattgatagcagtgagtgactgaagcttccaaatcaagaaaagccggcaccaagaacttccattctaa

SEQ ID NO: 1450 - DNA, 1697 bp, Homo sapiens
  Genbank Accession No. U61412
ggaggtgttagcagtgacagtgtgctgggtggcgcaaggcatcagctgaggctgcggggaagccccaggaaggggcagtggatggctggtgtggcttcttgggggagggtaggcaggtgggccccagctcttctcatccctgtcggcgcaggcatgtccaaccatgaggccttcctgagggtggacgccggctaccgcatgccctgccctctggagtgcccgcccagcgtgcacaagctgatgctgacatgctggtgcagggaccccgagcagagaccctgcttcaaggccctgcgggagaggctctccagcttcaccagctacgagaacccgacctgagctgctgtggagcgggcatggccgggccctgctgaggaggggcctgggcagagggcctggacctgggatcaaggcccacgcgcttccctggggtttactgaggtgatgggtgcaggaaaggttcacaaatgtggagtgtctgcgtccaatacacgcgtgtgctcctctccttactccatcgtgtgtgccttgggtctcagctgctgacacgcagcctgctctggagcctgcagatgagatccgggagactgacacgaagccagcagaggtcagaggggactctgaccacagcccgctctctggctgtctgtctgcagtgcccggctgagggtgggaggcaaacacgccttgttcctgctcttcccagttcagcttggtgggagaaagtcattcgcgtggctcgggacgctcatgtaaatttggttttggtgctcaagggttctttcctcccaggggcaggtgtttctttcctgtttgtcttgtgtcttgagagcttggccttatgaccagtgagaactctctccctggtctctgccagcccaagcatcactgcccgaggcgccagctcagtttcaccgtccacgtccacaaggggcttttcccaccttcacctttgtcgctgggtcagtgctggaaagcgcccctcactcctgcgctgacaagggcccttctctactgtctgtggggtggttccgggctgggggggctgcctcctttgcacctgattttgaaggtgtctctttcatccatggttaagtcataaaaagcttattggttttggttttgactcacctgaaagtttttttggtttaaaagaagaataggcggggcacggtggctcatgcctgtaatcccagcactttgggaggctgaggcaggtggatcacgaggtcaggagatcgacaccatcctggctaacacggtgaaaccccgtctctactaaaaaatacaaaaaattagctgggtgtggtggtgggggtgggcgcctgtgatcccagctacgtgggaggctgaggcagcagactggtgtgaacccgggaggtggagcttgcagtgagccgagatcgcgccactgcactccagcctgggcgacagagcgagactccatctcaaaaaaaaaaaaaaaaaaaagaaagaaagaaaaataattttgggagtttctggaaaggtactaggatttctcaaaaggatttgtcttctcccttgtgaaagacagatgtcagactaatcaggcttatccgatgtgctacatgagatggaaatgcgtgtgaaatagtaagtcacactaagtcttctggaggttctatttacgggtttggtttgatatgaatgttgcagaaactctataaaattctaga

SEQ ID NO: 1451 - DNA, 901 bp, Homo sapiens
  Genbank Accession No. U63717
ctcttcccgcagccaagggtgggcgccggtcctaggaggcgacggttgtaagccagacaaaaagaactggggtgcccggagtgccaggtggcgggcaagcggtgggcttttcggcggggtctttaggatttgcagctccaggaagcgagatgtcgaagccgccacccaaaccagtcaaaccagggcaagttaaagtcttcagagccctgtatacgtttgaacccagaactccagatgaattatactttgaggaaggtgatattatctacattactgacatgagcgataccaattggtggaaaggcacctccaaaggcaggactggactaattccaagcaactatgtggctgagcaggcagaatccattgacaatccattgcatgaagcagcaaaaagaggcaacttgagctggttgagagagtgtttggacaacagagtgggtgttaatggcttagacaaagctggaagcactgccttatactgggcttgccacgggggccacaaagatatagtggaaatgctatttactcaaccaaatattgaactgaaccagcagaacaagttgggagatacagctttcgatgctgctgcctggaagggttatgcagatatcgtccagttgcttctggcaaaaggtgctagaacagacttaagaaacattgagaagaagctggccttcgacatggctaccaatgctgcctgtgcatctctcctgaaaaagaaacagggaacagatgcagttcgaacattaagcaatgccgaggactatctcgatgatgaagactcagattaattcctttctggagctttgagatctaaaacttctgttgcttttgccattccaaaactttgtctttgccagaaaagtgttggtaactataaagaaaatatatatgaaaa

SEQ ID NO: 1452 - DNA, 899 bp, Homo sapiens
  Genbank Accession No. U65093
gagggcaacggaggggaaataaaagggaacggctccgaatcggccccagcggccgctgcgagacctcggcgccgacatcgcgacagaagcgctttgcacgccaggaaggtcccctctatgtgctgctgagccggtcctggacgcgacgagcccgccctcggtcttcggagcagaaatcgcaaaaacggaaggactggaaatggcagaccatatgatggccatgaaccacgggcgcttccccgacggcaccaatgggctgcaccatcaccctgcccaccgcatgggcatggggcagttcccgagcccccatcaccaccagcagcagcagccccagcacgccttcaacgccctaatgggcgagcacatacactacggcgcgggcaacatgaatgccacgagcggcatcaggcatgcgatggggccggggactgtgaacggagggcaccccccgagcgcgctggcccccgcggccaggtttaacaactcccagttcatgggtcccccggtggccagccagggaggctccctgccggccagcatgcagctgcagaagctcaacaaccagtatttcaaccatcacccctacccccacaaccactacatgccggatttgcaccctgctgcaggccaccagatgaacgggacaaaccagcacttccgagattgcaaccccaatgtcatagacactgatttcatcgacgaggaagttcttatgtccttggtgatagaaatgggtttggaccgcatcaaggagctgcccgaactctggctggggcaaaacgagtttgattttatgacggacttcgtgtgcaaacagcagcccagcagagtgagctgttgactcgatcgaaaccccggcgaaagaaatcaaacccccaacttcttcggcgtgaattaaa

SEQ ID NO: 1453 - DNA, 12930 bp, Homo sapiens
  Genbank Accession No. U65416
gggccatggggctgggccgggtcctgctgtttctggccgtcgccttcccttttgcacccccggcagccgccgctggtgagtggggttcctggcggtccccggcggagcgggagcggcggggcgtttccgggggtccgggtgggttgccgcgagcgctgtgcggtcagggcggggctcaggtgtgctgtctggagtgcagggagctggacgccgcctgttcccgccacacctcagccctgctttcccatctcccgtctcttttttttttttttttttttttctttctgagacggagtctctgtcgcctaggctgtagtgcagtggcgcgatattggctcactgcaagctccgcctcccgggttcacgccattctcctgcctcagcctccctagtagctgggactacaggcgcccgccaccacgcccggctaattttttgtgtttttagtagagatggggtttcaccgtgttagtcaggatggtctcgatctcctgacctcgtgatccgcccgcctcggcctcccaaagtgctgggattacaggcgtgagccaccgcgcccgacctcccgtctcctttcagtcctcctcgggatcgcgcatcacccgcattttctggtctcctcctgcacttgctctcctcgcctctcctccgtctcctctcacttttcggacaaaccagtccttctgaggcccctgggttcccgggctgctcctgtgaatggcattggaaggccgttccagcgcggccgctgaggcagccacttcccccggtgctgggggcggatctcaggtccctgaagtcctgtcctctcccggagccgatgtgttctcagctcctgggccgcagctcctggagttggggccctcctttcttgggacccggaggtggtgcttcttgctactgtgaggactgtggggggtcctgactctcaagctgaggggttggagtctgcaggctccgggcagaggattcttcctgcgacttctgtcatccccagctcattctcccctcgcctccggctccgggggtcctctcctctctcgcatcccacccctactaatgaccaatgatctaaggacaccagattccctctcacctcctccctgcccatcttacggcgccctgggtccttttgctctcccagctccctgctaccccttcctgtgtgctgttctctgatccatttctagagtgtcctctgccttcatcccccgcccccgccactgaaggtccctcctgcctcctttatgggcctttcctgcaagcagccttcactccgtgctgcccctatgcctccccattcccaaatgtccctgactctaactttctggtgctgccttttgtccgggggggtcttccctccatcccactcccctccagacccctaaggagagccctgatgctaatggcagttgggccttaggcagggcgcagggcagcgcagatgccccctcccctccagtgcaggtgcctgctctgggccctgcctcattgtggccccttccccactccttcatcctcagcctcaccctcttgaggaccccaccctccagcccacaggtgctggaccatccctccctggtccctccgcccctctccaccttgggaccttgtgctgctcctatctcttgcccagctgcctggggccctcagcaagttctcatctttcagtgggaaagtgggagtgctggagcatatgacagtgctgagaatctttcccaagccccaccctcccccagagcaccctcccctcctgtcctcaccctaccccaagttctcccacagtcactcctgccccatgctcatgccgccctccagttcttgctctgcccatctcccctccccaacccagacctaaaacaggctgttgggccagctgttccttgaccttccttcttttcttttggttccttgaccccagtgggctctcactccccacaccgcatatctaaaatctgttttgcctgctcttggggtgccactgctccccctccagcattactccttttggcaggtccttcctcaggctgagaatctccccctctaccttggttttctctctctggccagcacccccactccttgctttgtttttaatttttaacttttgtttgggtacgtagtagatatgtatgtatatatttatggggtacatgggatattttgacacaggcctacaatatgtcataatcacatcagggtaaatgggttatctatcacaacaagcatttatcctttctttgtgctacaaacaatcccattatgctctttcagttatttttaaatgtacaataaattattgttggctgtactcaccctgctgtgctatctactagatcttattcattctaactatatttttgtacccattaaccatccgcactcccccactccccactacccttctcagcctctggtaatcgtcattctattgtctctccccatgaggtccattgttttaatttttggctgccacaaataagtgagaacatgcgaagtttgtctctctgggcctggggcttatttcacttcacatgatgacctccagttctttgcaaatgacatggtggctgaatagtactccacatacacgtgtgcaccacattttctttctccattcgtctgttgatggacacttaggtcgcttgcagatcttggctattttgaatagtgctgcaataaacatggaaaagtagatagctctttaatataccgatttcctttcttttgggtatatgcctaacagtgggagtgctggagcatatgacagctctattatatttttagtttttggaagaacctccacattatttcccacagtggttatactagtttacgttcccaccaacagtgtacaagggttctcttttgctacatcctcgccaggattccttattgcctgtcttctggataaaagccagtttatctggggtgggatgatatctcgtaggagttttgatttgccttcatctgatgacgaatgatgttgagcaccttttgatatacctgtttgccatttgtatgtcttcttttgagaaatgactattcagatcttttgctcatttttaagttggattattagatatttttcctatagagttgtttgagatccttatatgttttggttactaatcctttgtcagatgaatagtttgaaaatattttctcccattcttggatggtctcttcactttgtttattgtttcctttgctgtgcagaagctttttaacttgatatgatcccatttatgcatttttactttggttgcctgtgcttgtggggtattacttaaaaaatctttgccagtccaatatcttagagagtttccccaatgttttcttttatagttttcatagtttgaggtcatagatttacatctttaatcctttttgattggatttttatatgtggtgagagatagggtccagtttcattcttctgcataaggatatctagtttccccagcaccatttattgaagagactctcctttgccctgtatgtgttcttggtaactttgttagaaataacttcactgtagatatatggatttgtttctgggttctctattctgtttcattggtccgtgtgtctgtttttatgccactaccgtgctgttttgattactctagctctgtagtataatttgaagtcagataatgtgattcctctagttttgttctttttgttcagggtagctttatctattctgggttttttgtgattccatatacattttaggattgtttttctatttctgtgaagaatgtcattggtgttttgatagcaattgcattgaatttgtagattgctttgggtaggatggatattttaacaaaattgattcttccggctgggcacggtggctcactcctgtaatcccagcactttgggaggccgagtcaggtggatcacttgagatcaggagttcaagaccagcctgatcaacatggagaaaccccgcctctactaaaaatacaaaattagccaggcgtggtggcatatgcctgtaatcccagctactcaggaaagctgaggcaggagaatcgcttgaacccaggaggcagaggttgtggtgagctgagattgcaccattgcactccagcctgggcaacaggagcaaaactccatctcagaaaataaaaataaacattgattcttccagtccatgaacatggaatgccttttccattttttgtgtcctcttcaatgttttgcatcagtgctttatagtttttattggagagatctttcacttcttcagttaagtctattcctaggtattttattttatttgtagctaatgaaaatgggattcgtttcttgatttctttttcagattatttgctgttagcacatagaaatgctattgatttttgcatgttgattttgtatcctgcaactttactgaatttgttcttcagttctaatagttttttggtggagtctttaggttttccaaatatcagaccacatgatgtgcaaacaaggataatttgacttcttcttttccaattttgatgccctttatttccttctcctgtcagattgctctagctaggacttgcagtattgtgttgcataactgtagtgaaagtagtcatccttgtcttgttccagatcttaaagaaaaggctttcagttttcccccattcagtatgttactagctgtgagttgtcatatatggcttttattatattgaggtctgttccttgtatactcagtttttttagagtttttatcatgaagggatgttaaacttatcaaatgctttttcagtatcaattgaaatggtgatatggcttttgtcctttattctgttgatacgatgtattacattgattgatttgtgtatgcatacctggaatacattccacttggtcatgaagaatgatctttttaatatactgttgaatgtggtttgctagtatttcattgatgatatttgcctcaatgttcatcagggatataggcctgtagttttctttttttgatgtgtctttgcctgattttgatatcaggatattcctggctttgtaaaatgagtttggaagtattccctcctcctctgtttttcagaacaatttgaataggactgatatttcttgttctttaaacgtttaattgtggtaaattatacattacataaattttactgttttaaccgcttttaagtgtatactcggtggcattagatacattcacatttttgtgcaacccaaaactctgtacccattaatcggtaactccccattcctccctacctctggcccctggtaaccatcattctactttttgtttctatgaatttgaccactctaggtacctcatttaagtagaatcgtgtaatgtttgtctttttgattctggcttatttcacttataatatttcgaggttcatccaggttgtagtatgggtcagattttcattccttttaatgatgaataatactcattatatgtatgtaccacaccttggttatccattcctcagacaatggacacttgggttacttctaccttttggatattggcaaatatttcatttctcttgggtatatatttatttcttttgagtatttcttttgggtatatatccagaaatagaattgttggatcatacggtatttcattttttaatttttagaggaatcaccatagtgttttccattgcaggcgtgccattttgtatttctagaagcagtatacaggggcttcagtttctctacctccttgccaaacttgctgtttgtgtgtgtgtgtgtgtgtgtgtgtgtgtgtgtgtgtgtgtgtgtgataatagccaccctgattggtttgaagtggtatctcattgtggtttggatttgcattttcctaatgagtactgatattgagcatcttttcatgtgtttattgatcatttgtatattttctttgaagaattggccattgaagtcttgcccatttttctcccccacatagcttctcatggctattttgcccatttttgagtgggttgactgttttgttgtttttgtcaaacttttttgcatattctggaaactaatctctctctttttcttttttttttttttttttttttttgagatggagtcttgctctgttgcccaggctggagtgcagtggcacgatctcagctcactgcaagctccacccgctagcttcatgccattctcccacctcagcctccctagtagctgggactacaggcgcccgccaccacacccggctaattttttgtatttttagtagagatagggtttcaccatgttagccaggatggtctcaatctcctgacctggtgatacacccgcctcggcctcccaaagtgctggaattacaggcttgagccaccacgcctggccttctggaagctaatctcttatcagatatatgacttgcaatatttatttcatttcaggggttgattgctttctcactctgattgtgccctttgatgcacagatattttgaatttttcatgagtccagtttgtcagttctttctattctatctgtgctttggcgtcatatccatgaaagcactgtcaaaccctatgtcatgaacattatacccaatgtttttttctaagatatttttatgttttagttcttgagtttagagtttaggtctttgattcattttgagttaatttttgtatatagtacaaattaagggtccaattttatattatttgaacatccagttcccccagcactatttgctgaaaagatggacttactctttgataccctgtcacctgcccaccccagtggacactagctggtccatccaattgctgtcctggggccttgtcatgccactcttccactttgaacccaagcccacatcattgctcccctctgggatactgaccccactataaacttctctagggctacaaccttcctaccccttgtgcctcatgaccaccccctcccttgtccccaccatgcccatgatgagtcttttctcaaggcagctcgccttgcctccatctcaccctcacctgtgcaccacagccacactggacatgggtccctctgagcctgagtcccttcccattcccactgtcccctctggcaagaccttccttccaacactgccttcatgctcctcccttgcccctgcagggcagcctctccccttggcccctattcccttagggggcttgtggccacccagtcctggcacctgacctacaagtttgccatcttcattcccccttcttctgttcatcagccccctcctctatcctcccaccctcacagttttccttgtatatgaaatcttcgttcttgtccttttgcccatgtgcatttcctgcctcctcagggaggtcgggacagcagacctgtgtgttaaacatcaatgtgaagttatttccaggaagaagtttcacctgtgatttcctcttccccagagccccacagtcttcgttacaacctcatggtgctgtcccaggatggatctgtgcagtcagggtttctcgctgagggacatctggatggtcagcccttcctgcgctatgacaggcagaaacgcagggcaaagccccagggacagtgggcagaagatgtcctgggagctgagacctgggacacagagaccgaggacttgacagagaatgggcaagacctcaggaggaccctgactcatatcaaggaccagaaaggaggtgagagtcggcaggggcaagagtaatgggaggccttctccaggaaagttggagacagagagcagggacctgtctcttcccgctggatctggctgggggtggggatgaggaatagggtcagggaggctcagcagggtggtgagccggaactcagcccacacagggaggcatggaggagggccagggaggggtcgccgctgggctgagttcctcacttgggtggaaaggtgatgggttcgggaatggagaagtcactgctgggtgggggcaggcttgcattccctccaggagattagggtctgtgagatccatgaagacagcagcaccaggggctcccggcatttctactacaatggggagctcttcctctcccaaaacctggagactcaagaatcgacagtgccccagtcctccagagctcagaccttggctatgaacgtcacaaatttctggaaggaagatgccatgaagaccaagacacactatcgcgctatgcaggcagactgcctgcagaaactacagcgatatctgaaatccggggtggccatcaggagaacaggtaccgaccctggccaggggctctactgttcccgcaattctgctagagttgcctcgcctcccagctctgtccagggaaaccctccctgtgctatggatgcaggcgtttcctgttggcatattgtgtcctgatttgcctctcctgttagagccattggataaagacagtgggtctgggactgaactgtccagtgttgtaatctgggaaagcagtgggccctctgacagaagcctgagcctggggtgggagttaggcaggagaggaagccctcagggccagggctgccccctctgcctcccggcctgcccatcccggagagttccctcctggccccatgacccaggagtccacccttgacatccccctcctcagcatcaatgtggggatcccagagcctgaggccacagtcccaaggcccatcctcctgctagcctggaggaattaggccccagggtgaggacagacttacagaaggtctgggatctgtgagggattcagccagagtgagaacagtggagaggagcagccctgttccctgcatctcccttagaggggagcagggcttcactggctctgccctttcttctccagtgccccccatggtgaatgtcacctgcagcgaggtctcagagggcaacatcaccgtgacatgcagggcttccagcttctatccccggaatatcacactgacctggcgtcaggatggggtatctttgagccacaacacccagcagtggggggatgtcctgcctgatgggaatggaacctaccagacctgggtggccaccaggattcgccaaggagaggagcagaggttcacctgctacatggaacacagcgggaatcacggcactcaccctgtgccctctggtgagcctggggtgaccctggagagggtcaggccagggtaggaacagcagggacggctgtggctctctgcccagtgtataacaagtccctttttttcagggaaggcgctggtgcttcagagtcaacggacagactttccatatgtttctgctgctatgccatgttttgttattattattattctctgtgtcccttgttgcaagaagaaaacatcagcggcagagggtccaggtgagaaaaggggacagtttctggagatgggaaagctcctttctaggcagtagggtctcctcattgctcctgcccagacaagacgtaggtgacaaggctgctggaacaggggatggaagctggggtatttgggaggggaatgggagctgcatctccatctacacccataagtgcttctcaagccagggctggggcaaggccttcgaatatccagctgtggcctcctcctgctgcaagtgaggagtgggcagcagggagggctgtggcacctgctctgtccccatcccagcctctctgtctctcgggctcactagggtgcgtccaggtggggtgagttgggaatcacgtgctgattgctgagggcctggatgatcatggtgtcagagggaggaaatagtaaaggtggctgtgatctggggagggccagaaactggagaggaatccaaggagaggcggtgcccacccgtgtgcctcctccaggaggcactttccaggttcccaccacctggcctccctgagtttccttgcagatgacacagatgaatagataagcagatgtccctgggccatttgaggagcggggcccagcccctcatcagggcagttgtggtccctgttttcatcctacctccagcgtgttttcttctgcagtccctgagggacacagtccccaggcgccatctctttgaggctttgttctgtgctctgtggccttaccttgccctccctgagccaatttccctttctcaaggtggtcactgcctggtaagtttggagtaagggacggtcagaagcatttcccccacagtcaggttgtttgatgggggatgaaaagagacagcagaagttttgtgtttctgcaaaaacagaggcagtgcaggggacagtgagaggctggggtgtccaggagacctgagtctggcggtaggggcgctggtttctcatccttgaacctaattgcactgtcagtcggcccctcatgcctgagcagatgggaaggttcgtcccctgccctgcagcaagagggccctgtccaggaggcacccacagcaggggcagtgcaggtctgtggtcactcctgctctcacctgcggcgtctcccgtggagggattgtcacttctggttccctgtgggcaggaatggtttcctcgtaggtcactggggttttggccaggaaaagggtatgaaattcatgtgccagtttatcaaaattcctgctttcaatgttgatgtccaataaagatgttcgtaatttcagctctataatcttaataggatttcctctaatactgctgttgtaaagcatattaaataaaacaggaactcaaatttggagccccctctccagaagggtctgtgtggagatggtggctgtggcagcggcagttcccaggtgcagagggtgggcagaggcagcctcaggctaaggggtctcccctactccacgtggagaaaagtccttgtaggttgcaagggcagtggcctgggtggaatccctgctagggacagagcaggaaggcctcgcagcctcaccaagcagcagccctggggtgaagtaagtggaccaggagtaagtggaccaggcaggagcagtagtgactcaacagcaggtcacaggcctaggtgggtgctgaaggtcatgggaggccaggcctcctcgagcaaggtggggggtcccagggtcatgtcaggtgcagatcctgtggcagccatgtctttccatgctgggcctgctgggccccccaggcttcctgatggggtccccagttaggagctgcctgctcagggctgggaggggaggagtgctgagctgcagatagagggcagggcccacagtgggcagggcctgccctggtgtgcaggtgcctctgcaggagaggagggcctggggactgagagcaagggtcagggcctctctttggggaggcctctcactgtaacaggactggtcaggcctgagaggagggcactgggttccctcttgggtcttgtccttttgtcttggggccctttcactccctgcacggtgagtggtgggcacaggacaggggctgatgttgatggagtgatgggagagaactgacaggggctgggaaaagcaaggagggaggaagaaaaaagtgggggcctcatcttctctcagagaaagggtgaatctgattttggggcaactgaagagagaaaagtccttagggaataaacacaacactgcacccagtggagcatttacccgtttccctcttctccagagcttgtgagcctgcaggtcctggatcaacacccagttgggacaggagaccacagggatgcagcacagctgggatttcagcctctgatgtcagctactgggtccactggttccactgagggcgcctagactctacagccaggcggccaggattcaactccctgcctggatctcaccagcactttccctctgtttcctgacctatgaaacagaaaataacatcacttatttattgttgttggatgctgcaaagtgttagtaggtatgaggtgtttgctgctctgccacgtagagagccagcaaagggatcatgaccaactcaacattccattggaggctatatgatcaaacagcaaattgtttatcatgaatgcaggatgtgggcaaactcacgactgctcctgccaacagaaggtttgctgagggcattcactccatggtgctcattggagttatctactgggtcatctagagcctattgtttgaggaatgcagtcttacaagcctactctggacccagcagctgactccttcttccacccctcttcttgctatctcctataccaataaatacgaagggctgtggaagatcagagcccttgttcacgagaagcaagaagccccctgaccccttgttccaaatatactcttttgtctttctctttattcccacgttcgccctttgttcagtccaatacagggttgtggggcccttaacagtgccatattaattggtatcattatttctgttgtttttgtttttgtttttgtttttgtttttgagacagagtctcactctgtcacccaggctgcagttcactggtgtgatctcagctcactgcaacctctgcctcccaggttcaagcacttctcgtacctcagactcccgaatagctgggattacagacaggcaccaccacacccagctaatttttgtattttttgtagagacggggtttcgccaagttgaccagcccagtttcaaactcctgacctcaggtgatctgcctgccttggcatcccaaagtgctgggattacaagaatgagccaccgtgcctggcctattttattatattgtaatatattttattatattagccaccatgcctgtcctattttcttatgttttaatatattttaatatattacatgtgcagtaattagattatcatgggtgaactttatgagtgagtatcttggtgatgactcctcctgaccagcccaggaccagctttcttgtcaccttgaggtcccctcgccccgtcacaccgttatgcattactctgtgtctactattatgtgtgcataatttataccgtaaatgtttactctttaaat

SEQ ID NO: 1454 - DNA, 1837 bp, Homo sapiens
  Genbank Accession No. U68186
acaaccgtaacagccaccagacaagcttcagtggccgggccttcacatccagacttgcctgagaggacccacctctgagtgtccagtggtcagttgccccaggatggggaccacagccagagcagccttggtcttgacctatttggctgttgcttctgctgcctctgagggaggcttcacggctacaggacagaggcagctgaggccagagcactttcaagaagttggctacgcagctcccccctccccacccctatcccgaagcctccccatggatcaccctgactcctctcagcatggccctccctttgagggacagagtcaagtgcagccccctccctctcaggaggccacccctctccaacaggaaaagctgctacctgcccaactccctgctgaaaaggaagtgggtccccctctccctcaggaagctgtccccctccaaaaagagctgccctctctccagcaccccaatgaacagaaggaaggaacgccagctccatttggggaccagagccatccagaacctgagtcctggaatgcagcccagcactgccaacaggaccggtcccaagggggctggggccaccggctcgatggcttcccccctgggcggccttctccagacaatctgaaccaaatctgccttcctaaccgtcagcatgtggtatatggtccctggaacctaccacagtccagctactcccacctcactcgccagggtgagaccctcaatttcctggagattggatattcccgctgctgccactgccgcagccacacaaaccgcctagagtgtgccaaacttgtgtgggaggaagcaatgagccgattctgtgaggccgagttctcggtcaagacccgaccccactggtgctgcacgcggcagggggaggctcggttctcctgcttccaggaggaagctccccagccacactaccagctccgggcctgccccagccatcagcctgatatttcctcgggtcttgagctgcctttccctcctggggtgcccacattggacaatatcaagaacatctgccacctgaggcgcttccgctctgtgccacgcaacctgccagctactgaccccctacaaagggagctgctggcactgatccagctggagagggagttccagcgctgctgccgccaggggaacaatcacacctgtacatggaaggcctgggaggatacccttgacaaatactgtgaccgggagtatgctgtgaagacccaccaccacttgtgttgccgccaccctcccagccctactcgggatgagtgctttgcccgtcgggctccttaccccaactatgaccgggacatcttgaccattgacatcagtcgagtcacccccaacctcatgggccacctctgtggaaaccaaagagttctcaccaagcataaacatattcctgggctgatccacaacatgactgcccgctgctgtgacctgccatttccagaacaggcctgctgtgcagaggaggagaaattaaccttcatcaatgatctgtgtggtccccgacgtaacatctggcgagaccctgccctctgctgttacctgagtcctggggatgaacaggtcaactgcttcaacatcaattatctgaggaacgtggctctagtgtctggagacactgagaacgccaagggccagggggagcagggctcaactggaggaacaaatatcagctccacctctgagcccaaggaagaatgagtcaccccagagccctagagggtcagatggggggaaccccaccctgccccacccatctgaacactcattacactaaacacctcttggatttggaaaaaaaaaaaaaaaaaa

SEQ ID NO: 1455 - DNA, 3523 bp, Homo sapiens
  Genbank Accession No. U69609
gacttagcggcgagtggctccgtctccgcggacagagcgcgcgccccctggcccggcccgcgaggggctcccggcgcggtccccgagcatttcccgccgggtggagcgggccgagccaggcaggatgaccagccccgcggccgctcaaagccgggagatcgactgtttgagcctggaagcgcagaagctggcggaagcctggctcgctgcaaaacgggcggcccgcgcggaggctcgcgagatccgcatgaaggagctggagcggcagcagaaggaggtagaagagagaccagaaaaagattttactgagaaggggtctcgtaacatgccgggcctgtctgcagccacgctggcctctctgggtgggacttcctctcggagaggcagcggagacacctccatctccatcgacaccgaggcatccatcagggaaatcaaggactctctagcagaagttgaagagaaatataagaaggctatggtttccaatgctcagctagacaatgaaaagacaaacttcatgtaccaggttgataccctaaaagatatgttgctggagcttgaagaacagctggctgaatctaggcggcagtacgaagagaaaaacaaagaatttgaaagggaaaaacacgcccacagtatactgcaatttcagtttgctgaagtcaaggaggccctgaagcaaagagaggaaatgctcgagaaacatggaataatcctaaattcagaaatagctaccaatggagagacttccgacaccctcaataatgttggataccaaggtcctaccaagatgacaaaagaagagttaaatgccctcaagtcgacaggggatgggaccctaggaagagccagtgaagtggaggtgaaaaatgaaatcgtggcgaatgtggggaaaagagaaatcttgcacaatactgagaaagagcaacacgcagaggacacagtgaaggactgtgtggacatagaggtattccctgctggtgagaataccgaggaccagaaatcctctgaagacactgccccattcctaggaaccttagcaggtgctacctatgaggaacaggttcaaagccaaattcttgagagcagttctctccctgaaaacacagtacaggttgagtcaaatgaggtcatgggtgcacctgatgacaggaccagaactccccttgagccatccaactgttggagtgacttagatggtgggaaccacacagagaatgtgggagaggcagcagtgactcaggttgaagagcaggcaggcacagtggcctcgtgtcctttagggcatagtgatgacacagtttatcatgatgacaaatgtatggtagaggtcccccaagagttagagacaagcacagggcatagtttagagaaagaattcaccaaccaggaagcagctgagcccaaggaggttccagcgcacagtacagaagtaggtagggatcacaacgaagaagagggtgaagaaacaggattaagggacgagaaaccaatcaagacagaagttcctggttctccagcaggaactgagggcaactgtcaggaagcgacaggtccaagtacagtagacactcaaaatgaacccttagatatgaaagagcccgatgaagaaaagagtgaccaacagggagaggcattggactcatcgcagaagaagacaaagaacaagaaaaagaaaaacaagaagaaaaaatccccagtacccgtagaaacccttaaagatgttaaaaaagagttaacgtatcagaacacagatttaagtgaaattaaggaagaagagcaggtaaagtctactgacagaaagtcagcagtggaagcccaaaacgaggtgactgaaaatccaaaacagaaaattgcagcagaaagcagtgaaaatgttgattgtccggagaatcctaaaattaagttggatggaaaacttgaccaagaaggtgatgatgtacaaccagcagctgaggaggtactagctgatggagacacattagattttgaggatgacaccgctcaatcatcaggcccgagggctggtggtgaagaattagatgaaggtgttgcaaaagataatgctaaaatagatggtgccactcaaagcagtcctgcagaaccaaagagcgaagacgcagatcgctgcaccctgcccgaacatgaaagtccctcacaggacattagtgatgcctgtgaagcagaaagtacagagaggtgtgagatgtcagaacatccaagtcagaccgtcaggaaagctttagacagcaatagcctagagaacgatgacttgtcggcaccaggaagagagccagggcacttcaatccagaaagcagagaagataccagaggagggaatgagaagggcaaaagcaaagaagactgtaccatgtcctaagctgaggcaggcggcaggcgcggtgcacaggaagtctcagtgtgaaggggtcttttctctccactgccaatgtaagtagaatgttctaaattcatagagaggcactgtatgacaattaccaggtgctctactgctttaagttatagactgttacttgtagatttccatgtaatcattgaggttatcacccagattagaaagacatatttgttatcagtgtacgttctaattgagagcattccagtagtatcaaacaataatgtctactgtttatagtccacttaataaaaatagaggcatttactatttgccttaggctgataggaatgtgggttttcttgaccaaatatatcagcatctaattgaaatgaccaaatagcattcttagacttctgtattatgaatataattgatatttaaattaatgtcttgttcacatatgtgtactttcatatttgattttaaaatgtacattataacctgtatggtattttatttaaaggagataaacagccaaatagcaaataggtcactgaatgataagatttgcaccttagaacaataatcattttaaggataacaagtaaatgtctgaaagcatgaggggctttatttgcctttacctcatatgagtctttgatcttgaaccgatacttttggatctcattgttgatatacctgaatttactttgtaagagattttaacttcacttcatgctgatgatgtatcaaattcattttatagaaagatttaaagtttttttctggaagtgatatatgtcaaattacatttcctactgcagtatttgagcagggacagtcattttttaaatgtttttggccgggcgtggtggctcatgcctgtaatctcagtacattgggaggccaaggcaggtggatcacctgaggtcaagagttcgaggccagcctggccaacatggtgaaaccctgtctctactaaaaatacaaaaaattggccgggcgtgatggtgggcgcctgtaatcccagccactccagaggctgaggcaggagaatcgcttgaacctgcgaggcagagattgcagtgagccaagatcaagccattgtactccagcctggacaacaagagcgaaactctgtctaaaaaaaaaaaaaaaaaa

SEQ ID NO: 1456 - DNA, 2066 bp, Homo sapiens
  Genbank Accession No. U70370
tcgcgctggagggcagccgcttagcgtgcgctcttgtccccgcaggtcgcagccaggcggcgggcgcgcccagccccggcccctggagcgcccgccgcggtccccacctccatggacgccttcaaggggggcatgagcctggagcggctgccggaggggttccggccgccgccgccgccaccccatgacatggggcccgccttccacctggcccggcccgccgacccccgcgagccgctcgagaactccgccagcgagtcgtctgacacggagctgccagagaaggagcgcggcggggaacccaaggggcccgaggacagtggtgcgggaggcacgggctgcggcggcgcagacgacccagccaagaagaagaagcagcggcggcaacgtacgcacttcacaagccagcagttgcaagagctagaggccacgttccagaggaaccgctaccccgacatgagcatgagggaggagatcgccgtgtggaccaacctcaccgagccgcgcgtgcgggtctggttcaagaacaggcgagccaagtggcgtaagcgcgagcgtaaccagcagctggacctgtgcaagggtggctacgtgccgcagttcagcggcctagtgcagccctacgaggacgtgtacgccgccggctactcctacaacaactgggccgccaagagcctggcgccagcgccgctctccaccaagagcttcaccttcttcaactccatgagcccgctgtcgtcgcagtccatgttctcagcacccagctccatctcctccatgaccatgccgtccagcatgggcccaggcgccgtgcctggcatgcccaactcgggcctcaacaacatcaacaacctcaccggctcctcgctcaactcggccatgtcgccgggcgcttgcccgtacggcactcccgcctcgccctacagcgtctaccgggacacgtgcaactcgagcctagccagcctgcggctcaagtccaaacagcactcgtcgtttggctacggcggcctgcagggcccggcctcgggcctcaacgcgtgccagtacaacagctgaccgccccgccgcaccacgcgggccggcggccggagcggggaagggcgcgggcgcggaggacgcacgcggggccccggctcgcaagccccagctcaccgcgccgcggacctcacacctgcgcagccccctcctcccacttcccactccgggttggttttgtgtttgcttttccggaccccactctgccctccaaaaagacaaaaaaaaaaaaaaaaaaaaaagcaaaaagacgtcggagaaaagtgccgcgaaaaaatggatgagttgcaatttctctcgggatggcgcgggtggtgtgtgtgtgttcccacgggccccggaggcccactccgcggagggcacgcggcgcggtaggcaagcgccgaggcccagcggccgggggaggacaacctcgtatcccgcgcccccgccgcgctggatccggactgagcggccgggcctgcggactggatgtgcggggcctggacttgcctaggatttcccgaccccgtacaaaccaagttgccctctccgagctaggcccggccgagagcgccttaactcgagtcggatccgtgttggggcgggcgttgggtttggggggacggtgcccccagcccaggatcgggcactcagtggagccgcacacggcccggcgcgcctggtagagcctcgctggccccgcgccccggagccctatattaaggccacggagcgacagcgggcagtgcgggcctggcgggaggtgggggaggtccatctcagaacaccccagccttgagcttagctgcaggcccaggccctctgctctgctcccgggctaggaggtggccctctgtctgggcgaacagccccctcctcaccgcccgccgtgcaagagtcgagccggcagagcaaggggcgcggccccagggccctgcgcccactttgcacacccgctctccggcccgcgcccctgtttacagcgtccctgtgtatgttggactgactgtaataaatctgtctatatcgactaaaaaaaaaaaaaaaaa

SEQ ID NO: 1457 - DNA, 1953 bp, Homo sapiens
  Genbank Accession No. U70663
cgctcccacccgcccgtggcccgcgcccatggccgcgcgcgctccacacaactcaccggagtccgcgccctgcgccgccgaccagttcgcagctccgcgccacggcagccagtctcacctggcggcaccgcccgcccaccgccccggccacagcccctgcgcccacggcagcaatcgaggcgaccgcgacagtggtgggggacgctgctgagtggaagagagcgcagcccggccaccggacctacttactcgccttgctgattgtctatttttgcgtttacaacttttctaagaacttttgtatacaaaggaactttttaaaaaagacgcttccaagttatatttaatccaaagaagaaggatctcggccaatttggggttttgggttttggcttcgttttttctcttcgttgactttggggttcaggtgccccagctgcttcgggctgccgaggaccttctgggcccccacattaatgaggcagccacctggcgagtctgacatggctgtcagcgacgcgctgctcccatctttctccacgttcgcgtctggcccggcgggaagggagaagacactgcgtcaagcaggtgccccgaataaccgctggcgggaggagctctcccacatgaagcgacttcccccagtgcttcccggccgcccctatgacctggcggcggcgaccgtggccacagacctggagagcggcggagccggtgcggcttgcggcggtagcaacctggcgcccctacctcggagagagaccgaggagttcaacgatctcctggacctggactttattctctccaattcgctgacccatcctccggagtcagtggccgccaccgtgtcctcgtcagcgtcagcctcctcttcgtcgtcgccgtcgagcagcggccctgccagcgcgccctccacctgcagcttcacctatccgatccgggccgggaacgacccgggcgtggcgccgggcggcacgggcggaggcctcctctatggcagggagtccgctccccctccgacggctcccttcaacctggcggacatcaacgacgtgagcccctcgggcggcttcgtggccgagctcctgcggccagaattggacccggtgtacattccgccgcagcagccgcagccgccaggtggcgggctgatgggcaagttcgtgctgaaggcgtcgctgagcgcccctggcagcgagtacggcagcccgtcggtcatcagcgtcagcaaaggcagccctgacggcagccacccggtggtggtggcgccctacaacggcgggccgccgcgcacgtgccccaagatcaagcaggaggcggtctcttcgtgcacccacttgggcgctggaccccctctcagcaatggccaccggccggctgcacacaacttccccctggggcggcagctccccagcaggagtaccccgaccctgggttttgaggaagtgctgagcagcagggaatgtcaccctgccctgccgcttcctcccggcttccatccccacccggggcccaattacccatccttcctgcccgatcagatgcagccgcaagtcccgccgctccattaccaagagctcatgccacccggttcctgcatgccagaggagcccaagccaaagaggggaagacgatcgtggccccggaaaaggaccgccacccacacttgtgattacgcgggctgcggcaaaacctacacaaagagttcccatctcaaggcacacctgcgaacccacacaggtgagaaaccttaccactgtgactgggacggctgtggatggaaattcgcccgctcagatgaactgaccaggcactaccgtaaacacacggggcaccgcccgttccagtgccaaaaatgcgaccgagcattttccaggtcggaccacctcgccttacacatgaagaggcatttttaaatcccagacagtggatatgacccacactgccagaaga

SEQ ID NO: 1458 - DNA, 1057 bp, Homo sapiens
  Genbank Accession No. U72518
acgctgcccagactcactacccgccctctcggtcccgcagccacgaggaggacgctgcccagactcactacccgccggctccctcccccgcgtccctgtggtggtgggcgaagatgacctgttgtgcatcagatgcctttgagacatacaactggagatgtgagataggaaattgaatgtaaagactggaagctcggcagagcagaactctgaacaacgtgcctcaggagtgcaagttgctgatgaagtgtgtcgcattttttatgacatgagagttcgtaaatgctccacaccagaagaaatcaagaaaagaacaaaggctgtcatttttttgtctcagtgcagacaaaaagtgcatcatgtagaaggcaaagagatcttggttggagatgttggtgtaactataagtgagcctttcaagcattttgtgggaatgcttcctgaaaaagactgttgctatgctttgtatgatgcaagctttgaaacaaaagaatccagaagaattgatgttttcttgtgggcatcagaactagcacctttgaaaagtaaaatgatctatacaagctccaaggatgcaatcaaaaagaaatttcaaggcataaaacatgaatggcaaacaaacggaccagaagatctcaatcgggcttgtactgctgaaaagttaggtggatccttttttttttttttgagatggagtcttgatctgtcgcccaggctggagtgcagtgacaggatctcggctcactgcaacctctgcctcccgggttcaagtgattttcctgcccagcctcctgagtagctgggattataggcgtgcgccaccacacctggctaatttttgtattcttagtagagtcagggtttcaccatattggtcaggctggtctcgaactcctgacctcgtgatttgccctccttggcctcccaaagtgctgggattacaggcgtgagccagcatgcctggccagtggatccttaattgtagcctttgaaggatgccctgtgtagatcatcattcagtgccacaaattgaaagcttccacgtttaatgttatcc

SEQ ID NO: 1459 - DNA, 4513 bp, Homo sapiens
  Genbank Accession No. U72849
ctcaggtgatccgcccaccttggcctcccaaagtgttgggattaaaggcatcagccattgcacctggcccttacttgcactttctaatgcaaaccaggcctgcgcactgccttgggtcctaaaatcattgcattgactgggtcttctcaaaatcctatatccaagcatcttaggtcttcagctccacctctgaggacccactggggagtctcaggaaacagggaggggtctttcatctcaggaaaaacatggagctcctatctctaccgcccaccccgtgctctacccttcttcctctctgcagaaggagctcagtgaggacatccgaaggacccatgatgcaaagcagggctccgagagccctgcccaagcagggagagagtcagaggccctgaaggcccagctggaagaggagaggaagcgggtggcccgggtgcagcatgagctggaggcgcagaggagccaactgctgcagctgaggacccagcggcccttggagaggctggaggagaaggaagtggtagagttctaccgggacccccagctggagggcagcctgtccagggtgaaggcccaggtggaggaggagggcaagcggcgggctggcctgcaggcagacctggaagtggcagcccagaaggtcgtgcagctggaaagcaagaggaagaccatgcagcctcatctgctgaccaaggaggtcacccaggtggagagggaccccggcctggacagccaggcggcccagctcaggatccagatccagcagctccgcggggaggatgccgtcatctcggcccggctggaagggctgaagaaggagctactggcccttgagaagagggaggtggacgtgaaggagaaggtcgtggtgaaagaggtagtcaaggtggagaagaatctggaaatggtcaaggcagcccaggctctgaggctgcagatggaggaggatgctgcgcggaggaagcaggcggaggaggctgtggccaagctacaggctcgcatcgaagacctggagcgggctatcagctcggtggagcccaaggtcatcgtgaaggaggtgaagaaggtggagcaggacccagggctcctccaggagtcctccaggctgaggagcctcctcgaggaggagaggaccaagaacgcgacgctggccagggagctgagcgacctgcacagcaagtacagcgtggtggagaagcagaggcccaaagtgcagctccaggagcgcgtccacgagatcttccaggtggatccggagacagagcaggagatcactcggctcaaggccaagctgcaggagatggcgggcaagaggagcggtgtggagaaggaggtggagaagctgctgcccgacctggaggtcctgcgggcccagaagcccacggtggagtacaaggaggtgacccaggaggtggtgaggcatgagaggagccccgaggtgctgcgtgagatcgaccgcctgaaggctcagctcaacgagctcgtcaacagccacgggcgctcccaggagcagctcatccgcctgcagggtgagcgcgacgagtggaggcgcgagcgggccaaggtggagaccaagacggtgagcaaggaggtggtgcgccacgagaaggacccggtgctggagaaagaagcagagcggctccgccaggaggtgcgggaggcggcccagaagaggcgggccgcggaggacgcggtgtacgagctgcagagcaagcgcctgctgctggagaggaggaagcccgaggagaaggtggtggtgcaggaggtggtggtcacccagaaggacccgaagctgcgcgaggagcacagccggctgagcgggagcctggatgaggaggtgggccggcggcgccagctagagcttgaggtgcagcagctgcgggccggcgtggaggagcaggagggcctgctcagcttccaggaggaccgcagcaagaagctggccgtggagagggagctgcggcagctgaccttgaggatccaggagctcgagaagcggcctcccacggtgcaggagaagatcatcatggaggaagtggtcaagctggagaaggacccggacctggagaagtccacggaagccctgcggtgggacctggaccaggagaagacccaggtaaccgagctgaatcgggagtgcaagaacctgcaggtccagattgacgtcctccagaaagccaaatcgcaggagaagaccatctacaaggaagtgatccgggtgcagaaggaccgcgtcctggaagatgagcgggcccgcgtgtgggagatgctcaacagggagcgcacggcccggcaggcccgggaggaggaggcacggcgcctgcgggagcgcattgaccgggccgagacgctggggagaacctggtcccgggaggagtccgagctgcagagggcccgggaccaggccgaccaggagtgtgggcggctgcagcaggagctgcgggctctggagaggcagaagcagcagcagacactgcagctgcaggaggagtcgaagctgctcagccagaagacggagagcgagcgacagaaggcggcccagcggggccaggagctctcgcggctggaggcggccatcctccgcgagaaggaccagatctacgagaaggagcggacgctccgggacctccacgccaaggtgagccgggaggagctcagccaggagacccagacgcgagagaccaacctttccaccaagatctccatcctggaacccgagacggggaaggacatgtccccatacgaggcctacaagaggggcatcatcgacaggggccagtacttgcagctgcaggagctcgagtgtgactgggaggaggtcaccacctcggggccctgtggggaggagtctgtgctcctggaccgcaagagcgggaagcagtactccatcgaggccgccctccgctgccggcgcatctctaaggaggagtaccatctgtacaaggacggccacctgcccatctccgagtttgcgctgcttgtagctggggagaccaagccaagctcctcactctccatcggctctatcatctccaagtccccgctcgcctccccggccccccagagcaccagtttcttctctcccagcttctctctcgggctcggtgatgacagcttccctatcgccgggatctatgacacaaccacagacaacaagtgcagcatcaagacggccgtggccaagaacatgctggaccccatcactgggcagaagctactggaggcccaggcggccacagggggcatcgtggacctgctcagccgtgagcgctactctgtgcacaaggcgatggagaggggcctgatcgagaacacctccacacagaggctgcttaacgcccagaaggccttcaccggcatcgaggaccccgtcaccaagaagaggctctcggtgggcgaggccgtccagaagggctggatgccccgggagagcgtgctcccacacctgcaggtgcagcacctgaccggggggctcatcgaccccaagaggacaggccgcatccccatccagcaggccctcctctccgggatgatcagtgaagagctggcccagctcctgcaggacgagtccagctacgagaaggatttgacagaccccatctccaaggaacggctgagctacaaggaggccatgggccgctgccgcaaagaccccctgagcggcctgctgctcctgccagcggcactggaggggtaccgctgctaccgctccgcctcccccaccgtcccgcgctcccttcgctgacacgggccaaggagccagtggggaagtgcgtgtgttgggccaggtaggatacgtacacctcttgcctcagagcagcctcatcccaggcagtgggtcttccctctgtccaaccactgttttattattttactaacatggtgatgggctccctcccctaaccttggtgcctgatccatccccagaccaggacagcagccactcagttcttcctccacctccacccagtgatcccaataaacgaattctgtctccccgtgccatgtggtgtcccattcattcacatttgagagtgcaggacccatgtgtctgggggatgagtgcaaggacagcgttgctcaagtccttgcctgggcggacgtgctcaatttgcctgcctgggaaacaggcatcctcggagggctgtgcctccttgagtgcggggcaggggatgcagtggcaggtcatggaaagagattatggtttaaaatcactaaaggaggccgggcacagtggctcacacctgtaataccagcatttaggggggccaaggtgggtggatccgacgtcaggagttcgagaccagcctgacgaacacggtgaaaccccgactctactaaaaatacaaaaattagctgggtgtggtggtgcacacctaaaattcccgctactcaggaggctgagcaggagaatcacttgaacctgggaagcggacgttccagtgagcagagatcatgccctgcactctaccctgggcaacaggtagacctgagacagccgagactccatctc

SEQ ID NO: 1460 - DNA, 1098 bp, Homo sapiens
  Genbank Accession No. U72882
atgtcagccccactggatgccgccctccacgcccttcaggaggagcaggccagaccgccctccacgcccttcaggaggagcaggccagactcaagatgaggctgtgggacctgcagcagctgagaaaggagctcggggactcccccaaagacaaggtcccattttcagtgcccaagatccccctggtattccgaggacacacccagcaggacccggaagtgcctaagtctttagtttccaatttgcggatccactgccctctgcttgcgggctctgctctgatcacctttgatgaccccaaagtggctgagcaggtgctgcaacaaaaggagcacacgatcaacatggaggagtgccggctgcgggtgcaggtccagcccttggagctgcccatggtcaccaccatccaggtgatggtgtccagccagttgagtggccggagggtgttggtcactggatttcctgccagcctcaggctgagtgaggaggagctgctggacaagctagagatcttctttggcaagactaggaacggaggtggcgatgtggacgttcgggagctactgccagggagtgtcatgctggggtttgctagggatggagtggctcagcgtctgtgccaaatcggccagttcacagtgccactgggtgggcagcaagtccctctgagagtctctccgtatgtgaatggggagatccagaaggctgagatcaggtcgcagccagttccccgctcggtactggtgctcaacattcctgatatcttggatggcccggagctgcatgacgtcctggagatccacttccagaagcccacccgcgggggcggggaggtagaggccctgacagtcgtaccccaaggacagcagggcctagcagtcttcacctctgagtcaggctaggggcctccccttctcatcctccccacccccccgccaaggttctcacactggcctgggcttgggtgcccatataggaggtctgtatgttcaccaacagtgcggaggggtcacacattgcaaaacactgcccagaacagtaaaaagagcctgcatgccaaaaaaaaaaaaaaaaaaaaaaaaaaaaaaaaaaaaaaaa

SEQ ID NO: 1461 - DNA, 36534 bp, Homo sapiens
  Genbank Accession No. U73167
gatccatccgcctcggcctcccaaagtgctgggattacaggcgtgagccaccgcgcccggcccccaaccttgggacattttcatccattcattcatcctttttttttttttttttttgagacggagtcttgctctgtcacccaggctggagtgcaggggcaagatctcagctcctgcaccctccaccttccggattcaagtgattctcctgcctcagcctcccaagtagttgggattacaggcatgccatcaacatgtctggctaatttttgtatttttagtagaaatggggtttcaccatgttggccaggctggtctcgaactcctgacttcaggtgatcctcccacctcagcctcccaaagtgctgggattacaggtatgagccaccgcgcctggcgcatgggcacatccattgagtgtgcacttggtgccaagttctgtgccaggcacaggcaattcaacatttattggaatgatgtagtccctgtctgcatggaattcataggctagaggaggaagcagtttgcctctggtcccatggccagagcagccccaggtgaaggttatgaattatttgtcccatctaatggtgttccagcagtctgccacatggtgggaaggaggccccacagagctgtgctgtctccttcccaggatgagctggagcacagcctgggggagagtgcggcccagggggcagctggagtggtgctctgggtgagctgggaaaatacaagaaccaaggtgagcttaggcctggcatgagggtgggggtgggggaggggtggggccattaagctgacggggtagaccctgacttaccctttctacctgcaaagtcctggctgaccagcaggtgagtgcctcagtgccctgggtgggtccatacatggccatggtgtccctgacgctatcctcccttcccacctaggaatcatgtcaggccatcaaggagtatatggacactacactggggcccttcatcctgaacgtgaccagtggggcccttctctgcagtcaagccctgtgctccggccatggccgctgtgtccgccgcaccagccaccccaaagccctcctcctccttaaccctgccagtttctccatccagctcacgcctggtggtgggcccctgagcctgcggggtgccctctcacttgaagatcaggcacagatggctgtggagttcaaatgtcgatgctaccctggctggcaggcaccgtggtgtgagcggaagagcatgtggtgattggccacacactgagttgcacatattgagaacctaatgcactctgggtctggccagggcttcctcaaatacatgcacagtcatacaagtcatggtcacagtaaagagtacactcagccactgtcacaggcatattccctgcacacacatgcatacttacagactggaatagtggcataaggagttagaaccacagcagacaccattcattccatgtccatatgcatctacttggcaaggtcatagacaattcctccagagacactgagccagtctttgaactgcagcaatcacaaaggctgacattcactgagtgcctactctttgccaatccccgtgctaagcgttttatgtggacttattcattcctcacaatgaggctatgaggaaactgagtcactcacattgagagtaagcacgttgcccaaggttgcacagcaagaaaagggagaagttgagattcaaacccaggctgtctagctccgggggtacagcccttgcactcctactgagtttgtggtaaccagccctgcacgacccctgaatctgctgagaggcaccagtccagcaaataaagcagtcatgatttacttagctgtttactgagcgcctaaaatgtccaggccccggtatccaaagggcacaggaaaggcttgtcactctcaccagatctgacgtcagtctaagggcggctgcttcccagggtggggcccaaatttcaagaggaagccccacctgatcggaccgtttccaagctgtcctggggcaggaggccggcgggaaccgaagctagacttgtcagagcctggggcggggctggcggaggcagagccagctggaggcggggcctgcgcctggctgaagtgacgtgctgggctggggcagggcctggaagaagccaaatcgaggcgggacctaagctgtgacgcaaggagaaggaggaggggcctgtatggggccgggtggggaggaggcggactcaaatggagatggggtggggctcagcaggggcggagccagggtagagactgagtcggcgcctggcgggtgttgtgacgcgcaaaccaggggcgggttctaagcggcgacgcgcgggtgctgggaggccttagaacgccgtggcgtgccgcaggacgcgacggctgcagaacatccgccgcaccgctgggggccaacgttgtcggaccgaggagtccgaggtggcgactgagtgagatacccagctgtgcggagctaggacgcggaacatcccagaggccagcatcaacatgtcagtaccgcacccttcccatttgctgcctgtaggtccaccccgcgcgtgcggtccccaagtggccatgccaccctgcacgccctccccgcgtcagtcgttcgtttccagaccatgccgagccacacctgcccacagagtcgagctctcgaagtcctcattcccaaaagctccacagcctgtgacccactaggagggagggggaaaccgaggcccgggagagacggagaagccactctctgaggaccccggagccccgcccacagtgggtggggtcggcactgaaggggttaaggccgcggggaagccccgggctcagccctaggggcggatcctggggcttcctccctctagaccaaagggtgcggctgctgcagaggtggctgatgcaggtgaggggcttacagccctgtgaatggtgtgggaggtgaggggaggggggtgcctgttactgaccagtgtttaattggcctcaagctcaggagaggtaaggggagccaggaggccccctctggagcaggtgagtagaaggagggggctcagctgcccgcccacgactagaaaacccccagcatagacctgccggacggcaggaccttggttaagatgggaaaacagtagggtttgggcacaggaggtctgggcccccaacctggtgaccgttggacaccctgtggatataggaaggaagctgtggtccttatctagggtgcctgcgaaactcaagccagtggggaaccaagcctgcagaggcaatactgctgtgtgactgtgggccaggcccagtgctggtgctgctggggccccatctgaggagacagttgggtctatatccaaagtgtcctgagatgggcagagttgggaagggggccatgggctccaggtggggaaggcagtcaagacaggccaaagctcagcctgatgggtgcatgagtggggccccaggatccactaaggcagtgggcatagcccaggtagttgaaaaggctgggagctggaggagactcggaacatagggagaagaaagggacaggaagactcccgggcagtttttcctatggagggaaccttgggtaggtttgagcagggggtatagtgtctgctttgcatcttctatcccatgccctagtggtggactaggaggactactggaagacagaaggccagcaagtagattgggtcggctgttttatagacctggtggttacagaccccctgtgaggggaggtcctgaggaggacaaatttgtagccagagcaggctggggccaggactcctaggttctgccccagccttaagcagctcatccatcactcccagcctccctccaatgtggggtagacacctggatctatctgccctgctctataggggatgggtctcttccaggtcacctgtgctatcaggtgagtgtgggacaaagtgcagcccaccactccccagttccagtatgcatggtcccccctgcactctgtcagcccttccctgctccaaccccaccctccctcctggcacagcccagcatggctgttatctacaggaggagagccactgtggtctgaagagatgctactgcctggagactggggtcttaacctccagcctggcactgagccacctgcaacctagcagcaggtgaccttggctcccagcctgactcagctgaacctggatcctgtgcataggcaagagctgactctgagccctggcccagccaagctgacccctacactagaccctacacaccggatggagctgatcctgagtaccagcccagctgagctgactctggatcctgcgtgccagccaaagctgcccctggattccacatgccaaccagagatgaccttcaatcctggtccaactgagcttaccctggatcctgaacaccagccagaggagaccccagctcctagcctggctgagttgaccctggagcctgtgcaccgccgacccgagctcctggatgcttgtgctgacctcatcaatgatcagtggccccgcagccgcacctcccgcctgcactccctgggccagtcctcagatgccttccccctctgcctgatgctgctaagcccccaccccacacttgaagcagcacccgttgtggtgggccatgcccgcctgtcacgggtgctgaaccagccccagagcctcttagtggagacagtggtggtggcccgggccctgaggggccgtggctttggccgccgcctcatggagggcctggaggtctttgctcgggcccggggcttccgcaagctgcatctcaccacccatgaccaggtgcacttctatacccacctgggctaccagctgggtgagcctgtgcagggcctggtcttcaccagcagacggctgcctgccaccctgcttaatgccttccccacagccccctctccccggccacccaggaaggccccaaacctgactgcccaagctgccccaaggggtcccaagggacctccattgccaccaccccctcccctacctgagtgcctgaccatctcacccccagttccatcagggcccccttcaaaaagcctgctggagacacaatatcaaaatgtgagggggcgccccatattctggatggaaaaagacatctgaggccatccagggcaaggaactgtctttctggttcaatagactgccccgacagtctacaagcctcagcccactgaccatacctcagcccctagcccctggggggcagctttaacctgggcatgtttcctgggtaccagtggggccaggaggtggctctggctcagagccgtcagtgtggctgaataaaggctctcttgggtatggctgtgacagtttatttgttgatccccctaccctcacctctcacctcttctgcaggtcccttatccctgcagaagtctccagatccaccttggccctgaggccattgatgggaggatgcctgtcctttgcctttaccccccacctggctcaggagacagggtggctgttttcttccccattcactcattaccattcactgagcacctactgtgtgtcaagccctggacgggacataggcaatgggtaactagacaaacaggcatacagtagcaggatccatgtggcacaggggaggtacagaggctttgggaacccaagtgacttcactccacctggggatccaggagacctcccagggcagtgatgtcacagcagagacctgagtgctaggtaggaattaaaccaggcaggtgaggaggtgggagctgactgttcttggaagagggaacaaggtgggcagaggaaagaaggggacttgtgacagttgtgggaggacacagtggtgtattgacaaagacggaacatgggagggaatgtaccctcagctcactgtaaagcccgctttggtgtgcacctgccactcgatgcccggggcatcatagccagcttgcggtgtggctgctttaaaaggcccaagagacccctggggaaacatgctttccccagctcctcctgtaaggatggggaggagctgggggagctttcctggctttccctgccatgtggaaggtgtggccatagctgcggactctaagcttacacccccctctctcctgcaggtttccatccttggggaatgaccacgcaactgggcccagccctggtgctgggggtggccctgtgcctgggttgtggccagcccctaccacaggtccctgaacgccccttctctgtgctgtggaatgtaccctcagcacactgtgaggcccgctttggtgtgcacctgccactcaatgctctgggcatcatagccaaccgtggccagcattttcacggtcagaacatgaccattttctacaagaaccaactcggcctctatccctactttggacccaggggcacagctcacaatgggggcatcccccaggctttgccccttgaccgccacctggcactggctgcctaccagatccaccacagcctgagacctggctttgctggcccagcagtgctggattgggaggagtggtgtccactctgggctgggaactggggccgccgccgagcttatcaggcagcctcttgggcttgggcacagcaggtattccctgacctggaccctcaggagcagctctacaaggcctatactggctttgagcaggcggcccgtgcactgatggaggatacgctgcgggtggcccaggcactacggccccatggactctggggcttctatcactacccagcctgtggcaatggctggcatagtatggcttccaactataccggccgctgccatgcagccacccttgcccgcaacactcaactgcattggctctgggccgcctccagtgccctcttccccagcatctacctcccacccaggctgccacctgcccaccaccaggcctttgtccgacatcgcctggaggaggccttccgtgtggcccttgttgggcaccgacatcccctgcctgtcctggcctatgtccgcctcacacaccggagatctgggaggttcctgtcccaggtaagtggaagctgaggtctaggggtctgagtcaggaggtatggccctgttctaggaaggtcccaggagaagaccttgcctaggggttggtcctaatctaggcgttctcagcggaaggccctgtcctggagcatctgatgagggaggcatggctttgccctggaagatgttgaggggtagggaggcccagcctttggagtgctggcctgaggggagatattctgagtggaaggcctgagaagccactcagagactcgatacaaaggggccctacttgggctgggtgagtgtctcacacctataatcccagtactttgggagcctgagatggaaggattccttgaggccaagagttcgagaccagcctgggcaacatagtgagaccccaacctctaccaaaaaaacatttgagacagagtcttgctctgttgcccaggctggagtgcagtggcaccatctcagctcactgcggccttcacttcctggttctagtgatcctcccacctaagcctcctcccgaatagctggactacagatgcataccaccacacccagctaatttttatatttttgtagagatggggttttgtcatgttgcccaggctggtattgaactcctgggctcaagtgattctcccgcttttgcctcccaaagtgtgggattacaggtgtgagccactgtgcccagcctaaaaaattattagccaggtgttatgcacctgtagtcccagctgcttgggaggctgaggtgggaggattacttgatcccaggagttcaaggctgcagtgagctatgatcatgccactgcactccagcctggatgacagagtaaaaccccgcctctaaaaccaaaccaaactagagagtccctactgtagagttagaatcagattgtgacagtgaaccagaagagtttcttgaatgtggatgtgtgcccacatggatctggccagcccagcactggcttagcagctctctgcctccaggatgaccttgtgcagtccattggtgtgagtgcagcactaggggcagccggcgtggtgctctggggggacctgagcctctccagctctgaggtgatcattgcccctttgagcctgccatgtagcacatgctggggtcccagggtgggggacggccatgtcaagattatagagcaggcatattgacacatatcttcccttctcctcaggaggagtgctggcatctccatgactacctggtggacaccttgggcccctatgtgatcaatgtgaccagggcagcgatggcctgcagtcaccagcggtgccatggccacgggcgctgtgcccggcgagatccaggacagatggaagcctttctacacctgtggccagacggcagccttggagattggaagtccttcagctgccactgttactggggctgggctggccccacctgccaggagcccaggcctgggcctaaagaagcagtataaagccagggcccctgccactgcctcttcttttccctgctgccacttttccagtcctggaactactctgtcccactcttgctctattcagtttacagtcaaccctcccaagcacacaccccgcttcccttggaatccctgaggggtagaaggggccagaaaaaacgcttataaaaccagaggccctctgagatcatgtgagtcctccatggcaaggaagcagttccagggagagtcaggttccagctagttagggctgccagcctagggctttgtgcctacacctcactaagcccatggagaggtcacagatgggccgtgcacgggcagatgggccccaaaaaatcttggcgaaggtcggtaaagtgctaagctgttgtctgcactctttcatcataaagtcacttttttccactgcctgaggtttggctgttgctcctgttatcccaagctctaagcccttcccatggtccccagacccaggcaggggtaggtctcgtctggagtgtcccgctgccaagtgccctgagaagccagtcctgccttggtgctccactgagggacgcttcggagttaaccaccgtgcacttgttcccgacgcggggctggggcgcgcgcagggcattgtgggtgcatagttcagccagcgcgtcgtcggctggtgggccccaggcgtggactaccattcccatggtgctctacgcgcagctagccgccgtcgcctgcgcgctcaggcctctgggattagtagttttagcctcgtggatgtgggcctgaatcggatggcctggaactcgccttcccggcgacctgtttggcagggcggggcgcctcgcgaagatggtggcgcgcgtggcgtgtggctcccgtcgtctggccaagtctcagcgcagcgcaccggccggcgtctcgttggcctggagcccacacccaccgggtccctgaccccgcgccccccgcgcccggttcccggcatgcctcgcgcccgtaagggcaacacgctccggaagggtggtcagcgccgtggaggaggtgagtggggtggggggcgcgggacagctgtatgagcggcgggcgggggtcctgctggatccccttggttgttctcgagggccctgggtggggaaccccctcggccagccccacgcagcttcccataactctaccgaggctggcacgtgccccagcagtcattggccacgtgcgtgcccaacttgagctcgctgcccactgcctgttgggagtccgcgctcccagcggtgacccggccagcccctccgggcctcagttgcctgctgggtggacaaactcaccggacagggcaggaagccagtcctcttgccaaaccctgatcctttcctggactggtcaaggaagttggcgggagtcctggcctgctccggtgaagagagggagggggctctgttgggaagctacctggttagggccttggcagcttggcaggcctgactccacaaggtagctgagtatcctggagcctgaggcagtcttgggactcgcttatcagcttagaccaggagcctatcttaatgcgttaaacacatatgtttactctgctgggatggggtgcctaccacgcacaaatttatttatttttattcttgagggggaagggaggagggccgggcacaggaaggaggaaaatacctaggcacaactttaaactggtcaccaccatggtgggttttgggtgggggacatctaatagggtgtggaacatgttcactgagtggtgtcagccccagacttaggactcagggaggcctggggggaagtgcttctgggtgagtcctgagaggatggagaagagagcaagttgtacaaagacctggcagctggagggaccccagcgcagtggagtgaatgagggaaggctgggctgctccggcaggtagaatagtaagataaaatgggagcaggctgggcgtggtggctcacacctgtaatcccagcactttgggaggccaaggcaggcagatcacctgaggccaggagttcgagaccagcctgaccaacatggagaaaccctatctactaaaaatacaaaattagctgggtgtggtgtcgtatgcctgtaatcccagctactcgggaggctgaggcaggagaatcactggaacccgggaggcagaggtcgcagtgagccgagatggcgtcattgcactccagcctgggcaacaagagcaaaactctgtctcaaaaaaaaaaaaaaaaaaaaaaggtggcggggagcagaggccagtgcgcaggctggactttgtcctgcagatgaggggtgtgagtagttcttagaagtagggccagcctggtgatcacaccctgtccaaaactctgccacagcagccaaccttgccaatgtcagcccttggccctggacagaccccacacacaggagtgcaccagccctactgaactgacccttggctttggtttttcatctctgagagggacaccattctatcttttgggattatgaggtcgagtgaggtacccccagccatccctcatcagtagaggcaagttgagtgtcctattccaccttctccaggtgcccggagcagtgcccaagctgactcgggttccagtgacgatgaggcagccagtgaggcccgcagcaccgccagtgaatgccccagccttctcagcaccactgcagaggacagccttggtgagagcgggtggaagtttgacaggggcttggtgagggctccatgggctgaggacaagaagcggtgctgaccaggtggccttgcagggggggatgtcgtggatgagcagggccagcaggaagaccttgaggaaaagctgaaggagtatgtggactgtctcacagacaagaggtacccctggctgccagccaactcctacacccagctccaagtgtgatcaagggagggctggcccatatgaccccccttctcgacctcccccagtgccaagacccggcagggtgctcttgagagcctgcgcctggccctagcgtcccgcctactccccgacttcttgctggagcgccgcctcacgctagccgatgccctggaaaagtgcctcaagaaaggttggacctgggggtgtgtgggagacttaaactgggcagacactggcccttgctgcatgggctgactggaaagcatcccacagggaagggcgaggaacaagccctggctgctgctgtgctaggcctgctctgcgtgcagctgggccctggacctaagggtgaggagctgtttcacagcctgcagcctctgctggtctctgtgctcagtgacagcacagctagccctgctgcccggctccacgtgagtgtgcctgtgccccatgaaacccttcctgcaccttatccctcagcagagtggtgggttccccctatcttcagcctcctttactctgaggggagtgagctccagggctgggaacccaggttcacccgctgaccgtggcattgcattgcccttctcccaacagtgtgcttctgcccttggcctgggctgctacgtggctgccgctgacatccaggtgaggggtctttgggcacaggtggtagagcatctagggctgtaactctgcctctgagctcccctgcctctctgtgctcctaggacctggtctcttgccttgcctgcttagaaagtgttttcagccggttctatggcttggggggcagctccacaagtcctgtggttcctgccagcctgcacggcctgctctctgctgccctgcaggcctgggcattgctgctcaccatctgccctagcacccaaatcagccacatccttgacaggtaggggtggctgtccactgggagggggaggggatctcaaagaggcccccaagccacacatatagctcagcctgccccttccctaggcagctgccccggctgccccagctcttgtccagtgaaagtgtgaacctgcggatcgctgccggtgaaaccattgcactgctctttgagcttgcccgggaccttgaggtgcgagggacaaggatggggggtgcttggtgacaccacctgcccatcacaggctggatgcagggggtgccacacaaaacagaacagctttaggtcattatgcagaggaggtggccccaaaacagatttatctcctagatgtcatgatgggtgccctcagcagtggtgtcctggcctgacagaggccaaggaggggtcaaaggggccaggcagagaagagagggtctctcagtgaaaggaggggtttgggcagtgccctgttcagagccagcagagctcaagcatctaccacacaccctccaatgctcccattgcaggaggagtttgtttacgaggacatggaggccctctgcagtgtcctgcgcactctggccactgacagtaacaagtaccgtgccaaggctgatcgtcggcgccagcgctctactttccgcgccgtgctgcactccgtggaggtgtgtgtgagaacatatgtgtcctagcaagggtgcacccccaggcatagcagccaagcccagttgtgttggcacctctaccctgcagggcggtgaatgcgaagaagagatagtgcgcttcggctttgaggtgctctacatggacagctgggctcggcaccggatctacgctgccttcaaggaagtgctgggttcgggcatgcaccaccacctccaggtgcggggacggacagggaggggacatctggtgtggttgcttcagtctggcctgagctcactgccctctgccccccagaacaatgagctactccgtgacatctttggcctgggccctgtgctgttgctggatgccactgccctgaaggcctgcaaggttccacgctttgagaaggtttgcacccttgggcacctttctcttccccctattcccatttcctggaggcctggaattctgtagaggccggaagaggacccccagccctttcccttcccagctccccagggtgtcactctctgtccccactctagcacctgtacaatgctgctgccttcaaagcccggaccaaggctcgaagccgtgtgcgggacaagcgggcagacatcctgtgaagcaggacctgctgaagaggagactttctatgcccttggtccgtatttttaacagaagacagtgcaacaactggtctccaccagtatttgtcactttattttttttaatgacaaaaccaaaaacagacatggggtgggtagctgggggcccggacacttgggaccctgacccctttgtccctgcactcagccctgtggccccttcctgtcctgtctcaggccaggctaaatatgtgccttcctcagggctgtggggcaggcactagggggcctttcccttcctttcctttctcaggccttgctcccccaggatgacccactcttaggggggtggtggcatctggacaaatgccaccacagcaggtggggtggcaaagctacctggaatggatttgtgtgctgatttttaaggattattacagataattaaacagaacggtcagccttctgtggtcttaacccctgggtatttttctgttctccctccccatctactatcccaggcttgggcccaactggtcttccacgatgtcacctttgccctccaaggcagtcttccccaggtggtgcctctccccctactcagagcccagcctgtctttaagagctgaggctggaccctcactgggagccctggcagagtttgggtgattgctatgggggcagctatttctagacttcagaacctgccatctggggtggccagagagtgttgacaggccacaggaggagccaggaggctggtgccccttcccctgaccttgggccacccaaagcgaggctttggcaccagaggcttggctaggcctggcttgaagagatcaggagagggaggcagccattaagttaacaacaggttcttgtacaaaaatctcaccaaggaaatagtgtagatgtggcagccagcagtagggaaggagagacctgcccatagccactttattcccccaccaacacacacccccaggccccagatccaaatggcatctcagctgggtgcttgggcctcactggagttgagcctccgaagctggctgaggctggccaagcggagtttgagtagtgtctcctcctgcgtgcggagcgtgtgtgccaggatgcgcagggattcactctgcagcactgtgaatgggaagtgggggatcatcagaccatgtgccaccccgtgacccctgcagacccagcccaggaccaggggcagccacgggcctcccgccccatccttcactgctgcagcatctgcagttactccttccagctgcacagaagggcctcccagtccccactgccttgctttccattcctactagcaccctatgcgtccataccgctcaggtagacagccaggagtgcgagcactaggcaagtgagcaccagcagcgcgagcagcagcaggaaccctcctcgtctgtacacagggctgcagccagcctgggcacacagtgacggcggcaaaacgcccagcagctcatcccacggtcgtgcctcttcagttagataggggcgcagtgtgcctgctgggtggatgggacattgggagggtggtgggtgcacctgctttcgtcccctcccccagcacatcatccaccccactgtccccactcacctccactatgtaggtcgctgatggactccacctggtgcaggcatacctcatgcacgtggttgggggccaatggccccctgctcctctggctgggcatcattggcgccacggagtctgcaggggcagcgcaggctgatttagccagtggtgggtcaacccccttccttctaccaggtggcttcaggcagcaaggacttgcggatgatagggatagtgggacatttggttccaaatcccctaaaactgactcaggaattacccttgatttggatccaggatgatcccagacccttacaggcttattctgtatacaggagcaacaggtacatttgatttgtttccttccaagcaccccagggactcactcaggcattcctctgcctgcttatttctagcagtttatcagccttgaatgctaaacctgcagcaaatggaattcagtcctgcctcttttgtcagttctccctgcagacccaatgcctggcatcttctggtcagaaagccctattgtagccactctggtgcctttccctcctggccttggttctgtgtttgttaacatactcagtgtgactctgctgtacatgtgtgaaccctgctgttttcattcaacatttactgttggggagacccttctttgttatactgttgcacatgcctctgaggtctctcccttcacacatctccctgaggctgcctgggcatctaggttgtttgcagtccccgccccccttttttttttgagacggagtttcgctcttgttgcccaggctggagcgcaatggcgcgatcttggctcaccgctgcagttcccttttgaaattaacccccaggacatccaccgttgaatatgaaggttttttcccaatttcctgatagtttaattcccagaagtggaattactggatccaagagcagggatttttgtttgtttgtttgttttttgagatggagtctccctgtattgcccaggctggagtgctatgtcgtgatctcgcctcactgcaccttccacctcctgggttcaagcgattctcctgcatcagcctcctgagtagctgggattacaggcgtgtgccaccacgcccagctaatttttgtatttttggtagagatgaggattcaccatgttggccaggctggtctggaactcctgacctcaagtgatctgcccgcctcggccttccaaagtcctggcatttacaggcatgagccactgcatttggtcgttttttgttttggtttggtttttttaagatggagtctccctctgtcgcccaggctggagtgcaatggcaagatctcggctcactgcaacctctgcctcccgggttcaatcagttctctgcctcagcctcctgagtagctgggattacaggcgccttccaccacacccagctactttttatatttttagtggagatggggtttcaccatcttggccaggctagtcttgaacccctgaccttgtgatccacccacctcggcctcccaaagtgctgggatttacaggcgtgagccaccgtgcccggcctgtttttttgtttttgagacagagtcttgctctgttgcccaggctggagtgcagtggcgcaatcttggctcattgcaacctccacctcctgggttcaagtgattctcctgtttcagcctcccaagtagctgggattacagatgtgtgccaccacgccctgctaatttttgtattttcagtagaaaccaggtttcaccatgctggctaggctggtctcaaactcctgacctcaagtgatccgcccgcctcagactcccaaagtgctgggattacaggcgtgagccatcgcgcctggcctgagatttttgttttgtttttgagacagattcttactctttcacccaggctggagttcagtggagtgatcacagttcaccgcagcctccacctcctgggctcaggtgatcctcctgcatcagccttcccagtagctgggactacaggcatgcactaccatgcccagttaattttttttgtattttttgtagagacagggttttactatgttgcccaggctggtctcgagctcctggtctcaagagatccatcctgcttggcctctcaaaatgctgggattacaggtgtgagccaccatgcccggcctgattttttttaaagctattaccaaactgtcctccagaagcactgtccacagctcccccgcagggtataatattgccaccattaggcatccccataggaaaaaaattatatttacatgcacacgtgcacacatatatttgctaacttgagagatgagaaatggtctttcttattttattgggtttcttagcctagggagtgtgactaatacgtgtgtggcgcttttttttttttttttttttttgagacagtcttgctgtgttgcccaggctggagtgcagtggtgcgatctcagctcactgcaacctccacctcccaggttcaagcaattctcgtgcttcagcctcccaagtagctgggactacaggcacctgccaccatgcctggctaatttttgtatttttagtagagaccaggttttgccatgttggccaggctggtctcaaactcctgacctcaagtgatccacccgccttggcctcccaaagtgctgggattataggcgcaagccaccatgcccagctgtgtgtggcttcttaattatcaatttgaagcctctgcccatttagtcacttgggtctgtgtacttttcttttgattttaattatgtactttcacactcattgaagtttttgctttttgtttgtttgtttgagacagagtctctgttgccctggctggagtgcagtggcacgatctgggctcactgcaacctccgcctcccgggttcaagggtttctcctacctcaccctccttagtagctagcactacaggtgtgcaccaccacaccctgcaaatttttttttttttttttttttttgagatggagtctcgctctgccgcccaggctggagtgcagtggcacgatctcggctcactgcaagctccgcctcccaggttcgtgccattctcctgcctcagcctcccaagtagctgggactacaggcgtccgctgccatgcccggctaattttttgtatttttagtagagatggggtttcaccatgttagccaggatagtctcgatctcctaaccttgtgatccgtctgcctcagcctcccaaagttctgggattacaggtgtgaaccaccgcgcccggccaatttttgtattttttgataaagatggggtttcaccttcttggccaggctggtcttgaactcctgacctcaggtaatccacccgcctcagcctcccaaagtgctgggattataggcgtgagccatcgcacccagccggtgtttcgtttgtttgtttgtttttgagacagaatctccctctcttgccatgctggagtgcagtggcgcaatctcagctcactgcaacctccgcctcccaggttcaaccgattctcctgccttagcctcccgagtggctggaactacaggcacgtgccaccacgcctggctaatttttgtatttttagtagagacggggtttcaccatgttggccaggatggtctcgatctcttgacctcgtgatctgctcacctcagcctcccaaagtgctgggattacaggcatgagccaccatgcctggccttttgtttgtctgttttttttgagacagagtcttactgtgtcacccagactggagtacagtggcatgatctcagctcactgcaacttctgcctcctgggttcaagtgattttcctgcctcgtctccccagtagctgggattacaggcacgtgccaccatgcccagctaatttttgcatttttagtacagctggggtttcaccattttggccacgctggtcttgaactcctgacctcaagtcatctgcccatcttgtcctcccaaagtgctgggtttacaggcatgagccaccgtacctggccaatatttaattatattttcttctagttgttctttaacttgatgtctaaaaatcctggtccagatgccaagagctccagatacccacctggaagctgataacagtagggaagagcattgaggggacacctccagataggagcaagggtggccttgcactctgggactgtcattctcaggacagtaactcaacctccatgatttacttgaaactgcctcttgacgtgctcaaaagcaagtacaacaaaaacaagcaagtgctgccagtcattatgtctgggtggtgggttgaaggtcatattaaattctctctttgggccgggcactgtggctcatgcctgtaatcccagcactttgggaggccaaggcaggaggatcatttgagtctaagagtttgaaaccagccagggcaacgtagggagaccccatctctacaaaaaaatcaaagattagggccgggcatggtggctcacacctgtaatcccagcactttgggaggctgaggtgggcggatcacgaggtcaggagttcaagatcagcctggtcaacatggtgaaaccccatctgtactaaaaatacaaaaaattagccgggcatggtgatgggcgcctgtagtcccagctactcaggaggctgaaggcaggagaatagcttgaacccaggaggcggagcttgcagtgatccaagctcaagccactgcactccagcctgggcgacagagctagacctcgtctcaaaaaacaaaaaagtaattaaagattagtttggtgtggtggcatgcttctgtggtcccagcttctcaggaggctgaggtgggagggttgcttgagtccaggaagtcaaggctgcagtgagctgtgatcatgccattgtactccagcctgggcaacagagtgagaccctatctccaaaaaaaaaaaaaaaaaaaaaaaaattccctgctgccgggcgcagtggctcacacctataatcccagcactttgggaggccaaggcaagtggatcacaaggtcaggagtttgagaccagcctggccaatatggtgaaaccccgtctctaccaaaaatatttaaaaattagccaggtatggtggcaggcgcctgtagtcccagctacttgggaggctgagacaggagaatcacttgaacctgggaggcagaggttgcagtgagcagagatcgtgccactgcactccacccggggcgacagagcaagactccgtctcagaaaaaaaaaaaaaaaaaagggccgggcgcagtggcccatgcctgtaatcccagcactttggaaggccgaggtgggcaggtcacgaggtcaggagatcgagaccatcctggctaacacagtgaaaccccgtctctactaaaaaattcaaaacaaaaattagctgggcatggtggctggcgcctgtagtcccagctactcgggaggctgaggcaggagaatggcatgaacccgggaggcagagcttgcaatgagccaagatcgtgccactgcactccagcctgggcgacagagcaagactctgtctcaaaaaaaaaaaaaaatttccctctttgtactttgttgtgcttttctcacactttctaaattgaatgtgaattgtttattacaggaaaaacacacagtaaatgttattgttaagatcccaaaagagggtaggcacagtggcttatgcctctaatcccagcactttgaaaggccaaggtggctggccgggcgcggtagctcacacctgtaatcccagcactttgggaggccgaagtgggtggatcacgaggtcagaagatcgagaccatgccggctaacacagtgaaaccccatctctactaaaaatacaaaaaattagccaggcgtagtggcgggctcctgtagtcccagctactcaggaggctgaggcaggagaatggcgtgaacccggaaggcggagcttgcagtgagctgagatcgcgccactgcactccagcctgggcgacagagcgagactccatctcaaaaaaaaaaaaaaaagaaaagaaaggccaaggtgggaggattggattggttgaggccaggagttcaagaccagggagacccttctctacacacacacatgcatgaaagtaaacatttccccctaccaggggcaaggcccctctcctgcaatgttgaaaatgttggcagtggctcacgcctgtaatcccaacaatttgggaggccaaggtgggtggatcacctgaggtcaggagtttgagaccagcctggccaacacggtgaaaccttgtctctactaaaaatacaaaaattagccgggcatggtagcacatgcctgtaatcccagctacttgggagcctgagacaggagaatagcttgaatctgggaggcagaggttgcagtgagccgagaccgcaccactgcactccagcctgggtgacaaaaaaaaaaaaagttgaggccaggcgcggtggctcacccctgtaatcccaacactttgggaggctgaggtgggtggcttacgaggtcaggagttcaagaccagcctggccaagatggtgaacccccgtctctactaaaaatacaaaaattagctaggcatggtggcaggcgcctgtaatcccagctacttgggaggctgaggcagagaattgcttgaatctgggaggcggaggttgcagtgagccgagatcacgccactgtactccggcctgggtgacagagcgagattccatctcaaaaaaaaaaaaaaagttgaaaatgtgataagaggagcttgctagctgggccatgctctgtcatgggccataacatggagccatggagcagacagtcctacgtcctggccagtactggacctgtagcttcctagattcctgctgccctggcccctctgagcatcagtacttcttatatgcagtggtgcagttaggtgagtggccaccaagctcttgactagctgagtctctgtctgaccaggccaagggacccccaaccctaggcagttggggatatttagacccaagtcaggggaggccagaggcctaactacttttcagtccatgggacaggtacccaaatgctttctggaaccactacccaccccaatcccagcttccttccttaagagctgaaccggccaggcagctgaccggatgcccacacccacctgagcacagcctgtagttgacccactcctaactgggtagcttctcccatccctccttgatgtccccagcaggggaaactgaagcagggcctgaggtgacaaggggctccaggcatggcaggcttttcctccctgcacagggggcaggtccttttactggagctggagcatgaaaatgggtaactaactactcaagacagtgaggtcagtgggacagagggtgggtctctccatggtccacaaggtcacaggactgaggccttgccctccctcatggtcaccctctcctaccttcttgggtctcctcaggcatggcaagcagtgggcagtcgggggccaatgatggcatccagtagcaggactggacaaatgcagcagtggctcctttgtgagcccagggaaggcctggctgcctcccagccttggcctaaaataggcctgagctcagcccactgggctatatttagagggggcagccctcagccatgggaaggggcagagtgatccacgtgggccagcctgaactatctacctggtgagggagccagccaggagcctgcctccactagtccaggtgcccagggaccttcaaggggaagcacacctcccccatacatccagaatggccactccaggctcagcaaggccccatgtggcagccaagacagacaaaggaagcctgtgcatctctatttggccacccctctacccctgcagactcctacccacagcccagtcatctctcctcccagcaaacacagcagcctccactgcatgacctgctagcacacaatgctattgttgtgtgtgtcttatagagggtgatggacaactgaatcccaatgccatgagggctctgatagcttcacaagtgggcagatacaccaacagcacccatgctggccagtgggtggacctaggttggaggctggttcatttgttactaagcttgcaaccttaggtaaagggtctcccctctctgaactcagtttgctcatgtgtaaagtcggaataacagtggctcctccctggcagtgtacactgagaacaacatctggagcatttagcacaatccacggttttggtcttcccctgctcccatctccacaagggcagacaggtcccataaggttgtgtaaggatgcgcatcactgcttaccttgaaaggaggaggtggtccagcttccagctttccctctgtggttggatccctgtgcccttccttcccagtgggggcaaagcaagactgtgggctctacttcctacacacctcaaacctgtcactccgttgtctcacactggcctccctgatgttcctcaaagtcaacaagcttgttaccacctcaggggcttggtggtggctgttccctcctggaatgctctgctcccagatagccctgtggccagccccgtcttgtcagcgaactcaaatgccaccccttcagtgaggccttctgtgtacattcttttccacatcacccagttttcttttctttgagacagagtctcgctctgttgcccaggctggagtgcagtggggcgatctcggctcactgcaacctctgcctccctggttcaagcaattatcttacctcagcctcctgagtagctgggattaaaggcgcgtgccatcacacccacctaagttttgtatttttagtagagacagggtttcaccatgttggtcaggctggtcttgaactcctgacttcatgatccgactgcttcggcctcccaaaatgctgggattacaggcgtgagccactgcgcccggtccagttttattttcttcctagcacttagtcctgaagttatattatgcacaatgtaccctgcgtgtcactattcccaaaggccctacagaacctgttcagtcacgcggaaccacctttttttttttttttttttttttttttggagtctcgctctgtcgcccaggctggagtgcagcggcgagatctaggctcattgcaacctccacctcccaggttcaagcaattctcctgcctcagcctcctgagtagctaggattacaggcgcccgccaccacgcccgactaattttttgtatttttagtacagacggggtttcaccgtgttagccgggatggtttccatctcctgacctcgtgatccgtccgcctgggcctccgaaagtgttgggattacaggcgtgagccaccgcgcctggccggaaccacctttaatcctcaccaggcaaccttggacaggagaaactcgggccctgacaccgctagtaaggtgcccaagaccacatagcaaggccgaggactggggttttctgctggggccattccagctttggctgataatgcgtttattgcgttactttagtacagtcggcctgcctcgccccacctccagcagcccagcctgttcacagctttctgctcactgctcactacccaaggaggtggggtctgtctcccagggtgggcactccaggcacctcctcggccctggtcgttgctctggagctcggcttccccgtcccttccctccggctgaatcctgcgcccgacctgtgccgccctcccggggctgctacattcaagggttatcctgttaataaataagcccgcgcagctgccctcagccagggcctgtcggttggtgtctccatcggccggtgacccccaatgtgcccggccccaacccgtccttcttttcagggtctgtctggctcctctctcgcctgtcgtctcctgcttggttcccggcgtggggacagtctggtcaccagtgcgttgcgctgcgcggcccccgctcagcgcgaggctcaggggcgtgggtcctccggttacggccctttctccgcgactccaggggcagtgactgcagcgcaggctgcgggcggcacatgcgcagggagttcgcgctgccacctccgcccggctccaccagctgcagaaagtcccggtaccagagtttggggcccggcggcgcggcgggcgcagcctcctcggcccgcgccagtcgttcggcctgcgtagcactcaacacgtgcagcgacaggcgacgcagcggttgcgtaaagccctgctcgacggcggcgcacaagtacacgcccgagtcccggcgccgcagcctgcgcagcagtagtccccgggcggtgcgctcggtgcgctcctctgccagcacctgcgggcagagggcagcgtgaggcgggggtgtcgggccgggaacagggcttccgggccctagcacgcgacggaagaagcaaagagtcattgggagccgaggtggagcgggaaaggggtgcccgcaggcgcacattttaaggctgagtgtttgggagctggtggtcttcaagggagaatccgaaagaggcggggtttacatgaacttggtggggggtggtcagggaccttaatgggagggtcgagggcgggtcttctccttgattcaggggaggcgggtcgggagccccgttggacgcaatggggcctcagcagcttgtggagtgcaggtgagggaccaaactggacagggcggggagtgggtctggttggacggggcttcgttgggtagggcggggcctctcctggatgcagggggtgggacaggagcctggcggggagggcggagtaaggctcacctgggtgtgggctgtcacccctgcgcgctggaaagtccactccacgcgcgcctgcagcgagcggggctcacactccagaaaggcgctgctgccctccacgccgaacaccttgtgttccagcagcgcgggacgagacgagtcttggggcgagaagaaagtcagatttaggcaaggcagggcaggtggggcgtcttctggggctgagggtaggggcagctggggcactcacctccggagcacaacgtgctggggtcgccattccttacgtcttgccgccggaaccgcctgtggggaacatccgatcttctgtgagcccttctttcagccccgggcagtgaaagacccttcgcctccctcccggcggcccaaccccgaccccgcccacctcttggcactgggctggaagcgcgtgcacgcgaccccgtcccaggcgcagtaggggtcacgcgccagacagcattcggtgcagacgcggccgtgggcagcgcagcggtgcaacgcgatctgggccaccgcgctccgcgaggctacgtacagctggtgctagggggcacgaggggctctgggctgaccgagggcgaccccacgcctgcctcccatcggtcagggatcccttcttccactcgacagatgggaacactgaggtcttacgcctcaggtcacacagtctaacaaagccagagcctgtactcaaacccgggactgcaaactaccaaaaggggccagaggcttgggacgcgccaggcacaagctcagtccatcccaccccgacccccatcctggtcactcaccctcttggaagaaatttgcatgctggtgacagcggccgagtcctgagagggaggaggggcgacggggtcagggcttagtggggtgggggggtcccgggcgactgggggtgaggcctcacctcaaacacgtgcagctcctccaggagcagcccctctgcgctgggcctactgcccttggggaccgagatcaccttcagcaccgtgccaacgtctgcagggatgagaaggggtaatgaccattggtgctcccggacagctggggctagtgtctcctcgcctttgaggcgtctaccctcagcatgtttgggttgtgaagagtgtggactggaagagtgtgggttgggcagcatccacagggtggagacacagcccaggaaaggatgtggagatgggactgaacagggagagcttccatcagcagcccacagggcctggctgggagcctgggggtcgctgtggagggaccctgacctgtgccaatgaagaggacgtcatagtgtccgtcagcggctgcaacccggtccgcggcaatttgagtgaaggtgtaattggctccaacttgtaggaaaagagggcgccccccagtgggcaggacagagttgtacatgagggggtggttccgcgcaaactggatgacatcgtctgggaagtccttggtggaactgaaggtgccaaaggtcttgctggggcactgggggtgggggaaagggaggcacagcagggatatagatatgggggcttgataggcagccctccatgcccagcctctgggaacatggagggggatggggacagaaccctgccctgagaattagagaggagatcagccttgccctaggaagtcagaggcgggaaacaagccttgtcttatgatggaaacgttttcccacccataactaaaggaagaaaccacattcaccaagaagaccccaggccaagttctcaaacccttgaggctttgaagtgggttgtagcagaagtccctgggctacgaaccatgcctggccgcgggtaggggacgcgaccctggtatgacacccactggtgcatgggcccctccttgtgtgcaaagggtcccaagaaggcccggcgcacgtcgttcatgctgtacacgcacaccgcagagccctggaagatgctgctggaggcgaagaccagggcgaggtgaggggccgggtggagcccagcggcccgccccgggcgctccctacctcctgcccctcacctggacgtggagaagacggcatagagcagcggggtccggtggtcccgcgaggacaacagaaacacatcctctgcggggaaggggcctagctggggtagggcgcacagccccgctgcggcgggggctcccggagtctgcgccgctgcccccctccccaaccccatacccactcccgcactcacggagctgatcgaagtgggtgtcgccctcgacgccgggcaccgagcacaccagccgcgccttcaggaacgtcgtccacttgttgaccaggctgcgctggccgcccacgtcgttctgccgggacgatcaaaggggatgagggcgagaccagggcaggcaaaggggtaggggcagggtcgccgggtgtggcccagggactcctcacccggcagatctggccaacgcgggacacggacaggcgtcccagtgccggcgccgcctctaccgccgtctcacgaaagaagaagtagattttgtcgtcgtctgggttctcgctctccgggatccaaaataccttgacaaacttgggctctgaccgcggcaggaggcatgggtcagcgggtcctggccttgcctcctgatgcgagacccacgcgctgcttccccttcccgtagtgcgggcacagcacccgggatcacagtgtctgaccacccaacctctagcaccatgtccagttggcgctctgcgcggaccgaatccaaaggatcagggcctgcgaggcaagaagcagccgcgagggggcagcagagaccgtggctacctgggggcgcaggcgtgaagcccggctagcctccgatctcgccccacacgtcgcccagcaccttaggctggggtaggagggagatgaggtaatctggtttcaccttcactcatgaatcttcctctctagcataaccagatgctccccactcctgcttcaaatccttctgctgggtcccattgctctttattattattattattattattatttgtttatttatttattttttgagacagtctcgctctgtcgcccaggctggagtgctcgatctcggctcactgcaacctcagcctcccaagtagctgagattacagtcagagcctaccaccacacctggcttttttttttttttttgagacgaagtctcgctctattgcccaggctggaatgcagtggcacagtctccattcactgcaacctccgcctcctaggttcaagcgattctcctgcctcagcctcctgagtagctgggattacagatgcacaccatcatgccggactaatttttgtatatttagtagagacggggttacaccatgttggccaggctggtctcaaatgcctgaactcaggtgatccgcccgcctcagcctcccaaagtgctgggattacaggtgcacaccactgcacccggccaatttttgtattttttagtagagacagggtttcaccatgttggccaggctagtctcaaactcctggcctcaagcgatttgcctgcctccgcctcccaaagtgctgagattacaggtgtgagccactgtgcccaccagcccatagcccttatttaatttttatttgatttagagacagggtctgctctgtcctgcagtggcagcatcatggctcactgcagcctccaactcctgggctcaagtgatccttccatctcagcctcctgactagccaggactacaggtgtgtgcatgccactgcccccagctaattttattttattttttgtcttgctttgtagcccaggctggtatgaaactcctgtcttcaagcaatctgtctgcctcagcctcccaaagtgctgggattacaggtgcaagccattgtgcccagcccccatgactcttagaataaatgactctggcccctgacagtccaggcccccttttcattgctagctctgcaagtctattcctttgcttgttcttgcatccaggcctttgcactagttgctccctctgcctggaatgctccctctgcctggaatgctcatccctaaattttgctggctagctgtcttgtgcttgggaattagctcatactcccctcagcacagcggcttcctttacccaaccccctccagccacccagtctccttttcccttcctcccttgtctctctctggcctcaaggccattggacttgatcttatcatgtatgtgatctgtgaactcaaagaggtcacggtcatacctgtcttgtctgtctctgtgacgccagtgcctgattaaggagggtatttggtaagacctggccacacccactgctcacttactttatgggccttgcttggcacctgccctgtgggagggtgacgacctctacccaccaaccccaccagcctctcaccattgagccagcgggagtcgtgtggctctgttcggagacttggacgttgccctaggctgcgaaagatggtaaagtctcgtcccatgaggtctgctgccacccctgagtatagctcctcccctgcagacagagcaagggccactcaggcaaatggagggctcttggggcaggagggcctggggagctctgggagtgagtgaggttatgggggattccctggagctcttgggggtcttgggactttgtgaggttctagagtttctaaggggttctcttggggccttagcccttggactcacccaccagcacggaggcagcccgatgcctggggtcataaggactcttccccttgccatcctctatccttcctgggtccagccggaggacgggctcctgggaggtgtggcaagttgtgactaccaggcccttcttaccctcctgacctccctccctgcctagatccggccttacctctgcccggtggcccacttccacaaaggcacaggttgggtggaaggctcccgtgccacaggccagcaaatgggtgcggttgtaggcatgcagcaacttcacgaagttcatgcactcagtctagtagggttggaggtgtgaggcttcccccagggacgtagccttaagaggtcccagctcaccagtggcatcctcacccctccctctcttcggcatcagcccaggcaagtactaacatgggctacagggacctgggggcccttgctgaccagcccaggcctcacgagggtgggtgtctggggaagcacaggcctgcaaagcctcccatgactcagaggcaccccagaagaattacacgagcccccaccctgactcaccacccccagacctcagccacctcgacctccctgccctcatcccagccagaacaggcaggcctctgttttagccctgccctgtctctggggtgaggggctgaccctccccactcccggcccgggcagctggcactcacaccaatgtccttccctgcccagttgcactcctctcgccattccacaggggccggccaggccagctatcgggaggttgggggagaggggacacaggtcaggaacttgggatattctctacctcagggagccattcctctgggtctctccaggctggagtggggtcccagggctccttccctggggagtgctggggttgggagtccctggcaccttcttggcccgcttgctgatgttgtccaggttgagggaggccacatggttctcggcacccacaaacaggcgtccacgctcctcatccaccagcaaggcctggtagcagcaggttcgctccaggctgaaagtctggagaccatgccaggcctggagctctgcagggcaggacactgctgatgactcgccagccatgctggaagcctcccccaggtcctgcctggtggtgactctatcggccaaggttgccattaggacctggcctgtacacatgtgagtttacatgtgtgtgagtttacacacgcaaacccaagcccacccaggtgcacgtgtggagctgccagggtaggtggtacatccccccaggaagaggaaggcaggttgaacttgggcatgctcagacaggtggtgtctccaggcgggcgcactgggaggcaaggcttatggacaccagagtcctgggggagactggcatgcagggatggccagaaccccaactcccaaaagtcaggctgagagttcctttcctgccactccaccaccagcctgagctcagcagaactgcctattcactgccactgcccaggggccaccctcctatacaggaggcatgagaagggggctctgacttccctgttgctctgctgaaggagtatcgccttgttgggggtactgaacggaacagagacaaggtctgttgctgtggggacaggaggggtcttcctgagaaagcacgaagagaatgtgggcagaggctgggggctgaggcccggacagggttaactggaggtggcctgagagtgcccactaatcctaccagagtctggtgacaggcacgcacatggggcaacagccaacacagagccccctggccatacggggaccctttcctgcccacctcaagctgggccctcccgcctgccaggtgcacctaccttggaaggagagccgaaggcgtgggggctgggggcggcactccccagccccactgcccagagcagggccaggcccgggatcacggcggcagccccggcccgccccatctcagcagctcagggtgctcagggttcagcgggtgtgtgtgtggaggagccttgagctgccctggactctgccccaggatctggaagaggagtcagcagtgagggcgagggcgggaggctagggggggagtccccagggatcagattacagcccctaggggaaagaggctggggggtcgcattccacttccgaaccctcccctccgagggtgccccgcctggccacaatcacagacacacccacgccactgggcacaccctcagggtcaccctgcactggcaagcccgcctcaccacgtcacccttcccagtaatctcctctcttgtatacacactcacagacattaattcacaatgtgccacccacttcatgccagcctagacctgggaggagggatactgggagacatagacaaggtccccatgtgaaaggggacagagtgccaacaaggaatcagatggatgcagagggtgccaagtgcaatgagcaaaacaagccagtcaaaagagtgagagtgacaggagggggtcaggcctctggaggtggcagtgtccccacagtcccgcagaaaaacacagagacacttttgaggctggagccaagggtgtgggtgcctgtgaatgtgtttccgagtgtccccttgtgatgtgcgcatgtgtgtagtgtgtatgtgcatgtgtgtgcacatctatgtgcaaatatatagtgtgtcatattgcacatgtgtggatatgggttggtgtgcacacacatgtggcactgtgcaatccatgcagtacatatgtgtgatatgtgcatattttgcacacagatgtgttgcacatttgtgcatgtgcaaacgtgtgcacccataagaatagacatgtctctgggcatgcaagtgagcaaatccaactgcagcatcaatcactccattcctcagagggagaagtgctacccaggagacccaagacctgggcagaagcctcagcctctgacttggggactgctcccaacccagctgaagcagcctctgcatttgagcttgagggctctctctccacacccctgaggaatcaaagaggggcaaggtgaggcagcccttcatttgcaccccagcctcctggcctcgctgagctggccttccctctcaacgcctccacagcctctctgagcctctcccttcacttctctcaccccttgagttcttccccatctttgagccccttcactctaggagccagacacctccccctggccctcagctggggcaaagacctggctgctatgcccaccctccttcccaggggtcagctgggcaggtgctggacacaggagcccagggagtgggacaaggttccaggtgggattaagcaagtggagcagctgctgaggcaggttccaggcccctccacccacactcctgcccagctcctggccccatcccaggccaggacccccacctccctccttccctccgctgacacttgccgctgcctcttctcaggttctagaggtcttccaggccaacactggctgccttctcacactccaccgaggacttccgcagcagcatctctccactctggccccttcccaccctggggccgctggggaccctctgacggctcctttaagaagcagcccccgcccccaccaggccagccaccgccccacgcaccgcccgccgtgccgtaaagtttagagggcggatcgggtgaccgggcaggcagccgggaccagctggagacggcagccaggcgggagtggaatgggcacaagggaggggctggtagggacgacccctcccatattgggccttaaagcagaagggtgccccaggtggcggtcccagaagccaggtggccagccaaggcaagggaggaagaaaccccagctccaggggctcagcaggcaaagggaatcactgagtgggggcaccacccgtggactccaatatctcaacctctccctccacaggtggggagctgtggggaaagataatggggagctcagctgccacctcagttcccagggaccggctggggtggccgggcagctggaggtcaggggaggggctctcaactggaggtcggatgggccctcaggacccagtccccatccttcctcaacacttgggccacttagtacttcagtggcctggccagcagtggcttctaccatgacagccagataggggagggagaggagggcaggagaggggcagacgcaggaggagcagcaaatctcacttctgcaccacagggcggggcccatctggagtccgccatcctggacaggtagctttgcatctctgctgagaggttggggggcagaccatgtgacctcccttcctctggcttctctttctaggttggaggtgggaggaacaacccccaccaaacccagagccgaaaactgagggagttttacagacaggacggagctcctgcacctcggagcctcagttgggaatgacctggggtcttgtcctgaagctgagtctggtgaacgtgccccatttgtaacatgaggggtacttctctggagggactgtatgttgacagtggcagagtggagccctgaagtccacctgagtgaatataccagggcttgagaatgggctttgatccttccatccccgcaaaaggcattttcctaccacctcccaaggctgatggggcagtgtgggcatttcaagtgttgcagttctgttgcccagccctggatgcctccagccaagcaaggacagaggtggggggcacatctccaagtcccctggaagtggaagtggggctatgcccctccttcctgagcctgaggacctggtatacctggcctggcctggccagctggcaggtaaataacaggggccagtgggagccgcagggcccttcaggagggcaagtggaaggacagatccctgcctgggctcgtgggcttcctggatgtggccttttcctactccaggagtagctgcctctagccttagaggacctgggcaggctctcctggctccatgcaagcagacaacattctttggctgtttacagctttccacccaagcagccaggatcagcaagtgcctcagaggctcccatccactcccactgtgcccccataggccctcactgccttatgtttttccaggcccaggggccctgtctctgtttcatcaccccgcaccttcctccacctgtgttcactctgggaaacggtatcagaaacccccccgccaccgccattatctttccaatagcctgggagtcaacccccagccaaaaggactagactgtctctgtccccattgagtgctgtgccctgtcctctgtcctctagatgtgtaccctcccttgagtaggaatggaggtctccagggatgggaggtcaagttgtccctgattccacatggtcccctttctgttcctcagccccaggtccagtgtgccaggccatgggtaggggcccccatggaggtcagcactccaggagcaaggtcactgcctgtgggtcacactgggggctggaactcctcgaggattctggaatcaggcagcctgagcctgagtctcaacagaatggggcaaaccaggcaaggcagctggggtcccttttcctgcctgtactcctaccctggacctctctcttttgagggagcttccatgggcagagacctgcctgggtccttgctctggggctgcctgtcagtggcatggcctaccacggccttggcttttccttctggaaaaacctggattgttgtgccaaatctcagcacctgcctccccacccctggccaccagctgggcctgcccctttgcccctgcctggactccgggtggtgtggttggggtgggacacccatctgaggaaggttgtggcaaccctcccagtgcagcctggactggatgggatcttgggcgccccactcacacctgctttagtcatcagggcttgtggctccaacgtcacaactcttccttgttctggccacgtaggtaccaggtcatgctgcccagaggacttaggcacagtgggggcaggcgtgggcggccataggatc

SEQ ID NO: 1462 - DNA, 1108 bp, Homo sapiens
  Genbank Accession No. U75744
ggcagagcaggggtagacttagcatgtaagggagggtcagttggtcctgcaacaggtaggacatccctcgggtacaatggagcagcaccaggatgtcacgggagctggccccactgctgcttctcctcctctccatccacagcgccctggccatgaggatctgctccttcaacgtcaggtcctttggggaaagcaagcaggaagacaagaatgccatggatgtcattgtgaaggtcatcaaacgctgtgacatcatactcgtgatggaaatcaaggacagcaacaacaggatctgccccatactgatggagaagctgaacagaaattcaaggagaggcataacgtacaactatgtgattagctctcggcttggaagaaaaacatataaagaacaatatgcctttctctacaaggaaaagctggtgtctgtgaagaggagttatcactaccatgactatcaggatggagacgcagatgtgttttccagggagccctttgtggtctggttccaatctccccacactgctgtcaaagacttcgtgattatccccctgcacaccaccccagagacatccgttaaggagatcgatgagttggttgaggtctacacggacgtgaaacaccgctggaaggcggagaatttcattttcatgggtgacttcaatgccggctgcagctacgtccccaagaaggcctggaagaacatccgcttgaggactgaccccaggtttgtttggctgatcggggaccaagaggacaccacggtgaagaagagcaccaactgtgcatatgacaggattgtgcttagaggacaagaaatcgtcagttctgttgttcccaagtcaaacagtgtttttgacttccagaaagcttacaagctgactgaagaggaggccctggatgtcagcgaccactttccagttgaatttaaactacagtcttcaagggccttcaccaacagcaaaaaatctgtcactctaaggaagaaaacaaagagcaaacgctcctagacccaagggtctcatcttattaaccatttcttgcctctaaataaaatgtctctaacagatatgaactgctccctgtacttaggaaaaaaaaaaaaaaa

SEQ ID NO: 1463 - DNA, 4000 bp, Homo sapiens
  Genbank Accession No. U78190
tgttcaagaagcgggcgcgggggcaacacgcgcgcggggacgcagtaagatcacaggctgcaaagaaaacagcactaagcgtcctggaggacgctggagcttcaggatagtgtccttccaggtcgtgggaccgccccctcctccccgcactccaccttcccgcaactggatcactcggcggaagcctcaggtgggccccggggtccaagtccgccgccgggagggcgggggcgggccccgaaccgccgactgcagggcgcgtcacggcagccgctcctgattggcggccacggcggtcacgggcaaggtgccccgggattgacgccgcctgtggccagagccggagtaacgggactcccagctgcgcgtcgcagtcccgacgcgagaagggctggagtcggcgtccagcctagagcccccggtgggagccaggccgggacgcgtgcaccatgccctacctgctcatcagcacccagatccgcatggtgagtaccggccgcctggcgacttggagccgggaccaggccctagggggctgcgactgcaccttcatgcctccctcctgggctgcacccaccggggactggaccgggaacccgcccagacacgcccccttggccggggagagggagtggagaagcgggctcagctcggcttccgggactcagcgagctctggccggcctgaagcctttattgccgcgaaggggcccgggtacgtgcgtcccggcaacagggcgacctccgggcgcttccggctcctgtcctacctgtcggcgggagagacccagggagccctggcctcacgcgcagcacctagtgccctgcacagagccgctccgcaggggaaaaaagggcgaataacctgagagaaagaggtttggaaaagataaggacctgccaaggcgctaaaaccccggtgccaagtccttgacccataaacagcaactagctgcacccttaggcacttccaggaagggctatccctgaagctttagggaaggaagaaaagaaagaacaccctgcttggaaaaaaggaaggcgagaaggggctgtgcagttagaggtgggaacaccatgagttagaagtcacgttcctttctctgggcgcagtttccttatctgtaaaaaggttctgattgcccctcaggagtccccttttagcttcagaaagacatgacgggcagcaaggtgctctctgcccttgctcactgcccagtgctggggtgaaccagcaaagggtacacaacccccttggtgggttcaccacgcaacagagagctcttgcagagccctgggcagcggtttgtgaagcagccatctgctcagctgccaaaatgtggattcctgggtcccttcccagacctcctaaaactctgtctggggcttgggaacccatacttggaaatggccccccaaagtgattcttatttcttaaaagatatggctttattgatatgtaatgtgcataccataaattctttgatttaaagtgtacaattcagtgttgttgtttctttagtgtactcagagttgtgcaaccatcaccataatcagttttagaacatttctaataccccaaaaggaaaccctgtacccactggcagacactcttgatttcccccaagtccctcagccctagataaccactaattacctttctgtggtaatgtgatctgagtctggcttctttcatttacatgtttattttgttttgtttttttgaaatggagtctcactctgtcacccaggctggagtgcagtggtgcaatcatggctcactgcagcctcaaactcctcccacctcaagcgatcctcccacctcagcctcagtagctggaactataggctcgtgatactttgcctggctaaagctgagctttaaggcactagggagggcgcctacattgctcctcctgatcattgatgggctccaccccttcacagcttgtgctcagcccctaagaatccttgctactctctgtagcctttacctgaaccttactcagggctagcaggcaggggaggaaggacaggcaagaccttccacctcctcctggcagccagccaagcagccactgtggcttaccttgcaggaggtgggccccactatggtgggcgatgaacagtcggatccagagctgatgcagcatctgggggcttcaaagagaagagccttgggaaacaacttgtaagtagcagcctccctcagtatcctctccctgccagcccctagacctgcctctgctccctttatacaacctccaagcccagggacagggcccagcatcagagccccctgcctgcatcctggggctctgttctccggaggagttggtcccatctgtagcctctccaacatcccccctctcccccacgaggcttgctctgaaagctttccacatccttactggaaccgcagaaacagagtccgttccctgggtctaggactccactagcagactgttccttgccctgccctctcctaagctggaccccatcaaggacagacaggcacagagagaaaggtttttgtcgtgaggatctgcatgagtcgcaaagctaagccctagaagcagggagcagggagcctgcgtcctacctccagggtggctgctgcctggggacctagccatttcccttggcattcttcctaatgcctccatgtctaaactgtgactactgcttccattcctcctctcacccctggaggcagggagaacccaagctacacaggctctctgaaaagagttgtcagagtgagtgccagttcaaatcggggaaagaggagggctgatcccagcccctgggtcaaggctcggggacagaagccagccccctccctttgccatgaggcacttgcctctccatgcccagcttggggcttgagccctttgtctgcttcatggtctttcagcatcaattaaacctgacagaaggactaccagcactctccatgctagggagtggcgcacagagccaggagctactggggctcagccttgttgctacagaactgcaggacagccagggcagtgaggggcctggaggcttatttttttttgaaatggagtctctgtcgcccaggctggagtgcggtggtgcaatcatggctcactgcagcctcagcctcctcctacctggaagcctgggtggggagcaagcccagggagggcggcagcagggctgtggtcagactaacatggtctaccatctgggacgctggggaacctgattaacccctctgttttctcatctatcaatggccacaacagtggcaccttcactagcttgttgggaagaataaatgagatagctcgtgaagtacctagaaggggaggaggcagggggcgtgcacttaccccagcgcccagcaagcagccagcaagtgtgagtcactacaagagtggccaggctgcctgctgcagacactagctttgtaccaggagcttgctgtgtgcccctcctcaccccccccatcctgtctctttgcagttatgaatactacgtcgatgaccctccccgcatagtcctggacaagctggaacgcaggggcttccgtgtgctgagcatgacgggggtgggccagacgctggtgtggtgtctgcacaaggagtgaccttctcatgctgatttgcagacggggcacccctgtggaggggctgctgtgggccctgacctccaagctcctgcctcaccgtctgccttgctcctctcttcccaaatcatcaccgccatgggcccagccccaaagggcagtgaatggccttctctgaaaccctgcgtcaagcagtgggagagggcagtgcccggtgccctggtgctcccagctgccctcctgcttcgggcctgggccgagggccttgtgtaggccatgttcctcgggcagctgccccgggccggagctgggcactccagcggccctggcgcgtggctcctgcatagctagcccaagccaataaagggctgtgatgagtggctgcgcctgtgctctgcttgtg

SEQ ID NO: 1464 - DNA, 3327 bp, Homo sapiens
  Genbank Accession No. U78556
cacacctttccaaggacccccaaactctgctccgtgcacgtcaaatgctcctttcccttgtgtccaaccccctacccctctccctaacacccctcttctcaacaagactcagcctctccccgaggtgggtgagcatccttgaggtttcccacccttaactgctgtgtccccggatggagccagagaaatgtggtgggggggccggggcagagtttcaacattgccccccagaaggaggagccagagatggggtctgtccaggaaaacaggatgccggagcccaggagtcgtcagcctagcagttgcctggcctccagatgcctcccaggggagcagatcctagcatgggccccaggggtgaggaagggcctggaaccagaattgtctggaaccctgatctgtaccaactttagggtcaccttccagccctgtggatggcagtggaatcaggacactcccttgaacagtgaatacgattttgccctggtcaacattggacgattagaggctgtgagcggcttgtcccgagtccagctcctccgtccagggtccctgcataaatttatccctgaggagattctgattcatggccgagacttccggctgctcagagttggttttgaggctggaggcctagagcctcaggcttttcaggtgaccatggccattgtccaagccagagctcagagcaatcaagcccaacagtattcggggataaccctgagcaaggctggccagggttctggctccagaaaaccaccaattcctctcatggagacagcggaagactgggagactgagcggaagaagcaggcagccagaggctggagggtcagcacggtcaacgagaggttcgacgtagccaccagcctcccccgttacttctgggtccctaaccgaattctggacagtgaggtcaggagagcatttggccactttcatcagggccgtggaccggtcagtgtgatggttagggtaatggctgtggattagagggtcatgtgggccagggacatcgtggagggaggaacctctgtgaggtcagtgtgggggcaagggtagcgtggagctaggcatttctcccacaatgaccctcttctgccccatgtgaagcgcttgtcctggcatcaccctgggggcagtgatcttctccgctgtggaggcttctatacagccagtgaccctaacaaggaggatatcagagcagtggagttgatgcaccaggctgggcattcagatgttgtcctggtagacactatggatgagctgcccagccttgcagatgtccaacttgcccacctgaggctgagggccctctgcctgcctgattcatctgtagctgaggataaatgctttcagccctggaaggaacacgatggctggactatgtcagggcttgtcttcgaaaggccagtgacatttcagtattagtgacatccagggttcgttctgtaatacttcaaggctccggtgtttctcctcttccttgattgtgtctggcagctcctccagcagtttccagctgattttgaattctctgagtttttccttcttgctcttcatgacagtgtcagggttcctgacacccttaccttcctgagaaataccccctgggagcgcggaaagcagagcggacaggtcagtgacttctatttttgactcgtgtttttttttccattgagatgtactctctgaagtttggtcttgatttgttttatgagaagtgaggtctgtgagtggggagggggagatttattctcattttcaggacgagacttttgccctacatctttcctagaataagaggtgagaatctcatgatttgtctctagatgtgggaggattgtgtgtaaccatcctttttcttgcttcctctgtccagttaaactcctatacacaagtctacaccccaggatactccagcctccagctgggaactcttttaacctgcagctgtctgtctgggactgggatttacgttatagcaatgcacagatactacaattccagaatcctggctatgacccagaacactgtccagattcctggctccctagaccacagccaagcttcatggttcctggaccccccagttttgtgtggctcttctctagaggagcattgacccccctgaatcagctctgtccttggcgggacagtccttccctgctggcagtctcttctcgttggctccctcgacctgctatctcctctgaaagctggctgaccaggaatggggtctcccctcacattggggagcttgccctttacctccagggctgctgctgcctgggtatctgggaccccagatcaggctctggagacgctgctacctgaggggaaggcctgaggtccaggtaagaagggaaaatagactgggagtgggacaagggacttgactctgctgaaccagatgaacaggagctggaaaggcaaggagctgaagcctctgggagtctgggaagtgaagttctactcctcttggcatcaaacaaggtttgggagtgtaggaggtgcgggaaagtgcttgtggcttagattaagtggaatttagggcatagctgaaaggggaaacagaattaaagacaccagaagtagcagagaagcagggggccagagctacaacagtattcttctctgttcctctttgcctcctccccagatgggcctctcatctcccacaatctctggcctccaggatgagctatcccatcttcaggagttattacggaaaggacaccaagaatatctcctgaggatcactccaagaaaagagatccacataccattctcaatcccactgaaattgctggcattctcaaaggcagggcagagggggatctggggtagagggagggttctgtctaatcttttttttttcttttgtatctgcacttgcagcctcagctttcatacttcagcccttaagttcactaagaaggtctgagtttctgctgcagatagtggtgttaactgctccaactcttgtcttgcttagtttctacaaatatttttgcttcttgtcatttgaaggattaagaaacaaaaacaatccagaaattgatcggtttttttaggccaatcccatcccttctggataaccagatgttaaatcatgagatcagagatgctgttcatcagtcccaacaagatggcctagaaatcgcattctcacctcgccttgctgctgctttaattccaagttctatttcttcccttatagttttctatgggaatgaggcggatacaggaaacaccctatctcctctgtatttttgtagtggaatttctatttaaggggctcattaaagcatagtatttatacac

SEQ ID NO: 1465 - DNA, 1706 bp, Homo sapiens
  Genbank Accession No. U79259
cagcgagcccaacgtgatcctggacatctccaactacacaccgcagaaggtgaagcagcagacggctgtgtcggagaccttctctgagtcatcctccgacagcacccagttcaatcagccggttggtggcggggggtttcggcgtgccaacagcgaggcctcaagtagtgagggccagtcgagcctgtccagcctggagaaactgatgatggactggaacgaggcatcatctgcccccggctacaactggaaccagagtgtcctctttcagagtagctccaagccgggccgtggacggcggaagaaggtggacctgttcgaggcctcacatctgggcttcccgacatccgcctctgccgctgcctcaggctacccatccaaacggagcactgggccccggcagccgcgaggtggacggggcggtggggcctgctcagccaagaaggagcggggtggcgcagcggccaaagccaagttcatccccaagccacagccagtcaacccactgttccaggacagtcctgacctcggcctggactactatagcggggacagcagcatgtcaccactgccctcacagtcgaggccttcggcgtgggagagcgagacccctgtgacttcataggaccctactccatgaacccgtccacgccttccgatggcacctttggccaaggcttccactgcgactcgcccagcctgggtgctcccgagcttgatggcaagcatttcccaccgctggcccacccacccacggtgtttgacgccggcctgcagaaggcatactcgcccacctgctcgcctacactgggcttcaaggaagagctgcggccaccgcccacaaagctggctgcctgcgagcccctcaagcatggactccagggggccagcctgggccacgcagctgcagcccaggcccacctgagctgccgggacctgccgctgggccatccccactacgattcccccagctgcaagggcacagcctattggtaccctccaggctcagctgcccgcagcccgccctatgaaggcaaggtgggtacagggctgctggctgacttcctgggcaggacggaggccgcgtgcctcagtgcccctcacctggctagcccaccagccacgcccaaggccgacaaggagccactggaaatggcccggccccctggcccaccccgtggccctgctgcagccgctgctggctatggctgcccactccttagtgacttgaccctgtcccccgtgccgagggactcgctgctgcccctgcaggacaccgcctacaggtacccaggctttatgccccaggcgcatcctggcctgggtgggggccccaagagcggcttcctggggcccatggcggaacctcaccccgaggacacattcaccgtcacatccctgtagtgccaactgaagtgccgactggaccgcgaggttttgttcctggctttcagaaaaccaacgccaagatccctcccagcgtccacatcgtcctctggcaggagctcctgcccctctgcctcccaccctgccccctacaccccctgcagacccatctccctccaccccctcccacccatctcctccacgcagaagccgaaggtgagccctttctgcacaaaaccagcaattgtaaatactttttaaaaatgtacaaaacttaaaaacaaaacacagttttagaaaaaaaaaaaaaaaaaaaaaaa

SEQ ID NO: 1466 - DNA, 6817 bp, Homo sapiens
  Genbank Accession No. U83115
cagctccgaggggagtcggaccggagcaaacagccacccccggcttcgtcccccacgaagaggaagggcaggagccgtgccctcgaggccgtgcccgccccgcccgccagcggcccccgggctcccgccaaggagtccccacccaagagggtgcccgatcccagcccagtcaccaagggcactgcggccgagagcggggaggaggcggcgcgggccatcccccgcgagctcccggtcaagagcagctcgctgctgccggagatcaagcccgagcacaagaggggcccgctccccaaccacttcaacggccgggcagagggaggtcgaagcagagagctgggcagagcggccggagcgcctggagcttctgacgccgacggcttgaagcccaggaaccatttcggcgtgggcaggtcgacagtgaccactaaagtgaccctccctgccaagcccaaacatgtggaactaaatcttaaaacccctaagaatcttgacagtttgggaaatgagcacaatccatttagccagccagttcacaaaggcaacactgccaccaaaatctccttatttgaaaacaaacggacaaacagtagcccaagacacactgacattcgaggcccaaggaatactcctgcctctagtaaaacgtttgttgggagggcaaagctgaatttagccaaaaaagccaaagaaatggagcaacctgaaaagaaagtaatgccaaacagtccccagaatggtgtgctggttaaggaaactgctatagaaaccaaagttaccgtctcggaagaagagattctgccagcaaccagaggaatgaatggagactcttctgagaatcaagctcttggtcctcagcctaaccaagatgataaagcagatgtacaaacagatgctggctgcctttcagaaccagtggcttctgctctgattcctgtcaaggatcataagctcttagagaaggaggactcagaggctgcagacagcaaaagccttgtacttgaaaatgtaaccgatacagcacaagacatccccaccactgtggataccaaagatttacctccaacggccatgccaaagccacagcatacattttctgactcacagtcccctgctgagtcatctcctgggccttctctttcactgtctgcacccgctcctggggatgttcccaaagacacatgtgttcaatcacccataagcagtttcccatgcactgatctaaaagtgtcagaaaaccataaaggatgtgttttgcctgtgtctcgtcagaacaatgagaaaatgccacttttagaacttggaggagaaacaacccctcctttgtccacagagcgtagtccagaagctgtgggaagtgagtgtccatccagagtcctcgtccaggtcaggtccttcgtgctccccgtggagagcacccaggatgtgagctcccaggtcatcccagagagctctgaagttagagaagtgcagttgccaacttgtcacagtaatgaacctgaagtggtttccgttgcaagttgtgctcccccacaagaggaagtactgggcaatgaacactctcattgcacagcagagctcgcggcaaaatctggcccacaagtcataccgccagcatcagagaaaactctgcctattcaggctcaaagtcagggcagcagaacacccctgatggctgaatccagtcccaccaactctcccagcagcggaaatcacttagccactcctcaaaggccagatcagactgttacaaatggccaggatagccctgccagccttttgaacatttctgctggtagtgatgatagtgtatttgattcttcttctgatatggaaaaattcactgaaattataaaacagatggatagcgcagtttgtatgcccatgaaaagaaagaaggccaggatgccaaactctcctgctcctcactttgccatgcctcctattcacgaagaccatttagaaaaggtgtttgatcccaaagtgtttacctttggtttggggaagaagaaggaaagtcagccagaaatgtcaccggctttacatttgatgcagaaccttgacacaaaatccaaactgagacccaaacgtgcatctgctgaacagagcgtcctcttcaagtccctgcacaccaacactaatgggaacagtgagcctctggtgatgccggaaatcaatgacaaagagaacagggacgtcacaaatggtggcattaagagatcgagactagaaaaaagtgcacttttctcaagcttgttatcttctttaccacaagacaaaatcttttctccttctgtgacatcagtcaacactatgaccacggctttcagtacttctcagaacggttccctatctcagtcttcagtgtcacagcccacgactgagggtgccccgccctgtggtttgaacaaagaacagtcaaatcttctgcccgacaactccttaaaggtcttcaatttcaactcgtcaagtacatcacactccagtttgaaaagtccaagccacatggaaaaatacccgcaaaaagagaaaaccaaagaagatctggattcacgaagcaacctacacttgccagaaactaaattttctgaattgtcaaaactgaagaatgatgatatggaaaaggctaatcatattgaaagtgttattaaatcaaacttgccaaactgtgcaaacagtgacaccgacttcatgggtcttttcaaatcaagccggtatgacccaagcatttctttttctggaatgtcattatcagacacaatgacacttagaggaagtgtccaaaataaactcaatccccgacctggaaaggtagtgatatatagtgaacccgacgtctctgagaagtgcattgaagttttcagtgacattcaggattgcagttcttggagcctctctccagtgatactcataaaagttgttagaggatgttggattttgtatgagcaaccaaattttgaagggcactccatccccttagaagaaggagaattggaactctctggtctctggggtatagaagacattttggaaaggcacgaagaagcagagtctgataagccagtggtgattggttccatcagacatgtggttcaggattacagagttagtcacattgacttatttactgaaccagaagggttaggaatcctaagttcctactttgatgatactgaagaaatgcagggatttggtgtaatgcagaagacttgttccatgaaagtacattggggcacgtggctgatttatgaagaacctggatttcagggtgttcctttcatcctggaacctggtgaataccctgacttgtccttctgggatacagaagcagcgtacattggatccatgcggcctctgaaaatgggtggccgtaaagttgaattccctacagatccaaaggtagttgtttatgaaaagcctttctttgaaggaaaatgtgtggaactagaaacaggaatgtgtagttttgtcatggagggaggtgaaacagaagaggcgactggagacgatcatttgccgtttacgtcagtggggtctatgaaagttctaagaggcatttgggttgcatatgagaagcctggatttaccggtcatcagtatttgctagaagaaggagaatacagggactggaaagcctggggaggttacaatggagagcttcagtctttacgacctatattaggtgatttttcaaatgctcacatgataatgtacagtgaaaaaaactttggatccaaaggttccagtattgatgtattgggaattgttgctaatttaaaggagactggatatggagtgaagacacagtctattaatgtactgagtggagtatgggtagcctatgaaaatcctgacttcacaggagaacagtatatactggataaaggattttataccagttttgaggactggggaggcaaaaattataagatctcttctgttcaacctatatgtttggattctttcactggcccaaggagacgaaatcagattcacttgttttcagaaccacagtttcaaggtcacagtcaaagttttgaagaaacaacaagtcaaattgatgattcattttctaccaagtcttgcagagtttcaggaggcagctgggttgtatatgatggagaaaatttcactggtaatcaatacgtgttggaagaaggccattatccttgtctgtctgcaatgggatgcccgcctggagcaactttcaagtctcttcgttttatagatgttgaattttctgaaccaacaattattctctttgaaagagaagacttcaaaggaaaaaagattgaacttaatgcagaaactgtcaatctccgatccctgggattcaacacacaaatacgctctgttcaggttattggtggcatatgggttacttatgaatatggcagttacagagggcgacagttcctattgtcacctgcagaagtacctaattggtatgaattcagtggctgtcgccaaataggttctctacgaccttttgttcagaagcgaatttatttcagacttcgaaacaaagcaacagggttattcatgtcaaccaatggaaacttagaggatctgaagcttctgaggatacaggtcatggaggatgtcggggccgatgatcagatttggatctatcaagaaggatgtatcaaatgcaggatagcagaagactgctgcctgacgattgtgggcagcctggtaacatctggctccaagctaggcctggccctggaccagaatgctgacagccagttctggagcttgaagtccgatggcaggatttacagcaagttgaagccaaatttagttttagacattaaagggggcacacagtatgatcaaaatcacattatcctcaacactgtcagcaaagagaagtttacacaagtgtgggaagccatggtcctatatacctgaacaaagaaggaagaagaatcttctggaggtccttccagccaccttatttcttaaaaaggacaatgctgatggaagaccagactggaaagtggatcgactcctccttcattgattctaaattcaaccttaaatcatgctgccatgactcagagaacttactcatcgtttcaaaagactatcatagctttaaaccaataatttgtcctcctttcatttcttgcctttcatttttggtagctgcttaaacaggttgcctaattagcagcttttgggtgattttgtaaaatgttatatcaagatttcaagactgtgtacattttaaattatttccaaagatagtgacaggagagaactggaacaaatttaccaactttgtggacctacaaagcccttacactttaaagggtaagacaaaggcttaagtttgaaaggtagagaactgtttagcatctgagaagaaatactttattaggcctgtaattttggttcttggccttaaacactttctggaacctttaaatatgctgcatagcacaatgggaaagccttaggtattcacacatttaaggaactctaaacaaaatactattttcctttagttcatattaaaaattaatacattttaaaaatttaatgtcaaagtctggtaacatttgttagtaggatttgagttattattttttgagacaggatctcaggctggagtgcagtggcacaatcacggctcactgcagcctctacctccccaggctcaggtgatcctcccacctcagcctcccaagtagctgggactataggcacacatcaccaagcccagccaaattttgttttttttttgtagagatggggtttcatcacgttgcccaggctgatctcgaacctctgggctcaagcaattcactcgcctcggcctcccaaaatgctgggattacaggcctgagccactgcgcccagccaggatttgaattattttaactcatccatgggctgccctagaatgtcacaaatgagggttgtttaatgcctttcttatagctgctactggaacactattatgacctaatttatgagccatccttactcatctacaagtgctgaagcaatgttacatacttttttgctaaactcagattttttagcctaatttcttgtcctcctatccacctgcatccacacatggcctgcatggggctgccttccctgcagtgttctgcagccatgcttcagggtatagctgttggtggacagcctcaggtcttgggggcactatagccactaaacgaggtgtgaaaggctcaagaggatgaccagcaattaattatccccagaaagtgaaggaaaagagacctttagggatgttgctggtcaagtcttgatttgaccggagtcaaatcaatcttcaagcaatcttggaatcctcaactgcagtaagcatttcaaaatgcaaacaaactgcttaacaactgacaagacaccagcccatatgctgctcttccaacagtgggttctagctttgaacaaaagtgctaaacatttccttgaatatattcttcctctttttgtcctcatcactcaatactggtgctcttgtcacaggtagaacagcttgtttcttttccatctattcaagtgtgtttctaattctaaaatgctgatcttctctggagtctatggtaggcaattatggtcactggaatagtttgtcttgttttaaaatattattggtgcatgtacaacagcatccaacatatctgtcttgttcctagatatatagctctgattttaggccttttgtgcataccattacaatatggtggggtaagacattctacagtagcctgtgctgaactgatctcttaaataaacttgcttctggttaactaaaaaaaaaaaaaaaaaaaaa

SEQ ID NO: 1467 - DNA, 1565 bp, Homo sapiens
  Genbank Accession No. U83659
gtgtgttgcaccaggcactgctgcacaacaagatacgctcgccacagtccttctttgacaccacaccatcaggccgcatcctgaactgcttctccaaggacatctatgtcgttgatgaggttctggcccctgtcatcctcatgctgctcaattccttcttcaacgccatctccactcttgtggtcatcatggccagcacgccgctcttcactgtggtcatcctgcccctggctgtgctctacaccttagtgcagcgctgctatgcagccacatcacggcaactgaagcggctggaatcagtcagccgctcacctatctactcccacttttcggagacagtgactggtgccagtgtcatccgggcctacaaccgcagccgggattttgagatcatcagtgatactaaggtggatgccaaccagagaagctgctacccctacatcatctccaaccggtggctgagcatcggagtggagttcgtggggaactgcgtggtgctctttgctgcaatatttgccgttatcgggaggagcagcctgaacccggggctggtgggcctttctgtgtcctactccttgcaggtgacatttgctctgaactggatgatacgaatgatgtcagagttggaatctaacatcgtggctgtggagagggtcaaggagtactccaagacagagacagaggcgccctgggtggtggaaggcagccgccctcccgaaggttggcccccacgtggggaggtggagttccggaattattctgtgcgctaccggccgggcctagacctggtgctgagagacctgagtctgcatgtgcacggtggcgagaaggtggggatcgtgggccgcactggggctggcaagtcttccatgacccttgcctgttctcgcattctggaggcggcaaagggtgaaatccgcattgatggcctcaatgtggcagacatcggcttccatgacgtgcgctgtcagatgaccatcatcccgcgggaccccatcctgttctcggggaccctgcgcatgaacctggaccccttcggcagctactcagaggaggacatttggtgggctttggagctgtcccacctgcacacgtttgtgagctcccagccggcaggcctggacttccagtgctcagagggcggggagaatctcagcgtgggccagaggcagctcgtgtgcctggcccgagccctgctccgcaagagccgcatcctggttttagacgaggccacagctgccatcgacctggagactgacaacctcatccaggctaccatccgcacccagtttgatacctgcactgtcctgaccatcgcacaccggcttaacactatcatggactacaccagggtcctggtcctggacaaaggagtagtagctgagtttgattctccagccaacctcattgcagctagaggcatcttctacgggatggccagagatgctggacttgcctaaaatatattcctgagatttcctcctggcctttcctggttttcatcaggaaggaaatgacaccaaatatgtccgcagaatggacttgccggattccggccggaattc

SEQ ID NO: 1468 - DNA, 2048 bp, Homo sapiens
  Genbank Accession No. U83993
ccgcaaagtgctgggatgacaggtgtgagccaccgcccccggcccctcgcccgccttttgaaggagcctttcgtcctcaagggagaggccactccccccccgcgagttccatgccccctagagggtcatcgttcccgacggggaggtggcgccctcccccgggccccgggccccgaccgcccgtgctgcctccttccgggccatcatccgcgatgacggcgccgccagcaggccaggcggactgggcggggctccgagcggggactgggacccagaccgactaggggactgggagcgggcggcgcggccatggcgggctgctgcgccgcgctggcggccttcctgttcgagtacgacacgccgcgcatcgtgctcatccgcagccgcaaagtggggctcatgaaccgcgccgtgcaactgctcatcctggcctacgtcatcgggtgggtgtttgtgtgggaaaagggctaccaggaaactgactccgtggtcagctccgttacgaccaaggtcaagggcgtggctgtgaccaacacttctaaacttggattccggatctgggatgtggcggattatgtgataccagctcaggaggaaaactccctcttcgtcatgaccaacgtgatcctcaccatgaaccagacacagggcctgtgccccgagattccagatgcgaccactgtgtgtaaatcagatgccagctgtactgccggctctgccggcacccacagcaacggagtctcaacaggcaggtgcgtagctttcaacgggtctgtcaagacgtgtgargtggcggcctggtgcccggtggaggatgacacacacgtgccacaacctgcttttttaaaggctgcagaaaacttcactcttttggttaagaacaacatctggtatcccaaatttaatttcagcaagaggaatatccttcccaacatcaccactacttacctcaagtcgtgcatttatgatgctaaaacagatcccttctgccccatattccgtcttggcaaaatagtggagaacgcaggacacagtttccaggacatggccgtggagggaggcatcatgggcatccaggtcaactgggactgcaacctggacagagccgcctccctctgcttgcccaggtactccttccgccgcctcgatacacgggacgttgagcacaacgtatctcctggctacaatttcaggtttgccaagtactacagagacctggctggcaacgagcagcgcacgctcatcaaggcctatggcatccgcttcgacatcattgtgtttgggaaggcagggaaatttgacatcatccccactatgatcaacatcggctctggcctggcactgctaggcatggcgaccgtgctgtgtgacatcatagtcctctactgcatgaagaaaagactctactatcgggagaagaaatataaatatgtggaagattacgagcagggtcttgctagtgagctggaccagtgaggcctaccccacacctgggctctccacagccccatcaaagaacagagaggaggaggagggagaaatggccaccacatcaccccagagaaatttctggaatctgattgagtctccactccacaagcactcagggttccccagcagctcctgtgtgttgtgtgcaggatctgtttgcccactcggcccaggaggtcagcagtctgttcttggctgggtcaactctgcttttcccgcaacctggggttgtcgggggagcgctggcccgacgcagtggcactgctgtggctttcagggctggagctggctttgctcagaagcctcctgtctccagctctctccaggacaggcccagtcctctgaggcacggcggctctgttcaagcactttatgcggcaggggaggccgcctggctgcagtcactagacttgtagcaggcctgggctgcaggcttccccccgaccattccctgcagccatgcggcagagctggcatttctcctcagagaagcgctgtgctaaggtgatcgaggaccagacattaaagcgtgattttcttaaaaaaaaaaaaaaaaa

SEQ ID NO: 1469 - DNA, 2804 bp, Homo sapiens
  Genbank Accession No. U85658
tcgcagagccgccgatgcgtgtccagtgacccggacagcaaggcccgcgcgcggcgggggcggcggcagacgcctggtcaccgtgaccccgattttggatttaccgcttgggggctggggggatcctggatttaactggcgactgttttgggggacgccggacgccatgttgtggaaaataaccgataatgtcaagtacgaagaggactgcgaggatcgccacgacgggagcagcaatgggaatccgcgggtcccccacctctcctccgccgggcagcacctctacagccccgcgccacccctctcccacactggagtcgccgaatatcagccgccaccctactttccccctccctaccagcagctggcctactcccagtcggccgacccctactcgcatctgggggaagcgtacgccgccgccatcaaccccctgcaccagccggcgcccacaggcagccagcagcaggcctggcccggccgccagagccaggagggagcggggctgccctcgcaccacgggcgcccggccggcctactgccccacctctccgggctggaggcgggcgcggtgagcgcccgcagggatgcctaccgccgctccgacctgctgctgccccacgcacacgccctggatgccgcgggcctggccgagaacctggggctccacgacatgcctcaccagatggacgaggtgcagaatgtcgacgaccagcacctgttgctgcacgatcagacagtcattcgcaaaggtcccatttccatgaccaagaaccctctgaacctcccctgtcagaaggagctggtgggggccgtaatgaaccccactgaggtcttctgctcagtccctggaagattgtcgctcctcagctctacgtctaaatacaaagtgacagtggctgaagtacagaggcgactgtccccacctgaatgcttaaatgcctcgttactgggaggtgttctcagaagagccaaatcgaaaaatggaggccggtccttgcgggagaagttggacaagatcgggttgaatcttccggccgggaggcggaaagccgctcatgtgactctcctgacatccttagtagaaggtgaagctgttcatttggctagggactttgcctatgtctgtgaagccgaatttcctagtaaaccagtggcagaatatttaaccagacctcatcttggaggacgaaatgagatggcagctaggaagaacatgctattggcggcccagcaactgtgtaaagaattcacagaacttctcagccaagaccggacaccccatgggaccagcaggctcgccccagtcttggagacgaacatacagaactgcttgtctcatttcagcctgattacccacgggtttggcagccaggccatctgtgccgcggtgtctgccctgcagaactacatcaaagaagccctgattgtcatagacaaatcctacatgaaccctggagaccagagtccagctgattctaacaaaaccctggagaaaatggagaaacacaggaaataaaattggaacgaagaaaggttaggagagtagggaaggaacaggactgcaaaaatccttctccaccgcacagactgggaacccctcctggcctgggggaagagtttgttacctaccttactatttaaagagccttcactggttctgcatcacccgcccctggacttcttagttgtttctctagcgctgagctatctcctaactttggacctattatcagaaggtgacaagtactggctctttattcattaagctttttttttttgaaccccattctttccttctctgaaagtggtgctataagttttagaatcttttaaatacattccctgggccaacagacccacacacttagccattgaaatgtcaaattgatgtgccctagatcaacagatcaacaataccttttttttcagtgttaaggtaatggttggtttttgtgtccgctaaatatttaccttgaaaaaaagaaaagtgtgtatctagcttcttcagagatcaagtcctctggtaggaggcaaaggttctatctgcttagcaactagttaataagtggtatctgacacactctaaaccccgtgttcaaacgggggccttctggttttaggaaacttgtagaaacgaagcctgctgattgatttttttctcctttttttttttttttttttttaactttgaaagttaactcttcaaatgggagactctttgaaatgacatgttcccttaaggtactgaagctttatttgcatatttatttcagatgtttcgagtaaacttgaaaagggtaggcacgaagcaatttgttgctgcttgtcacccccaagtccccgtggaggttctgtattttaagaaacagtgcgttgagtgtacagattttatttatgcgtaatttaatggggtctgtaaatactggtgcacttcttacgacttttttgagacatgggatccaattttaatattaacttttaatggtgatggggtaatctataacacatcataaggttttattcatatatatacagggtattaagaattaagaggatgctgggctctgttcttggcttggaagattctatttaattgaaactctctgttcagaaagcaataactttgtctcgttcctgttgggctgaaccctaaggtgagtgtgcagtacagtgtgtgtgggtgaaatggagatttggaattgaactctctgcctgtaaatgttccccaaataattgttgtgtgtatgatacgtgtataataaaagtattcttgttagaattgaaaaaaaaaaaaaaaaaaa

SEQ ID NO: 1470 - DNA, 100267 bp, Homo sapiens
  Genbank Accession No. U89337
gatatctgagacaagtcaaggtaacagaggcagctgtttgaatagattcactggacaatctaaggcagctctccgcaccaagctgtaaaggagataagatagaaataatcactctggtaccacagtaaacaggccttgaaggtactggggccctcacagcttaatcagacttagcaagaatttttttgcctctgaccctctagttgaaacaaaattagttactgatagactttggtgaatgccatactgcatgtaggcatataacctaaacctgtataaacactaagaaaatagtaacactggccgggtgtggtggctcacacctgtaattctagcactttgggaggccgaggtgggtggatcacaaggtcaagagatcgagaccatcctggccaacatggtgaaaccctgtctctactaaaaatacaaaaattagctgggcgtggtggcacgcgtctgtagtcccagctactcgggagcctgaggcaggagaatcatttaaacccaggagtcggaggttgtggtgagccaagatcgcaccactacactctagcctggcgacagagcgagactccgtctcaaaaaaaagaaaaaaagaaaattgtaacactttgagttggtctggtggaattatctccgaccctttccctgtatccggtgacagcaacaaattcccttctttcctagtttgtctgcttctcgttattgggccacgagaaaacacagccaaacctggcttagttccaggaataagttctcaactagagtctaaactagggtttctcagtttcagggattattgacattttgggtcagatagttctttgtcatgggggtctgacctgtgcattgtcttgccaagtatctcctgtgggacatcttgaccagtggttttcaagagtgggtgatcctcccatcccacccccaggaacatttggcaatgtctagagttgtttcagttatcacaactgaggaggtgctcctagcgtctagtgagcagcggccaggcatgctgttaaactccttgcaactggaggacacaataaataattatttcacagccatagtaaagaatgaaattggccggtcgcggtggctcacgcctgttatcccaccactttgggaggccgaggtgggcagatcacctgaggtcaggagtttgagaccagcctggccaatgtggtgaaaccccgtctctactaaaaatatcaaaattagccaggcatggtagcacgtgcctgtaatcccagctactcaggaggctgaggcaggagaatcgcttgaacctgggaggcggaggttgcagtgagccaagatcatgccattgcattccagcctgagcgacaagagaaaaactccatctcaaaaaaaaaaaaaaaaaaaaaatgaaatcatgtcctttgcaacaacgtggatgaagctggaggccattatcctaagtgaactaactcaaacatagaaaaccaaatatttggctgggtgtgacagctcatgcctgtaatcccagcactttgggaggccgaggcaggtggatcactcgagctcagcagttcgagacaagcctagtctctaccaaaaacacaaaaaattagctgggcatagtggtatgtgcctgtggtcccagctacttgggaatctgaagtgggaggatcacttgaaccagggaggcagaggttgcagtgagctggagtcacaccactgcactccagcctgggttacagagtgagaccccatcacgggaaaaaaaaaaaaaaaaaaaaagtcgggcacagtggctcacgcctgtaatcccagcactttgggagacagaggcgggcagatcacctgaggtcaggagttcgagaccagcctggccaacacggcaaaaccccgtctctactaaaaacatgaaaattagcctgacatggtggcgtgagcctgtaattgcagctactcaggaggctgaggcaggagaatcacttgaacctggggcgaggaggaggttgcagtgagcagagatagcgccactgcactccagcctgggcaacagagtgaggctccatctcaaaaaaaaaaaaaaatttacctattgggtacaatgttcactatttgggtaacaggtacaccactagaagcccaatccccaccaggatgcaatgtaatcatgtaacaaccaaccaggtgtactgcttgggtttaaaattgtgggggaaaaaaaagaaaagaaagaagaaaaaaattatcctgccaggtgcagtggttcatatctgtaatcccagcactttgggaggctgaggcagatggatcacttgagttcaggagtttgagaccagcctggacaacataaggagtccccatctctacaaaaaattaaaaaattatctgggcataatggcacacacctgtggtcccagctatttgggaggatgaggtaggaggatcacttgaacctgggaagtcgaggatgcagtgagccatggtaaccccactgcactccagcctaggcaacaggctgtctcaaaaacaaaaaagaaagaaagcattccctagttccttatttactgctccttctcagtcttcactgacagctcctattccttttccagacctttaaatattagagagcctctggactctattcttggccctctcctctaccctaatccaagctcccatgattccattgtcccttcctttgtcccttaattggattttctgcttctattttttactgatgtggcctaccctctatgaagaaaccagagtgatctttaaaattaccagatgatatcatttacctgctcaaaaccctctgatgcctcctgatcacatgtgggacaaaataaaaagtccttcccatggcctatgaagcctacctggccttgtttctccccacctctctgtcttcatcccttaccactctttctcttgctcactctgctccactcactctgacctcctttctgaatttaacataaaaatccaattcctttctacctcagggcctttgcactctctttttcttttcctggacactctccctccagatacttgcatgactgctcctttatgtcatttatatctgcacaaacatcacctccacaaggaggctttccctcatcacttgattaaatatagtaccatggccaggcacagtggctcttgcttataatctcagcactttgggaggcagaggcaggaggattgcttgaggcctggagattgagaccagcccaggcaacatagtgaaacctcgtctctaaaaaaaaaaaaaaaaattagccagacatggtggcatgaacctgcagtcccagctactcatgaggctgcggtgggaggatcacttaagcccaggaggtcaaggctgcggtgagccatgaccacactactgcactccagcttgggcaacagagcaagactctataaataataataatcatcatcatcaataaatatagcaccatgcatacctgggagcactttctatcccattcccttacccctcaccctgcttcatggtgttcatagcacttgttagtgcctgacattgtattaaattttattgatttttttatcgtctgtcatcttcaattcaatgtaagttaccagagatccaaggctttttccactgccttattcccagcatgtagcacagtgcttggtacaaaggaggccctcagtaaagatttcttggctgggcgcagtggctcacgcctgtaatcccagcactttgggaggctgaggtgggcggatcgtgaggtcacaaatccgagaccagcctgaccaacatggtgaaaccctgtccctactaaaaaaaatacaaaagttagccgggcgtgggggtgcacacctgtagtcccagctactcaggaggctgaggcaggagaatcacttgaacccaggaggcgtaggttgcagtgagccgagatcacgctactgcactccagcctgggtgacagagcgagacgtcatctcaaaacagcaacaagaacaaaaaccaaccaaccaaacaaacaaaattctttgaatcactgaatgaataagtagttcatagagttgtgtgagagaaaaatagctaatatatacaagacatttagaacaatgctgagtattacggtcataatgcatggccagcgtttagtaaggtgaagctgttatcattaaacacttcactgccaaaaaggctgcctccctcctgcttgaaaaccctgactataagggaagcacagcaaaatgctttgggaccaaaaaggagggaggaacgattttgacacaaatcccagcaaaactaaaagccacagaaaccaccaaagctaaacagaaggggaaatttatttagcttttggaaagctagaatttttgtctctcatgcagataataaatggaagagaataagtgcagcatatggttccatgtggtgagtatagaacgcaggggaatgtgagagtgtaaaaacttccaaccagctcaatgcctggtgacagggcagcacaaaggagtattggaatagcctgggaaaactgagactcacagactggagaggaataatcctgggtgttaagtggctttccttacttctcctaccttgtgctgcttcttccacctgcaataaatctcttccatttctttttctttttctttttttctgttttgttttgttttgttttgttttttgagatggagtcttgcgctggcgtcatgctggagtgtagtggcgccatcttggctcactgcaacctccgccccctgggttcaagcgattctcctgcctcaacctcccaagtagctgggactacaggcacatgcgaccacgcccagataatttttgtatttttagtagagacggggtttcaccatgttagccaggatagtctcgatctcttgaccttgtgatccacccgcctcagcctcccaaagtgctgggattacaggcatgagccaccgtgcccggcagtctcttccatttctgcatatcaaatttgcggccctctttcaagtctcaactctctgaagccatccatgaggtattttcagatcaaccccagttgaaaataactcccctgccacttatcactttttcctttgcatctggagcattggctaatctgacttttcactctcattagattactggtggggattctccgtatttgtctccatatttcactggcaaattctgggtattcaataagggctactgaatgaataagaaaaaaattctacttcatccatttagagggcaagcatcatatgctctgtgtgcaggaacaagatgaaacaaccactagctggcaaactacctcaagccagctcctgaacctctccttgggttctgcctcaggttaactcttttttttttttttttttttttttttaaaagacagggtctcactctgttgcccaggctggggtacagtggtgtgatcctagctcactgcagtctcaactcctgggctcaagtaatccttccgccttagcctcctgaatagctaggactacaggtgcaccaccctgcctagctaatttttattttgtagaggcagggtctctatgttgcccaggcttcaggttaggtcttgaatgaaggcaaacaatgcccttctgggatagaacaaggagaataacagagtatggccagtttctctgagccatcttagaaggggaggacccagaaaaaaggaaggagggaagtgactccaggtaagatgtaaatatatttgcaggtaaatccccagaaacttgtcaaatatggtttccctcagtccaattttcttcacttaaaggagtggagaattgttccaaaatggagttaacattctgcaatcatagcagaattattgccctcctcccaagttcttgcattctcctagatgtctctttgacctttttttttttttttgagacggagtttcacactattgcccaggttggagtgcaatggtgtgatcctggctcactgcaacctctgcctcccaggttcaagcgattctcctgcctcagcctcccaagtagctgggattacaggcgcccgctaccacacctggctaatttttatattttattagtagagatggggttttacaatgttgaccaggctggtctcgaactcctgacctcatgtgatctgcccgccttggcctcccaaagtgctgggattacaggcgtgagccactgcacctggccctctttgaccttcttaacccaaagtctcacttttcgagaggtttctgtgtagcaagacggggtaagtatgtcccatttgcattcacacgatttctggaggtattggtgatgttggtccctgcaacaccaaaggaagagagggagcagaggacaatttgtagtgacaagaagagactggatccagtcccttggggaagaagattccttttcatctcttcctctcatgcctgctcatcttccatttcattctcaaatctttaggggaaagggagaggagagagacattgctgtttccccactttccagtccaagcatctatcccaacagataagcaaatttcacttgtcatcctctttatgtatctttctcaaatgtcttgttctctagccaggcttaaggatataatcttcctggtttgtggctctctttcgtcttgattccttgatgactgcctccaaagagctgagctctggcacaattagacttgagggagatagtgtgagtcagtcaacaagcatgtagtatctacactttgggggagagcctatactctttcttatttctttttttacaaattattattttgagacagaatttctcaaattcctttctacctcaggaaaggaaaggaaattggataaggcgactttgtcgccaggctgaagtgcagtggtgtgatctcggctcactgcaacctctgcctcccgggttcaagcgattctcctgcctcagcctcctaagtagctgagactacaggcacacacctccacaccagcctaatttttgtatttttagtaaagacggggtttcaccatgttggcccgactggtctcaaactcctgacctcgagtgatccacccaccttggcctcccaaagtgctgggatgacaggcatgagccactgcgcctggccactctttcctatttctgaatcttcacaggttgttggtcccttcctagtcctgtgtttctcaagttaagactagggggaatctacaggtccatggctatcttctctggggaactcttctaaaactttaagtttgtgcttacctcttgatgggccatatttttaaaaagagaaatattttcatacatgatgatttggattaggttttttttaggggtttcaatgcctatatttgtatttgtgtttatttatttatttattttttgagacagagtcttgctgtgtcgcccaggctggagtgcaatggtgtgatcttggctcactgcaacctccgcctcctgggttcaagcgattcttctgtctcagcctcccaagtagctgggactataggcgtgtgccaccacgccaggctaatttttgaatttttaatagagacggagtttcaccatattgaccttgtgatccgctcgcctcggcctccgtgcagtggcgcgatctcagctcactgcaacctccgcctcccaggttcaagcgattctcctgcctcagtctcctgagtagctgggactacaggcatgcgccacaccagctaatttttgtatttttagtagagacggggtttcaccatgttggccaggctggtctcaaactcctgacctaaagtgatccgcctgccttggcgccgtggctcacgcctgtaatcccaacactttgggaagccgaggtgggcagatcacttctggtcgggagtttgagaccagcctggctgacatggtgaaaccccatcttcactaaaaatacaaaaattagccaggcatggtggcaggtgcctgtcatccccgctacttgggaggctgaggcaggataatcgcttgaacctgggaggcagaggttgtaatgagccgagatctcgccagtgcactccagcctgcgtgacagagtgatactccgtctcaaaaaaaacaaaaaacaaaaaaacaaaaacaaacaaacaaaaccagggagagaattgttttgacacaagtctttggctaatgatgaaaccgtctcccttcctggctgtcctggcatggtttttatagtctgaggcacaatggtgagagcaaacttaagagggagccaaagtgaggtactcaagagagggatccttctttcctggagaactgtggtagcccaggctgtgtaggtagctggacaagcaagactgaatcacaataggtctctacatcttctattaggaggagaacctgcaacatccagtggagcaggtcacaccagttatacatgtaaaatgtaggataaactaaaggggcacagagccaggggagaagacaatgggatgagactgttctagaatctcatcccattggttcattgctgggtgtggtggctcacacctataatcccagcactttgggaggctgagatgggatgatggcttgaggccaggagtttgagaccagcctggtaaacacagcagaccccatctctctaaaaaaaaaaaaaaaaaaagaaaaacatacggtttatgaaccagcagcatctgcattaaccagcttattgaaatgcagaatcacaggccccacaacagacttcctaaatcataatctgcaacttaacaagttccctaggtgatatgtatgcacacttatgtttgaaaagcactaagatttcttgatgaaggaggacttgaaaggcaatgatggatgtgaaaggaaaggtaaagagaagcctcaggtagtcacccaagggacagggccggttggagagagagtcccgaggttttatcctggagaacaccctgtactgaatgagctctgaacataaagatagttagcataggagggcctgaagtctccagataaaaggctgctgccactatcatttaccacgacctctgccattctccactctattgtcatccgcccccagtctccattccaggacttctctacactttgactttttgtttgtttgtttgtttgtttgagacggagtcttgcgctgtcgcccaggctggagcgcagtggcacgatcttggctcaccgcaagctccgccttccgggttcatgccattctcctgcctcagcctcccgggtagctgggactataggtgcccgccaccacgcccagctaattttttgtatttttagtagagacggggtttcaccatgttgtccaggctggtctcgaacccctgacctcaagtgatccccccgccgccccgccccctcccccccgccccgcccccccccgccgcctcggcctcccaaattgctgggattacaggcgtgcgcgatgcccggctttttatttatttatttatttatttttgaggcgggaatcttgctctgtcgccaggctggattgcagtggcaccatctcggctcactgcaacctccgactccctggttcaagcgattctcccacctcagcctcccaagtagctgggattacaggcacacgccaccatgcccagctaactttttgtatttttagtagagacgagatttcaccatgttgccaggatggtctcgatcacctgacctcgtgatccgcccacctcagcctcccagagtctcagttgccaaagctggagtgcaatggcgcgatctcggctcactgcaacctccgcttcccaggtaagccattctcctgcctcagcctcctgggtagctgggatataggcgcccgccatcacgccgagctatttttgcatttttagtagagacggggtttcaccatgttggccaggctggtcttgaactcctgacctcaacctcccaaagtgctgggattacaggcgtgagccaccgcgcccggcccaccttttcttttttttttttttttttttttgtttgagacggagtctctagtctcgctctgtcgcccaggctggagtgcaatggtgtgatctcggctcactgcaacgtctgtctcccgggttcaagcgattctcctgtttcagccttccgagtagttgggattacaggcgcgcgccaccatgacctactaatttttgtatttttagtagagacagggtctcaccatgttggcccactttgactcttgagcagcctggccagcccgaccgcgccaaattctgttcgattctgcctagttcggttgctctggcctagttcagttgctaaggcctggagcttcatggttgcggaggaaatgatgtcacgttcaataggcgggctaaccagattcctcccttctcccgattggctgccaggaatttgactagattcggagtctcgcgggctccagggttagttgtcagtatctttcccagttgttccgccccctacccccgcctcccgcaccgcgcccctctccggctgccctctccgcgtggggcaaggctccgagggcagcattcagtagccatttagctttggaaggagaggtgattcgaatggcccggctcctcctgtcaccatgccaggcactttggccgcgcaggtacttattgacccgaccgggtgtccgtagttggcgcggctaccttaaccgcagggaattgtggaatttatagttctaaattatatgtgggtggaacggggaagctggagcagatttttggaggaaagcaaaactggggactttcaggactaggggcctgggtctcagaagaatgggaaaggacgagaaaggagtctaaataagaaccctgctattagcattgtttggttttcttttcaggtgctgacctgaacctggttcatccctttctgaccaaaactgttcactcaccgtggaagggactaagcatccatatggagacgccaccagtcaatacaattggagaaaaggacacctctcagccgcaacaagagtgggaaaagaaccttcgggagaaccttgattcagttattcagattaggcagcagccccgagaccctcctaccgaaacgcttgagctggaagtaagcccagatccagccagccaaattctagagcatactcaaggagctgaaaaactggttgctgaacttgaaggagactctcataagtctcatggatcaaccagtcagatgccagaggcccttcaagcttctgatctctggtactgccccgatgggagctttgtcaagaagatcgtaatccgtggccatggcttggacaaacccaaactaggctcctgctgccgggtactggctttggggtttcctttcggatcagggccgccagagggctggacagagctaactatgggcgtagggccatggagggaggaaacttggggggagctcatagagaaatgcttggagtccatgtgtcaaggtgaggaagcagagcttcagctgcctgggcactctggacctcctgtcaggctcacactggcatccttcactcaaggccgagactcctgggagctggagactagcgagaaggaagccctggccagggaagaacgtgcaaggggcacagaactatttcgagctgggaaccctgaaggagctgcccgatgctatggacgggctcttcggctgctcctgactttacccccacctggccctccagaacgaactgtccttcatgccaatctggctgcctgtcagttgttgctagggcagcctcagttggcagcccagagctgtgaccgggtgttggagcgggagcctggccatttaaaggccttataccgaaggggggttgcccaggctgcccttgggaacctggaaaaagcaactgctgacctcaagaaggtgctggcgatagatcccaaaaaccgggcagcccaggaggaactggggaaggtggtcattcaggggaagaaccaggatgcagggctggctcagggtctgcgcaagatgtttggctgattaaaagttaaaccttaaaagagacaggaacttgtgaattgtggtctgtgctgtgagatttgggggtggggggccagagggaaggtttcagcccatatcccattctcagcttttggcttcctaggggaggtagcagtggtcacagtgcgccccttttgaggggcttatctatctccgaggacacatagaagctgtctaaactaaacttagtagtggctgggggagatggtggaccttaatactgggtactacatctcccaggcgctttatcactggagcctgtttggcgcatgcgcttggcggtatggcactgtctggaagttacttcctgctgctgtgctcccattgggcccgcctacacagtcatccgcatctgttgattcacgtgctcagcacccaggtctcttactggtcggtagagcttccgggacgcccccttttttgaaagagtcaactgattagttggtgatggggagaggcgggccttgggaaccgtctcctggttggggggtgggggggaaagatggcggagctgatgctgctcagcgagattgctgacccgacgcgtttcttcaccgacaacctgcttagcccggaggactggggtctgcagagtgaggcaccggggaggggagagggctgtggcaaactgtccctgaggcacgcgggaaagaagcgggggcctaaagaggaagtctgggcaaatacggaatccgccatctgaaggagagcggagcagggggctcgttgtgcattaagggggatacaaaagtcagggaagaactctgctccctgctggaacgtcgagttgttccggggtcggggaaggaggggctgaagcgccctggttgtatcacttttcaagtgggcgggcggtgggtctggccgagcggagccaatgagggatggggcgggggcttgtgtgcgatctgtaggctggggccaccgaacgaccccccgacgctcagcatttcttgcagacagcaccttgtattctggcctagatgaagtggccgaggagcagacgcagctcttccgttgcccggagcaggatgtcccggtattgtgtccccagcctttctctaacccttggtgggtggaaagtgagcccagaacctggacccattcacaggccataactcatctggagtcacccctactttctcatcctttctcacactcctgccctcttgtatcctcccttatttagtttgacggcagctccctggacgtggggatggatgtcagcccctctgagcccccatgggaactcctgccgatcttcccaggtaaggtagtctttgtcgttccctcagatttccagaaaccctcatcttcccactgtttcccagaaactacgtagcttcctatatcctcacgcttctacataagtgcctatcctctctccttcaatcccctatttttgtttcttctcccttgctgcggtacaggaatccccaccgacatgtccttgggtactttttggactcttcttaagctctgcttcctgataatttctaactccctttcctccagatcttcaggtgaagtctgagccatcttccccctgctcttcctcctccctcagctccgagtcatcgcgtctctccacagagccatccagcgaggtgagagagccatatccctcttactctctgtgacggggactctgcttcattcccttcacccgtgggtgacaaagaaatgatttaaatgatttgtgtgctatgagtcatgaggtgtgtgaggtgtggggggccttctccactacctttgccgtttccttaatatcttcattttccacatcccctttggttatctagcagtgaagatttttttgtttgtttgttttttgttttttgcttttttttgagatagggcctccctctgtcacccaaactacagtgtagtgacagggtcacagctcactgtagccttgacctcctgagctcaggtgatcctcctgcctcagcctcctgagtagttgggaccacagacacatgccaccatgtctggctaattttttttattgtttgtaaaaatggggtcttcctatgttgcccagagtggacttaaactcctgggctcaagtgatcctcccaccttggcatcccaaagtgcttggattacaggtataagccaccacgcctgatcttgggtctttttaatataaagagttatgtggggctgggaagaagagagttattgactgctgagaattctggaactgttcttgcccaagttgtccactctgaggccatatttgaagtcatgagacttcatcaattctcccagaaataaagtagaaagaatgaacaggttagaaagatggtcagtaccattcagaccagaatgtcaaataattgatggcttgtaagccctaaacttctaaagcttttgttctcgctcttactgtcaacatctcccttgttttttgcccttctttctgccccctgccccacaccaactctcacccaggctcttggggtaggggaggtgctccatgtgaagacagagtccttggcacccccactgtgtctcctgggagatgacccaacatcctcatttgaaaccgtccagatcaatgttatccccacctctgatgattcctcaggtaataaaacagcctgcccccaatccttggctctactacgggagaatgtgttatgtgtgtgtgtgtatgtgtgtagatggaggggaagtgcaggcagcaggacagggagaaaaaggtggggaggggaaatggcagaaaaccaggagggaaggcaggaaggagaggaaacatttcagggaaccacagcaagggcagtgctgaggagatggatattatttttctctctttttcttgttcctagtattctgtcatgccattcaacttactttttaaaaacttgtgagcagtttagggcatatgtatctgtgtgattcccctccacccaacattttattataaacatttttgttgttgttgagacagagtctcacactgtcgctcgggctgaagtgcagtggtgtggtctcagctcactgcaacctccacctcccaggttcaagtgattctcctgtctcagcctcccaagtagctgggattacaggcacccaccaccacgcccagctaattttttgtatttttagtagagatggggtttcaccatgttggccaggctggtcttgaactcctgacctcatgagtcgcctacctccgcctcccaaagtgctgagattacaggcgtgagccatcgcgcccagcccataaacatttttaaacatacagaaaggctagaacaccatatactaaactagattctacaattaacattatttgttctatttttaaagtgttcccaagtttatttactcgtagctgtgtatttagtaaatgtttattgatgtgatcatatctgaggtataataattataaaaaagaaatatttattaagcacctactccatgccagatactgagcagcatgctgggaatgcaaagatgaacaagacctgaccaccatgctgactttcaaaccctgtgatttggtaatgggagaaagacaagtaccagtcaatacaggtgtggtcattctaggatagaaatcactagaggtggggctgggtgtggtggctcatgcttgtaatcccagcactttgggaggccgaggtgggcggatcacgaggtcaggagattgagaccatcctggctaagatggtgaaaccccgtgtctactaaaaatacaaaaaattagcctgtagtcccagctacttgggaggctgaggcaggagaatggcatgaacccgggaggcggagcttgcagtgagccgagatcacgccactgcactccatcctgggcaaaagagcaagactccgtctggaaaaaaaaaaaaaatcactagagggtaccatgaaagctcataagaggggacatttcatccacattggcgctgaatctgggatgtgcccctggaagaagggtttcctgagagttttaaaggacacgtagaaattagccaggaggacagtgtgggggttgacttgtgtctgaggaccctgcatttcttcagagtggatgtaagaaggatttggggagtgatgtggaactgcaggggctacagggccaggtggggcccctgctaaggggctcttagcttttatcctgtggataggtgggggcctttggagaattaagcagggaagtaatatgattaggaagatgattctagtggcaaagtagagaatgggttgcagaggggcagggccagaggcaagagaaccaaggaagaagcttatgcagttgatcaagtaagatgttcggatgtcatgaagaaagcagacttgagaaagaatgaagtggaatagatgagttgtgacctcctggacattggagagaggtaggagtcaaagaggtttgtggctaggatggctgtgggtgggtgatgttactgttcactggatggagactgcaaaagcaggggctttctggtcagggaagatgatgaattcagcgttggacatgttgattctgttgttgttgttgttatggagcttcactcttgttgcccaggctggagtgcaatagtggtgtgatcttggctcactgtaatctctgcctcctgggttcaagcgattctcctgcctcagcctcctgagtagctgggattacaggcatgctccaccacgcctggctaattttgtatttttagtagagacagggcttctttcatgttaggctggtcttgaattcccgacctcaggtgatccacccactttggctcccaaagtgctgggattacaggcgtaagccaccatgcccagttgacatgttgattgttgatttcaaagtaccttctggatctcctggcaccatctctcactggctgaactccaaccagggagcccgctgatgcagtccattcagattctccctggatctcagggagcacagcagggagggatggaaagtggatttggagggacaaacagattatatctagcagattaatacatgttataaaaaagatacacaaaataaggattgaaataccattagcaggccaggcacagtggttcacacctgtaatcccagcactttgggaggccaaggcgggcagatcacgaggtcaggagatcaagaccattcgggctaacacagtgaagcgccatctctactaaaaatacaaaaaattagccaggcatggtggcaggcacctgtagtctcagctactcgggaggctgaggcaggagaatggggtgaacccgggaggcggagcttgcagtgagccgagatcgcccactgctattagcagcaaaaggattgtaaggattgttggtggctttgcattgcatagtgttattagagtcagattctcctccatacttaggtattttttgagggcctgtactttaccctcaatggacatgagacatagttcttgcttttggagagttttgtgagggttataatacatcatggttaaatagttccctttttttttttttttttttttttttgagacagagttttgccctgtcacccaggctagagtgcattggcgtgatctccactcactgcaacctccgtttcctgggtttaagctattgtcctgcctcagcccccctaatagctaggactacaggcacgtgccaccatgtccggctatttttttgtatttttggtagagacagggttttgccatgttgttcaggctggtgtcaaactcctggcttcaagcaatccacctgcgttgggtgtcggcctcccaaagtgctgggattacaggcgtgagccaccatgcccagccatggttaaatagttctgatagtggttatctctgtgtagggaatctgagtgactggaggaccgggaagggaagttttttttttttttttttttgagacagagtctcgctctacccaggctggagtgcagtggcgcaatctcggctcactgcaagctccgccccctgggttcatgccattctcctccctcagtctcccaagttgctgggactacaggcgtccgccaccacgcctggctaatttttctatttttttagtagagacggggtttcaccgtgttagccaggatggtctcgatctcctgacctcgtgatccacctgcctcggcctcccaaagtgctgggattacaggcgtgagccaccgtgccccgccaagattttttttttgacttaattttcctttgttcgtttggatttgtatcatgactgtattatctattcaaaaatataaattgaagttttaaaaagcaatcttagtgatcatataattaagtaccaaagtgaacggtatggaccagaggtagtggtggactgttgacctgtgggctgaatctggccctcagaagggttttatttcaccgacatggggcctagcattttctttcatggagtgatcaacaagtcataaaggcagatttattggaggccatggaggctcagaggtgactgaggctttgctgtttggtgcctgggaggaaaacttgtgtgacggggcaatcaggaagcctcatttatggccagttagatttgggtgactggtgaggcatgagaatggaagggaccagcaggcagcttggaagtcagaatctggtgcaggtgagcagccagggggagatgcacacttggcggttgtcagcatggagatgcattgggcagggataaggtggaaatccagcaagataggaatttgggccatgtgaatgctggagacccccctgccacttcccctgctcaggcctattctatgtgaatagacaagttctgtgaacaagaaagagggaaacgcagaagggcaaagacagctttgaggaacatggagcagggatgagaaaaatcagaggagccactaaaggagaaagggaagcactaggcgaaaagcggggcggagagccagcaggtgagcagctctgtgactgcccctcctggatggcctgtaatctagggccagaagagttttattttcaggttcaaagagaaaggacccatttccccatcttaaccctcttttttatttttttgagatggagttttgctcttcttgcccaggctggagtgcaatggcgcgatcttggctcactgcaacctttgcctcccaggttcaagcgattctcctgcctcagcctcctgagtatctgggacacagggatgcgccaccatgcccgactaattttgtatttttagtagagacggggtttctccatgttggtcaggctggtcttgaactcctgacctcaggtgatctgcccgccttggcctcccaaagtgctgagattacaggcgtgagccaccatgcccagcctcccatcttaaccctcttaacccttcagtgtttacatgatatccagcttttgcctcatcctgcctcccacagatgtccagaccaagatagaacctgtctctccatgttcttccgtcaactctgaggcctccctgctctcagccgactcctccagccaggtgagcaccaccttccttccttcctccaggttttccagtgagttcctcctgacctagaggtatgagagctttcccttcttcagctccttctcctcgacactcttcctgactaatgtatctctggaatgccccacataggcttttataggagaggaggtcctggaagtgaagacagagtccctgtccccttcaggatgcctcctgtgggatgtcccagccccctcacttggagctgtccagatcagcatgggcccatcccttgatggctcctcaggtaatggagtctcctgacacttggaatccctagtgagaggcctttggtcctgacatttcttgttcttttctctcaccttccttcaggcaaagccctgcccacccggaagccgccactgcagcccaaacctgtagtgctaaccactgtcccaatgccatccagagctgtgcctcccagcaccacagtccttctgcagtccctcgtccagccacccccaggtactgaagaaggagaaaagggccgggcatggtggctcacgccggtaatcccagcactttgggaggctgaggcgggcgaatcacctgaggtcagaagtttaagaccagcctggccaacgtggtgaaaccttgtctctactaaaaatacaaaaattagcgtggagtggtggcaggcgcctgtaatcccagctcctcgggaggctgaggcaggagaatcacttgaacccaggaggcggaggttgcagtgagccgagatcatgccactgcactccagcctgggcgacaaagcgagactttgtctcaaaaaaaaaaaaaagaaaaaagaaaaaccaaaaaataaaaataaaaattaattaattaattaaaaaaaaaaggccaggcacagtggctcacgcctgtaatcccagcactttggcaggccaaggcaggcggatcacaaggtcaggagatcgagaccatcctgactaacacagtgaaaccccgtctctactaaaaatacaaaaaaattagccaggcgtggtggcgtgcgtctgtagttccagctgctggggaggctgaggcaggagaatggcgtgaacccgggaggcggagcttgcagtgagccgagatcgcaccactgcactccagcctggtcgacagagcaagactgcatctcaaaaaagaaaaaaaggagaaaaggaggcgggctgcattgaccctgtcagagagcttgcagccattgaggctgcccaatccttgggtgctcttgtgtgggtgtggacacaaggaccccacccagcgcacagccctctgacctctgctcacttgccccagtgtccccagttgtcctcatccagggtgctattcgagtccagcctgaagggccggctccctctctaccacggcctgagaggaagagcatcgttcccgctcctatgcctggaaactcctgcccgcctgaagtggatgtaagtgttggggaggagagaagtagggcgagtgatgggaagggaagagggaagtcttgccatagagagaactgtgggatgaggagggagtcgatacctaggagaaaaaagtgaggaaacggacccattagatcattctgagggtcagaatggactcctgtttctatatgaatatcaactccaggtagttttagggtcctttaggtttgctgtcactgcagatggagaaatggggttggtctccataaattaaaggcaaggaagtcgtactgtactatacgactacggtcatggccatagttggggagggaggctgcctcctaggggaaaatcaggtaaactgtataagcagtataacaaggttaaactttgaaccctacaaatgtgggctgacaggaagaaagagttacgaaggaaagagtttccaccagcatggagaaagttcttcccacactctaacctttcccacctctgaggagcagtagcagggaatgtttgaaagaagggccccttccctagcgtgtttgagtagagaggaaaaacctctctggctatgtaggtgggtcaggaaggcaggggaatggccatgtgagctttgggtaaatcattccttggggtttgagagcatagtctccttctgccaactcatctgtcattcttttttgaccttccgggtgcctaggcaaagctgctgaagcggcagcagcgaatgatcaagaaccgggagtcagcctgccagtcccggagaaagaagaaagagtatctgcagggactggaggctcggctgcaagcagtactggctgacaaccagcagctccgccgagagaatgctgccctccggcggcggctggaggccctgctggctgaagtaagaccagtctgtccctgggagaccaacaggaatacagcctccttggaatgattcccctttttcttgtctccttctttgtaccttagaacagcgagctcaagttagggtctggaaacaggaaggtggtctgcatcatggtcttccttctcttcattgccttcaactttggacctgtcaggtgagaccttccttgcttcactagaaccttccaggtggagcccacgttacagcctcctagctgcctgctttggcccaggccatttccttctgcttatatacaaatggttctggtgtccttggcaccgatgatgtgtctggccagccccttcctgctccattatttgtctttttttcttggagatggagccttgttctgttgcccaggctggagtgcagtggcacgatctcggctcactgcaacctctgcttcctgggttcaagtgattctcctgcctcaacctcccaagtagctgggactacaggcgcacgccaccatgcccggctaattttttgtattttttagtagagacagggtttcactgttgttgcccaggctggtctcgaactcctgagctcaggcagtctgcccacctcagcctcccaaagtgctaggattacaggcttgagccacctcgcctggcctcctgctccattatttttccagtggagagtagatgatggtgataatgctggtagaaatagtgactattaagtgcttactgagttctaggctctaggtgatgcactgtcttttttgtatgtagggaccatccttattcccatcttacagaggcagactcaggcttgtataacagattgcaactcaagcagtccatctgcagagtctttattcttacctagatacttgatacagctgaaattcttcattgtgctcagtccttctttatccacagcatcagtgagcctccttcagctcccatctctcctcggatgaacaagggggagcctcaaccccggagacacttgctggggttctcagagcaagagccagttcagggagttgaacctctccaggggtcctcccagggccctaaggagccccagcccagccccacagaccagcccagtttcaggtgaggagagagagagagggccccctctcgtttgaggatatgagttggtcttctccccgctttcagtgagggggacccaaagctttctcttgccgtcatcgccttctttgttgtgggagtgctgggcagtctccaagtgttgtctccttcctgcttcactccagcaacctgacagccttccctgggggcgccaaggagctactactaagagacctagaccagctcttcctctcctctgattgccggcacttcaaccgcactgagtccctgaggtgtgggattcattgctggggcatccagctcccccggcctcccaaggccttctgcagtcagcctggctggcctgtgtactaaagcgccagtgctccctgccctctcctcactcctgtgggtgggcaaggagggtgggaatcttggcctggcatggaggtcctgagctcctccatttccccaggcttgctgacgagttgagtggctgggtccagcgccaccagagaggccggaggaagatccctcagagggcccaggagagacaggtagggcgggtggctggttcaaggaaggccacttgaagacaagggctaaaggccttgtctggggatttctagtgggcatctcgctgtggaagtttgagggatcgtttgaaggaagtggagggttgagtgggaggtggcatcagcttccaggggctgtttgtctctttcccttttcccttcaccctctccaagtccttagatacttctccttccagaagtctcagccacggaagaagtcacctccagttaaggcagtccccatccaaccccctggacccccagaaaggtgagtgtggggtggggtgcttacttattaagtgaaattccactttcaagagctgtacccccagtagctgtcctgtgcctgtcattactgtcaccagtgggattatacctccctcctccactgggggtctcctgtctttttctctcatcctacccgcttccctggtagaaactgagcattgggcttagttcccctcaaatcctgtttccccacctgcctagggattctgtgggccagctgcaactatatcgccacccagaccgttcgcagccagcattcttggatgcaattgaccgacgggaagacacattttatgttgtctctttccgaagggtgagtttctcctgcccttccatctctgtcaccccaggttcccagcagtctgtcttcagtggggggatgtagagtagggctggggagcttgttggcatctttgcctccacccttctggcctggcccatctgttccccaggaccacctgctgctcccagccatcagccacaacaagacctcccggcccaagatgtccctggtgatgcctgccatggcccccaatggtaactctttccctgctgggtatgggggcagttccaacagggagatccagcctgggagctgagggggaagggggagaggagcagggcatccagagagctgctggacccacaggtgagaagcagcaggaagtaggtggagggaagagcaccatgcaggagacttgggagggagacaagggtgagggtccttccctggtgaaggtgcttgggtagatgactgggcagaggcggggggccgggaacctgctagactctcacttacttttttctcttgatgtcctctcctgtgtgaccccacactcaatgcccttttcttttcctaccctctccttgcccctgcaccaaactctgtccctgccatcctgtttaactcccgctatggatctgcctcctcactattgccctttctttttctctctgctcacctctacttttctgacctcctcccctcctccctgcaatccctgtttgcctccccatctcctcttccttaactctccccttctcacagagaccctgtcaggccgtggggccccgggggactatgaggagatgatgcagatcgagtgtgaggtcatggacaccagggtgattcacatcaagacctccacagtgcccccctcgctccgaaaacagccatccccaaccccaggcaatgccacaggtggccccttgccagtctctgcagccagccaggcccaccaggcctcccaccagcccctctacctcaatcatccctgacctctgccattcacactgacttagaacggggggagggggtaccaggtggccaggtgggactgtttcaaatttccctgatccccaggcttggggcaattggtaaaggaaagagcaggtgtgggggttaagcacttatttgaggtgggggtgttcacctctcttctcatcccttttcagaatatagggctcctctcattcctgtgaacccccagtcctggcttctttgtttgaggggattgtgtgaggttcagttgtggggtgggtggtgagctgctgcatattttttattttgtttctctagtgttatggcagtggaggtgggaatttagtccccaggtgggacaagggaagttttttcattttggagctagttactgggagtaagggagggtggggtgggggggagttcaggtttatgtgtgtgcatttcttttttattattattaaataaacaacttggagggagttgaaggaatggtggctgccttcctggctcgtgatggggagtttgggggaaagtggcttttccagagccagcatcaaagaatcaagcactgaagacatagctggctctgaggtggggtgggtgcgggatcacagaccgcatgtcatccccttgcccccacccctgcaactctggggtatatctgtgtctagcaacgatgtctcatggcgtgacagactagaggatacgcatccctggaatgtgagtcaacaggaaagatggggccccacgcccttcagggtgagcagcctctgggtctcctgctctcgagcaggttctccccctcttcttgctgtccaggatgagcagctcaaacaaacaacaagagctggggccagaggctcagagcccaggaagtgggggtctcggtgaagaaggggtgatatttggaagggaagggggatgtggcaggatatcctctaagccctaaactggaggggactgagacttgagagtccagatgaaagacaaagacaagagtggggcaggcagaaaaagctgtacattcttatgtttttaattttttttttttttttgagacggagtcttgctctctcacccaggctggagtgcagtggcgcgatcttggctcactgcaacctccgcctcttgggttcaagtgattcttctgcctcagcctctcaagtagctgggactacaggtgcacgccaccacacccggctaatttttgtatttttaatagagatagggtttcaccatattggccaggctgcccacttcggcctcccaaagtgctgggattacaggtgtgagccaccatgcctggctaggctgtgcattctaattaggaggaaggggagcaggacaaagtgagggattgagtctgaggccaacctggaagaatccccctccagctgctcctgttcagcagtgcctcaggcctgaccctgcaggagtgtcctgggtcagctggagggtgtgagctgggcctgggctcaatgcccagatgactggacaggggctgcctgggccataagcccaggcctgaaggagggaggaagaacctcatgtgtccagccaggcaacccccacacccctcccactgccctcacccattactgtgtttggggtgaaaacagaccaagtaactatggcaacctggaaccagggatcccaggaactagacctttcctccctccagagggcagcccagcttctcagctatgctttctatcccagagtccttgagccttatccaccgtatctctggagggggtgcagtgagaacaaggattttggaagcacatcacctaagctggattccctaccctgcctttcgttagtagatgtccttaaacattctgagccttagtttgcttatctgtaagatgggatgttcctacctcctaatcagggttgatgacaggatgaaagacgacgtcctcagtgcctggtccataatagatacaccttttcctcatcccttgcccctttctgtccccatctctgttgtccttctctcttccacttttatcccatttgggttcattactgtttcgttgtcccattgtcttcctccttcctgcccccagttcgggaaagtacttgaagtgctggcatctcaggggtcaccctggggtgggacatcctgctcctctgctgattggcaagggacagctggcactttggtgtggatgagacatcagacctctcttggctgagggattgtggtggcaggaaggattgagaaggacggtgagtgggtacctgatgcagggtgaaagccgggcaggctctgggctgctgccttctaggcccatgtggatctccattcctctggccacacccccaaggccactcagcatgccaggtcgctgtcactcctgcacctcattggcccctcctgccctatgcccactttgtctttctgttctgctttccttgtgccaccatctccttcatttcttcctcaggatcccaccttttgttctctctcatccctgacctcatcatccctcccttcctctttctagacttctttcctgcctttctttgctctctacctcattagcagttatcacaacctctttttgaaccattattcatcactgtttttttcttcttttgtatcttccccaccccatccactgcttcactgtcttaaattttttttttaatttaaaaatagaagtggggtctcgctatgttacccaggctggtcttgaactcctggcctcaagcagtcctcccatgttggcctcccaaagtgctaggattacaggcatgagccaccgtgctggccttatttaaaaatatatatatatttttaaattcactgtctttttcctttgtttttcttggtcttctcatctgctgctgctgctgaccctgtgcttgtctcctccctttctcatgccgccccctttctatttcccattctgctccctcgtccacatttcttgcccctttccattatgtcctctcttttcccccactttggtcctctcctcctccttccttcccccactccctttacttcccacaccagttctccatcctcttcccagctgtgggggccagcactggggagcctgatgtttgcctcatcgttctgctatggcttctggatacagcacatctggattccggggcccagatgtgtggttgccacagcgacctgggtccctctggtaaatacaggcgcccacccgcctcagagcagagaacaaaacaattgtgtgactttcttttgtcacgagatagaaatgtccttcctcctcccttctccccacacccatgtctctaggcaaaggaagttttaagggtccaaacccttccttctgaggctcccttgcccccttttcagctgtagcctcttagttctctcccatctttcatcctgcgctctgtctttacattctgtgttccccatcctcacccgacccccagttctcaataatggaatgttgaccacccccttccccatctgatgccatttcttctaagtgaatctacacaataactggatgcagaaaagtttcaaaaatctggattctccacccttctttgtacaagtgcttcaaagaagccacttcatttgttccctaagtcttcaatcctttcctttcctggagttgtttggggagaagagcgaatacaggcttaggaatgagaacacctgggtgagacccaccttcaccactactgacttagccccttgaacaagacccttaatgtctatgagcctccgtttcctcagccacaaagtgggattaatgcccgcactgtgtaggaaactgttttgtaaacggaagcccggcacaagtgttttctatctttcccctctctgggactgctttcttggaccgcagcccctggcatctcttgttcccctgtcttcatccttcaggtccttgccctcaattgcccttactcttatgtgtctgccttctctcctccctatctttcctttccttttctctatctttcatcccttttcctcctgaggtcaggacaggaacttggaggatcattcaaggagggaggctcagagctgaagacacagggactgaggttacagagaacagccggagcttgtggacagttctggacaacactgacctttctacccaccaccacccagacacctcagtgaagccaaccccagctctgaccactgggcttccctgccttcacgcctgggctccttaccctttccccctcctctctcccagtcctttcacatttcagtgttgacttgcatttattggtcacctacactgtgcaaggcttggtgcttttcttacaagatgtgaacatacaagacatgagcttctccatgagcctggaaaccaaagggtgaatcaaatggtaaacaaagataatttcagaacctgaaactatatctgctaagcttccagtggcttccccaaatgccttataagcttgtgtacatctggaatcccacatttctctctgagaccccaacagtgggcttccagaacatcccaggaccatccttcttgctgtcttctctgaggtccctggccactctctgtgccaaatgtacttatgttgaccattcttcctaaataataaagccaggacatagggcataggcacacgcgcgtgcacacacacactaaaggatatgaccatggaacagaaatctgaaggtgtcagaggaaattcataccctgtgttctgccctctgtgtgatactgtctccagaccctccctcttcctatcactgcagggctccccacctcctgccaggagatccttgggaagctgctacctactgctggctctgggggcttcaggccaaggcagaggaaggaagctgagcctggctctgtccaagatgctgacttcatcctccccatcaaagccaggaaaaaaacagccacacacacccagacacacggacacacacggggacacccacgcaaaagcccatgtgtgcctttgccctcggccacatggagcttactgggcatctggccacagccacatgcagtgcaggcacgccctgacccaggaacaccacacacctgccaccatggggatctgacctggtgtgcagacacctgggccgtcacccatgtggcagaatcaagcacatatgggctccctcacgtacctttcacccgtgacttggccaagttacacctcagtggtgaggtctgtagcaggatagagagacccagtcctcactgtgaagctgggggtagtgggttcccactcagctgggatatttctcctctgtagcaaagtctctttttcagctccttgtcagggcagcacatggggagatgaagctagggaaacacccaacagacttatgtggggtgtgtctgtctccctgtcccccctgtcctctggctgtcagtcttctgcctgggaccagagacagcgtgtccgtttcctccagcccctacctctccccgcctctgttcctgctcccccgcagcacccaggcaccagccccccaccctgctttccaccacttcaccctctattcaggtgacccacccttatatttgcctcctgtctctagccctttcttcaaccctaaaccttcctcctaaccttcaggctttccttccttgtccgccccaaccccagcttcctccccaaggcttgtatgtcccagtgttcacccaagcccttgccctgccagtgcccaagcctcacctgctctttctctagggacttgctgaggtaggagaatgcaaagggggcagtgacaggagagggactgaacagaacagacagcaggagtggctcggggacgggataagccgagaagatagaaatggtgggactggagcagggtggggacttggggtcccagagacggtcccagttggagaaagaggttgcctcttgcctcctgccctctgcccctgctccctgccccagactgccaggggagaactggtgagaggatgagggagccagcactgggtgatagacatggggtgcgatccagagatccaagctagagcagtggctgggaagagatgggagaggagcatgggggagggaggggaagggggctggccatgaggaaggatataggctgagaggaaaccactggggtcagagaggaggggcagcaggtggagaaatggtggggaaaaaagaaatggcaggaagggtggggggtgtcaagttgggcaaaaattagggtgagctaaaaatggcatagggaaaggacgtgggaggtaagaccggggctgggggttgagatgagggtatggtgagacagtgatgctagacagggagtgggggctggggtgggggcaggagaagaggaggggtggcatgtgggagggcctgggaggggtgggaggacctgccctatctccgctcccctccctgacctcatcctggtcctccccttctcctcccctgctcgctgcagactccctcctcactgtcgctgccgagatccacagtcggttgtggctcagcccctgttgcaggggacaagtgagggagacttccctgtcctgccctgagacgccgccctcccggggttggggacagagcaggtgcagaggcactgcagctgctcggttgcccaggtaaggaacagagttctggggagacccagaaggagaggcaagggatttctcgcctatccccatgccccaggtgaaggtgtggcaggtgagctctcagcagtgcttccagagcaaggacttctgttcaggacagaggacataggagcattcgctgggaaccaggctccctgtgaaggagtgtctgggaggagagggtggtatgtgtgtgttggggtgggcagtatgtgtcagggtttggatgggatgcagacaactgagaggggctgggaacaaaccgagggactccgggagtcagatggtggaaccagggtagaggtggttattggtgaggtgagcccctgggccctggaggtgctggggctagcgggaagataggactaggctgaactggtggccagctgaaccttggaaggaaagtgcttgcggaatcccaaatgtcgggctagagcagctgagcccaggctctgggggctccaggctccaggaggtgccagagggtgcttctttgggcatccaaatggggactccctaggtggcagcgtgagagttgcagggagggaggtctgggagatctctttaggaaatactgaaatgggacagtcaggactcgggtctgggacgtgcacagagcctgcagagaggatcctaaaacttgttcttggccagagctctgcactcatgactcacggttcagcagggctgggatggctgagagatgcctctgggggcacaggggctccgtcttcactctgtgccccttccaggctccccttgcctctgtctgtctgaacccgcactctccctcacctcgccgcccccgccccccaccaccagtacacgtgacacgccccgggtgggaagggcgggccccttatctcgcctggaaagaatttaatggcatagaaacaactggaagtggaactgagaggaactactgggaagcaactcggaaacaccacagctgctgcctgccctgcccctgcttcccgcatctccagcccctcctcttttccctgaccctgccttcaagtccctggggacccagcacctcaattcctcaaacttcctttgctcactccagacctagccactaggtgcaggaccagaaactgccttcctgtctctcattgcacccctaaccattttcagctggggcctggaaatcctttctcttaatttttccattcccaggccgattagctccccagaataaggggtatctggattccccaacctacccctccctgacacctccttcctacctggttccagcccaatatctgagacccccacattccctttttagtctcactcctagaatccttctaccttcacctctcattgccagattcaactgagggtgtagcaggagggtcagagggaggcatgggggcaggaccagaacccccatctgtggaacatcttttatggaagccagcccctctccccaccccttgggacctatacagtccctaatgagcaaagtgtcaaagttggctacaacacaaaatacccaggaagctgagtcacagtttgggaagatgcccccatccctgccagccctccaactgtggggagggtgccaagagggtgaggccatatctctctccaaacacacactacagagaaccaccccagacatagtggcagggggaatggtgaaggggagacacaagagacacccaattctttgcttgcccagtaccgagagaagagcagaattatcccaggagctggaatggggagctggagggctgggtggtggcaacagggcagggagggagattgggaaggagcctctgggtgtgtggtcaatggaggctgctctgctcttctagaccaatctcaccagctttccagaaaagctggtgagctctcttcactccttcctggtgcaaagaccctctctgctttcccccactgtgcagggaaagatgaggaatccacttatttggggaggggcactggacaactcacagaggcctccaggggtacggggaagtatggtggaggccatgtgtccgctgcttcccactgggaagggcctcctgctttgttcctctcacaccatccaggttctttcactcacagagctgccctcggagccaacaagaaatcagccttcttaggcatcacccaatgactaggtgtggaggaaacctgaaggggagattgggtgtgtgtgcacgtgtgtgcatgggcacccatatgtgtacctacaaggatgcaggttttgggggtggatttgtgtgtctgtgcaggtatgtttgtacttgtggatgagcacacattaatatatttgtaagtgtacatgtgtacacatctttgtgcaagcattcccagggtgtgggagtgattagcatggccttagacacaaagtgacaggatttgagggtcggtcagagcccatctcttacccaaggctacactccaggctgacagaagggctggggagacaggaaagggcagctctctgtatgccaggcctctcggcctgggctttcttgggtggggagcctcttggtgtggaaacactctgtccctgttcagctccctttccgtctcttgctggctggtagcagaatgtgatggctggtagccccaattactcctttttctctgatccaggagaaaagtttaagagtagaaagccagaagatgtgtgcgtgttgggtggaggtgtgtgtgtgtcacagtcacctccgcctaccagtgacacatcccccactcctcaccggtcagcatttccacacccaccctgccctcctcctttccccagcctctggtctggaagagctgggcacctttcaacatctctcctcaactcttcaccctagctgaatcctgactggccccctcacactcaggtttgccatagccctgtctcctgtcttatcctgggacccccctaccacctttcctcccacctcttgtctctgtgtgctccccaatccctgcctcagtaaactccacaaacacatacaactgggtaaccgtcatccagatcaagaaacaagacacctttagcaccccagaagccccccgccccatgcccctactagtcactaccccctcaagagtatcacacttctgacttggagcactacagattaatgttgcctctcctcaaacttcacataaatagaactgtgcagcatgctctttcctgtgtctggcttttgttcaacatcatcttagtaagatccatcacactactgcatataactatagttcattcctgctttattttattccacggtgtgaataaaccacaatttatttattctactgatgtgaaatgtttgagtagttcccagtttggggctattatgagctatgttgggtatattcctaggagtggaattgcggggtcatagggtttgcatgtgttcacctttagtacatttagtagattctgtcaaacagttttccaaagtgcttgtaccatctggtcctgccaggatcttccctggcctggcctctgattctgcctcagccctggtggctgtgtctaaccaacttccagtcccagacactgtccgtggtcctagccctgaccttggtcctgcccttggttccagccttaatgctagtcctgcgtttacattgaacttttcattcattcatatagtcggtaaatatttattgagcaccagttatgtgccagatgcagggatacagcagccaagaaaaaaaaataggtgccatgcctgccctcatggactttatagtctagtgggcaagaaagtaataaaataatctcacagtatatttattattactttggacttcaaaaaaatatttgtttatatatgattgcaaattgttataaacgctacacatgagaatggcatgatgctgtgatatcacatgataggaggacctgacctggtcaggaaaacttccctgtgaaaaaaatggcgggctgagacctgaaggatgagaaggccaagagagaagggaacagtgttccacacggatggaacagagtatacaaagatctggggttggggatgggcacagagagtatgagggacttgaaggtcagtggagctggaatggagggagggagggaaatgttatgggtggtgaagtgggagcaggggatacatgatggtagggctgtttgtcagtgttctaagagaatttggaagggagacactgaagcattttgaggatagggacatcctgattgcgtttgtgagactgtagagggcaagagtggaagcagagggaagggtcagggctggacacagtggctcacgcctgtaatcccagcacattgggaggctagggtgggaggattgcttgagtccaagagttcaaggccagcccgagcaacatagaaagatcctgtctttgcaaaaaaaattaaaaattagctgagcgtgatggcacacacctgtagtcccaactactcaggaggctgaggtgggaggattgcttgagcaacaggaggtcaatgctgcagcgagctatgatcgcaccactgcacaccagcctaggtgacagagtgagaccctgtctcaaaaaaaaagaaaaaaaaagcagccaggaggcaattgcagttgtcaggcaagaggcggatggaagcttggattagaatgaaggtaagtgggagagaaggaaatgaattaaagagatgtttatgagaaaatacaggtagatacaaggaaatatggtagccttgaatgggctattaggtttctggcttgtaaagctggatgaatggtggggtcctgagcttcaatggggaattctgggaggggatgggatacaggaaggtgaccgtgagttcaggttacaggcatggtgaatttgaggtgcccaagtggagatgccaagtaggcaggtggatatattgctgtggagcgagaggaagatgactggggtgttttacaaattggtgtatagtttggaaattgaagttataagtctggatgaaggtaccaggtggatgactagagcagtaggtctattaatttagtagaaatttgttgcacattacaatcatctggggagcttttaaaaatactgagtaaaattcacttacttggtcgttctagtcacatctcaagtgttgcagagcctcatatccctcctggctaccatattggtcagcgtggatacagaatgttttaaaagagaagggccaggtgtggtggctcatgcctgtaaccccagcactttgggaggccgaggtgggcagatcacctgagctgaggagctcaagaccagcctggtcaagatggtgaaacctcgtctctactaaaaataaaaaattagctaggtgtggtagcgggtgcctgtagtcccagctactcgggaggctgaggcaggagaatcacttgaaccccaggaggcagaggttgcattgagccaagatcgtgccactgcactccagcctgggcgacagagtgagactccatctcaaaaaaaaaaaaaaaaaaaaagatgcggtgaactgtgtctagtgattttgagagaagtcaaaggtcaagcaagatgaagacaaatgtcccttagattttgtggcaccgaagtcattgggaagccctagagggagctgtttggtgggttggagggagtagagtggattgaggcatgcataggctataaggaaatgtaaacatcaaatacaaataaattttgacaactgtggccatgaagtagaggagagaaatatgtggtggctggagggggtgtgagattggggataggttttttaaggtttcatttttttttttttttgagatggagtctcgctctgttgcccaggctggagtgcagtggcacaatctcaactcactgcaacctttgcctcccaggttcaagcgattctcccgcctcagcctcccaagtagctgggattacaggcacctgccaccatgcccagctaatttttttttattttttatttttagtagagacggggtttcaccatgatcgccaggctggttttgaactcctgacctcaagtgatccgcctaccttggcctcccaaagtactgagattacaggcatgagccaccacacccagccatggttcaatttttatacagcaaaatgccaaagtcttaagtgtgcagctcaatgagtttttgaatatgtatatatctgtgtaaccacccagattaagatacaaaatatttccagaaatatgactccttccggtcaataatccctacaagtaatctgatcctatcttctaaaagcaaagattaactctgcctgtttttgtttgtttttttgtttgttttttgacatagagtcttgatctgttgccaggctggagtgcagtggcattatcttggttcactgcaacctccgcctctgggattcaagcaattcttttgccttagcctcccaggtagctgggactacaggtgtgtgccaccatgcccagctaatttttgtatttttagtagagacagggtttcaccgtgttggccaggatggtctcgatctcttgacctcgtgatccgcccgcctcggcttcccaaagtgccgggattacaggcatgagccactgcacccagcctctgcctgtttttgaacctcatataaacggcattattcagagtgttttcttttttcttttttctttttttggtagctcaggaagggtatataagagtataagagcattctctttctgtgtgtgatattttttactcagcactatgtgtgtgaaattcacccatgttgcatgtagcaatagggtgttttttattgctgtatagtattccattgtatgactctggcacaatttatttatccactttatgaatggacacttgagttgctttcagttttagctaatataggaataaatctcatgaacattatggtctacgtcttttggaagaactatgcagtcattcccaccggatatttagttatagatatctgggttatagactatatgttttagcagatactaccaaacaactttccagtgtttgcattaatatatgctcccacttgcaacagatgacaattccagctgcttcacattcttgccaatatcaagcaatgacagcctctttgaagagggacaagcattctggaggatatttagtggcatcttattgtggttttaacgtacatttacccgataactagtgattttgtgcatcttttaaaatgctgcttggatctgggtgcagtggctcacacctgtaagcccaactactgtggagggtgaggcaggaggattgcttgaggccaggagttcaaggccagcctgggcaacacagcaagatcccatctctacaaaaaatttaaaaattagccaggcatggtgatgcccatctgtagttccagctactctggaggctgaggcaggaggatcacttgagcccaggagtttgaggctgcagtgagctgtgattgtgccactgtgcttcagcctgggtgacagaggtagagtttatcttaaaataaaatgaaatagggtgggtgtggtggcccatgcctgtaatcctaataactttgggaggccaaggcagatcacttgaggtcaggagtttgagaccagcctggccaacttggtgaaaccctgtctctactaaaaaaaaaaaaaaaaaaaaggctgggtgcggtggctcacgcctgtaatcccagcactgtgggaggccaaggtgggcggatcacgaggtcaggagatcgagaccatcctggctaacacggtgaaacctcatctctactaaaaatacaaaaaaatgagccaagtatggtggtgggcgcctgtagtcccagctactcaggaggctgaggcaggagaatggcatgaacctggtaggcagagcttgcagtgagccaagacgcaccactgcactccagcctgggcgaaagagcaagactccatctctacaaaaaaaatgagctgggcatgtggcgcatgcctgtatcctagctactccagaggctgaggtaggagaatcacttgagcccaggtaaaataaataaaatgtttattggctctttggctatattcttttctggagtacctgtttgtcttttgacaatttaaaaaactaggtttcctgattttggcttattttgttttgcagagattttttttttattttttttttttttgagatggagtttcactcttcctctcaggctgaagtgaagtggcatgatctcagctcactgcaacctccgcctccagtttcaagcgattctcctcctcagcctcccgagtagctgggactacaggtgcccgctaccacgcccagctaatttttgtatttttagtagagatggggtttcaccatgttggccaggctggtcttgaactcttgacctcatgatccgcccacttcagcctcccaaagtgctgggatttcaggtgtgaaccaccacacccagctgccttcttattctcttaatgatgtaatttgatgacctgaaattttgttttgtttttttctttttcttttttttgaaacagagtatcagctctgttgcccaggctggagtgcagtggcatgatcacagctcaccacagcctcgacctcccagactcaagtaatcctcccacctcagcccctgagtagctgggactacaggtgtaccaccacgcccagtgaattctttttgttttttgtagagacagagtctcactatcttacccaggctggtctccaactcctgggctcatgcaatcctcacacttaagcctcctgaagtgctgggattacagatacgagccactgcacccggcctatggttaggttttgtgtgtgttttacttaagaaatcttgcggctgggtgcagtgactcaagcctgtaatcctagcactttgggaagccgaggcgggcggattgcctgagttcaggagtttgagaccagcctggccaacatagtgaagccccgtctctactaaaaatacaaaaaatagctgggtgtgggagcagatgcctgtaatccccgctactcaggaggctgaggtaggagaatcacttgaacctgggagacggaggttgcagtgagccgagatagcaccagtgtactccactctgggcgacagagcaagactcagtcttaaaaaaaaaaaaaaagaaatcttgcttactccaaggtcagaaattttctgtaagatattgctatgaaagatattgctttacttttcttatttaggtcctgggttcatctcaaattaatttcggtatatcagacataaggtggagaatgactgtttttttttttttttttttttttttacttagggatgttggattgacccagcaccaggaactaaaaagaccatcctttctcctcttaactgcaggggcacttttgtcgttaattagttgaccacatatgtgtgggcctgtttctgggccctattctgtttcatctgtctatccttgcacctttaaaataagtcttgatatttgatcatgtaagtcctgaggaagaggatttttgttttttttttttcaattggagatatttgagcaaggatccagttgagagtgaggagttgaataaaaaagagagagaagccaagcatggtggctcatgcttttaatcccagctacctgggaggctgaggtgggaggatggcttgagcccaggagttcaagtccagcttcaaccagggggttgagcaagatcctgtctctatattagaaagaggtcgtgcggtgactcatgcctgtaatcccagcactttgggaggccaaggcgggcacatcacttgtggtcaggagttcgagaccagcctgcctacatggtgaaacctcatttctactaaaaatacaaaaattagctgggcatggaggtgggcacctataatcccagctactcaggaggccgaggcaggaaaatcacttgagctaggagacagaggttgcagtgagccgagatcgcaccactgcactccagcctgggcgacagagtaagattccatctcaaaaaaaaaaaaaaaagtgagagagagagggagaagataatctgcacttttcttagaagacagtaggagctgggatccaggtgtttggggaaggattggccctaggtactcatccactaattcattcaacattgatgtgtcagatagaacatttatgtgccagacacaagtatacagcagtcctgggatagatgaggtccttgttctcatggagctcccattgtagcattgagagaaaggtaataagtaaactgataactcaggcagcagtaaatgccatgaagaacaggaacaggatattgtgatagagagtaatggaagactgccctaactgggagttaagatttgaagatggagccagcctttatgagcagagtgaagagcatcccagacatagggaacacacaatgcaaaggcccttggagtagtgagagcttgtagtgctcgtgggaaaaacaaaagaccagtgtagagccgggtgcggtggctcatgcctgtaatcccagcactttgggaggctgaggcgagcagatcacctgaggttaggagtctgagaccagcctgaccgacatggagaaacccggtctctactaaaagtacaaaattagccaggcatggtggggcatgcctgtaatcccagctactcaggaggctgaggcaggagaatcgcttggacctgggaggcggaggttgtggtgagctgagatcgcaccactgcactccagcctgggcaataagagtgaaactccgtctcaaacaaacaaacaaaacaaaacaaaacaaaacaaaacaaaaaaaccagtgtaggagaacacaatagaaaagggggtgaggagcagggtaaataaatgatatcagagaggtagagaacagacttgcccagggagggtatcctttagggttgggcggaatgtgaatttttacatgcatgtgagttgggtagattacttgtgggtggtgggaccgtgggtatgtgctggagaaggggggattcattttgtctcctttttgaagctgctctcatacctaccctttctccctgcagcctcctgaatgatgccagcccagtatgctctaacctccagcctggttctcctggtgctgctgagcacagccagagcaggccccttctcttcacggtccaatgtgacactgccagccccccggccccctccccagccagggggccacacagtgggggctggagtgggaagcccctcttctcagctttacgagcacacagtggaaggaggggagaagcaggtggtattcacccaccgcattaacctgcccccttccactggctgtggctgtcccccaggcaccgagcccccagtccttgcttcagaggtacaggccctgagggtccgtctagagatcctggaggagttggtgaaggggctcaaggaacagtgcactgggggatgttgtcctgcctctgcccaagctggcacaggtgagcaggtgatcacagaagagggtggagaggtggggtggggtgggcattgctagtccataaaggtccttggtatgaattagaagaaggcactccttcctcaccatgaggggtgtggatgcagcccagaacacaacttggagagcagagctgggctacatgtcaaccaaagcatatgcgagggccctgagaggctgcatacattacacatactagcaactgggagcagacatggccttatgagatgaggctagcctggctaggggcctgcacataggagcactacataggctcagcctctctcccaggagagagactgagacttgcctctcccctcctactccaggtcagacagatgtgcggaccctctgcagtctccatggtgtgtttgatctgagccgctgcacctgttcctgtgagccaggctggggtgggcccacctgctcagaccccacagatgctgagatccctccctcttccccaccctcagcctcggggtcctgcccagatgactgcaatgatcagggtcgctgtgtccgtggtcgttgcgtgtgctttcccggctacactggccccagctgtggctggccatcctgtcccggggactgccaaggccgtgggcgctgcgtgcagggcgtgtgtgtgtgccgggcaggcttctcaggccccgactgcagccagcgctcctgccctcgaggttgcagccagaggggacgctgtgagggtgggcgctgcgtgtgtgacccaggctacactggtgacgactgtggcatgaggagctgccctcgcggttgcagtcagagggggcgctgtgagaatgggcgctgcgtgtgtaaccccggctacactggcgaggactgtggggtgaggagctgccctcggggctgcagccagcggggacgctgcaaggacgggcgctgcgtgtgtgaccccggctacactggcgaggactgtggtacgcggagctgcccctgggactgtggcgagggcgggcgctgcgtggacggccgctgcgtgtgctggcccgggtacacaggcgaggactgcagcacgcggacatgtccgagggactgccggggccgcgggcgctgcgaggacggcgaatgcatttgcgacacgggctacagcggggacgactgcggcgtgcgcagctgccctggcgactgcaaccaaaggggccgctgcgaggacggccgctgcgtgtgctggccggggtacactggaaccgattgcggctcgcgcgcctgcccacgcgactgtagaggtcgcgggcgctgcgagaacggcgtgtgtgtttgcaatgcgggctacagcggcgaggactgcggtgtgcgcagctgtcctggggactgtcgtggccggggccgctgtgagagtggccgctgcatgtgttggccggggtacacaggccgggactgcggcacgcgcgcctgtcctggcgactgtcgcgggcgcgggcgctgcgtggatggccgctgcgtgtgcaacccgggcttcaccggtgaggactgtgggagccgtcgctgtcccggggactgccgtgggcacggcctttgcgaggatggcgtgtgcgtgtgtgacgcaggctactcaggggaagactgcagcacgcgcagctgccccgggggctgccgaggccgcggccagtgcctagatgggcggtgtgtgtgcgaggacggctactctggcgaggattgcggtgtgaggcagtgcccgaatgactgcagccagcacggcgtgtgccaggacggtgtgtgcatctgttgggaaggctacgtgagtgaggactgcagcatccgcacctgcccctccaactgccacgggaggggccgctgtgaggaagggcgctgcctgtgcgacccaggctacaccggccctacctgtgccacccgcatgtgcccggctgactgccggggacgtgggcggtgtgtgcaaggagtgtgcctgtgccacgtgggctatggcggtgaggactgcgggcaggaagagcctccagccagcgcctgccctggaggctgcgggccccgggaactgtgccgggcaggccagtgtgtgtgtgtagagggcttccgaggccctgactgtgccatccagacatgcccaggggactgccgtggccgaggagagtgtcacgatggcagctgtgtctgcaaagatgggtatgctggcgaagactgcggagaaggtgagcaggcagccttccccagtgtactctgggactgtgattctgtgaacaggagccatggggaagacctgagcctgaggaagagtggagggagagcatgtcattccaaggagccagtgcccaccaggggcagcagaaccacaggggtggggctttccagtgggcaggactggccttcagatctctgaggagcaggttggggcccatttagttgcatttagggagattctgtgctcctgaagatggagagaaggtgaaggcgatccaagccccgttcagccctctgtcagctattctccactagcagagaggagtgggagttaggatgggcctcttcgatgtccctgagtaaaaggggctgtgggtgggggtggttgccttgtgctaaccagctttccctaacccattctcttgggcagaggtgccaaccattgagggcatgaggatgcatctcttggaggagacaacagttcggacagagtggaccccggctcctggccccgtggatgcctatgaaattcagttcatccccacggtgagagagatgccaggctccaggaggggactgagtgggcaggacaggggggcagggctcacctcctggaggaagttccaggtgatcattggttgagtccagatggctgggtacctgaagctgctgtaaaggctttcttagcctgcttgacactgggcactgaggcctctgcagcatctccagcaagcattggtcccacacagttggaacacctggtaacagagagctcagtacttcctgaggctgtccagtccattgttggtcatcactgttagctgttatcattgttgcagaatccgtctgcccctattctagcacctgtccgttggccctagctgggtattcatcagcagctggaatgttttttgctttccctgtgtcctacaccacaggccttcaggtatttggagacaccagcctgatgtcttcattcctcaggcaaaacctcccagtttcttcgccccttttccctaagtctttattctctgaatcctttaccttcctgtgattcttgcttttttcatgtgcccccaaaatgtggggacagagaggggcccactgacttactctgaatttatggacacttttctcagagctggcgtatagcaatttgtagtcacacaagcaggcagctgttttggtcatatttggttttttaagtaacttttaattataaaagtaatataggccccgtgcagaaaacttagaaaatacagattagcagggaaaaaagatggaaggaaagaagacaacattcaactatatacacttttttttttttcacctaaatataggcctttgcatttggccctgttcaatgttatcttttttggtttgggccaagctgtctaggctgttgcaataattttgagtctgtgaacttcatctcccacctccttgtcatcagtacatgcaaaccagttttttctctgtctccctccaacttgctctttttttttttttttttttttttttttttgagacagagagtctcactctgtggcccaggctcgagtgcagtggtgccatctcagctcactgcaacctctgcatcccaggcttaggtcatcctcttacctcagcctcccaagtagctgggactacaggtgtgcaccaccttagcctgctaatgtttgtatttttagtagagacggggtttctccatgttgcatgcccaggctggtcctgaactcctgggctcaagtgatctgcccgcctcagcctcccaaagtgctgggattacaggcatgagccaccactcctggccatccaacttgctcttaaaacattagagggaacaccctaaggacaaagccttgtggtcacttatttggggcctccctttgtgcagactgggcttttaagatatggtcgtttccccagctgcaaatcttctgacatttctaccatccaactcatgttttcctgcatcatcccacaaatgccatatggggtgtgggccatgtcatcctcatcttcatcagcttagccaggactctgtaaaaataaacaactccctgggcctaaagcctcggaaggcactaggacagaaggggacagctcagaggaactgtcatcctcactccactttgctttgtcttgtcattatgctcctcaggccagccccctactatgttctgcctctcctcactctccagccaaagcagaagcagaaatctcaacttcgtggcgcaaccaagatagcttgaattttttcttctgtttaaacatctttttttgttgttgttataaaaatactttaatcacgagacaagaatttggcaactagagaaaagaaaaacaattcctggctgctcctcactaaaacaagcactgctaacattttaaagtgtttctcccactctcttcttctctgtatatattatttacatagctctaatcttgaaagggtgggacttcgaaaaggaagtttcttaagaaatttcagggaaagaagaattaaaataaacacttgagataagaggagcttttagggcagcagttgtctcctgctctgagtaaataaatacaaaccgatccttggtgttgtcaagggcgccgctttccagttgaagccctagactttctccctcactcagagccaggatggtggtgccaagttggcctgtgccaggcttggccatgttcttagctcatccattctgctctcggtatgggcatctgtcacattctgggtcttctctgagcctgggtgtggaaaacactcctgtaaaattggtccccagacactcctcttgggcctgggctacccaccctcagaccatgctttctgctgtctgtagctggtccctggcatcgtaccttctgccttggcaagtgccatctatttcttttcttttctttctttcttttttttttttttgagacagagttttgctcttgttgctcaggctggagtgcaatggcgcaatctcggctcactgcaacctctgcttcccaggttcaaacgattctcctgcctcagcctcccaagtagctgggattacagacacctgccacaatgcccagctaccctttgtccatttctgtgggtacagagtatattcaatagctgtctgtcctctggctgctgctgtcatcctagaagcctatctctacctcttaccttccctcttcccagaagcacttctctctcaaagcccaaactctgctattccagatcaagggacatacctagttattggaattatttttcagaatgcagaagaagaaagtttctcctctccctgtatatgtggcactgttactctgactcagtggttctcaaagtgtgttccctggacctgcagcatcagcatcacctgggagtatgttaggcatgcaaattgtcagactcccccactagatctactgagtcagaaagtctgggcacagagcccagtaacctgtattgcaacaagccctccaggtgattctgatgcccctccagcctgaggccccctaagtgaaggaatgttgctattttgcaaagtgctagctccactatgaatgtgagagaaagcatggggaaactgagggagatgagttcctgaatgagaaagaggttcagatattccttgtctgggtgtgtcctgcagcctggaaatcagggctaggctaagtgttcactgggactcaaaacctcacagcctcagagaagtttttgcttgggtctagtctaaaaacagcaatgagggtgagataagctccaaggaccagccaaggtagagttcatctggagccacgaggttaatattgagataaactctaaaacttcccaagaacaaaatcagtgaagcaggccaggcgcagtggctcatgcctgtaatcccagcactttgggaggccaaagtgggtggatcatctgaggtcaggagtttgagaacagcctgaccaacatagtgaaaccccatctctactaaaaatacaaaattagctgagcatggtggtatatgcctgtaatcccagctacttgggaggctaaggaagaatcccttgaatcttggaggcggaggttgtagtgagctgagatcgtgccattgcactccagcctgggagacaagagcgaaattccgtctcaaaaaaaaaaaaaatcagtgaagcagccaagctttaccaaggggcagagccagctgccagcatctgtttagaaagactgcttcagggccaggtgtggtggctcacgcctgtaatcccagcactttgggaggctgaggtgggtggatcacctgaggtcgggagttcgagaccagcctgaccaacatggagaaaccccgtctctactaaaaatacaaaattagccggacatggtggcgcatgcctgtaatcccagctactcgggaggctgaggcaggagaatcgcttgaacccgggaggcggagctcgcgatgagctgagatcgcgccattgcactccagcctgggcaacaagagcaaaactccctctcaaaaaaagaaaaaagaaagcctgcttcagaccagtaagatggtgctaggagacgtaggagacatgggttaggttgatggactttcaggggactgttcccagatggatctcaggaggaaccaagaagtgtctaaaggatatatatagggagaaggagaactctggggataggcttgcctcactgaaagaaccagacatcatcagggagcatccaaggtgtgtgtattgcggctgtggggatggggtgggtgtggataaagagaaagagacatacacacacacagagaaaatgaacaaataaattctgggaagggtaaggatttcatgggtcttgagttgaggccaacccaaggcttcctaggctggggtattctaaggcagggtgaataggagagggctggaggtcctatgtgcccaggaaaacttttcaacccagaaaactgacaaagctttacttcatcctcaacccagaaatctctacgtggccttctcatctggttttatacttcggtatttactatgttgatttccccacagttctcttggtttaggagagtaccttttgaaatttccaatcctacttggctgaatggaggtgtccccatcacagccaacatagctaggcagaacacagcatccttagcggctgtcctagctggacagcacagcaaaatgtggggctgttagaatgctcacagatgtacagttcctcctgtttccccagtggtgggcattccaggagaccctgcctggagcagggtccagtagattccctttggaggcaccacacataatcataattccttaaatgtacacttgtaggagtgttgttttctcacaagcatttgctaagcatagagattgttgtaagtatctcatatattcaagatgtggccatacatttagctattagagtctcagctacctgaggacagggaccatatattttatttttgtgtctccaatgcccagcatgatgccaggtacaaaatcaacaatcaggaaacatatttgtggaactttgagcaggtggttcttgttttgaggagcctacaacccgggtgaagagacaagaaaagtccctcaagggaaaggttgtgatgcgggtcccactcctgttacacagccatgagcaggcatctacgaggaggttcagggtgaggcagaccctttaaggagaaagtgcaacttgaaggggcatccttgatctacttcatttgttctgacaggaccaagcttaggaaaaggctcctcatgcccaggtagtcagagttgccagggcaaagctggagggagagtcctggtgcatgttgggtggaattctggcagatgaacacggggtgcccatgagaggggactctgacagataaatagggggtgcccatgagaggggactctgggatcacactgctagggcctaaattcttgccattttcttggtgttggtgacgttggcaagatacttgtccttctgtgtctcagtttccttatctgtaaaatgggactaataggacctgtttcgtagggttgttgtgagaattaagtgagttcatgtgtgtacctcgcctagaacagtggctcacaaggagttagcgctctcagcatgtttgctccccagcttgtacagggtcaagttccacacagtaccatgctgacactgtttagaattggagaaagaagagataagggggattgagcagcagaggcaagagtgccagcccctgagccacctggtgctctctctcacagacagagggggcgagccccccattcacagcacgggttccaagctctgcctcagcctatgaccagagaggactggcccctggacaggagtaccaggtcactgtccgagcccttcgagggaccagctggggccttcctgcctccaagaccatcaccaccagtgagagctggggctgtggggaggggtgtcctgagtggagatctggactagagagggaatctgccctccgggagggcagaaggaaggggctggatgggggctaggctcttggaaggaaagatgatgattgaagaaccagacacccacctgagtcctcctctttaacctggctagtgatcgatgggccccaggacctccgagtggtggctgtgacaccgacaacactggagcttggctggctgcgtccccaggctgaggtggaccgatttgtggtgtcctacgtcagtgccggcaaccagagggtgaggctggaagtgccccctgaagcagacgggacgctgctgactgacctgatgccaggcgtagaatatgtggtgactgtcacagcggagcggggccgggcagtcagctacccagcttctgtcagggccaacacaggtatggctggccagaggttagggaagggccctggtttcccagccttggatcctcctcctcaggagcccaggctcagggctcacagactcctctgaatgcttctggcaggtgtgtggcagtctcgaggcacctgctgggggccttgctctgtcctgaggccactggggagacagagccctcagatgcctggagtcctgtaggaaggttacaggttagcctatgaaaggaatggccccagggagagaagtgaataggagatgctgcctgatccagtcagttaagggaggttcttttttaaatttaggtaccgggacaggccttgtgctgatagatcttgtgggactggaattaggcagattagagatcatcagtcctgttgacttttggattgggattgctgggaggtgggtctcacagcagtgattttccactaaacctcgaggtttcttaacagatacctggatatttttcttttcctgtgacagggggacacccacctcgctgtagctcatgttctcttccccgactcccctttctctccttcagctacagggccccacccacgggcttctctcttctttctagggcaccaacagtggtgggcttggaggggaatgggggggctgcgggacactgaccgatttccctccgttctctttccaggtggggctggggcacagggaagaggcctctggctctggtgggagggatcgagggaggggctgccgcgggaaggagtgccgggagggagctgccactgacctgttctccccttttttgcccctggcagcaccaggccactacagttacccggaggtgcgccccccagccccgccccccaagtcccggccccggccagccccagccccgcggcccccacggcccccttggccctcgaggccagcagaggaaagggaggaggagtccccgcccaggccaagcctgtcccagcccccacggcggccttggggcaacctgacggccgagctgagccgtttccgcggcacggtgcaggacctggagcgccacctgcgggctcacggctacccactgcgggccaaccagacttacacgtcggtggcgcgccacatccatgaatacttgcagcggcgtctgttggccgccgccccagccggctcccccgcacccccgccccgccacccccgccccaccgccagccctgatcccggcaccaggaaacgggactccaaccagggaatctacggcctctcgcctgaaggcgtcgaccgggtggctgcgtcccgccaccccaagccagaggtgctgggcagttccgccgatggcgcgcttctcgtgtctctcgacgggctccgcggccagttcgagcgcgtggtgctgcgctggcggcctcagccgcctgcagagggccccggcggtgagctgactgtgccgggcaccacgcgcaccgtcagcctgcccgacctcaggcccggcaccacctaccacgtggaggtccacggggtgcgggcggggcagacctccaagtcctacgccttcatcaccaccacaggtagtgtgggctggggccacgggacacctatcccttgtccagcctcacctgccgttggagcctgcattcatgaattcctcccactgccaccccccactgcccccttctaccttcaggccctacctggccggggctccagggggcccccaggacaaagcacgagtccattgtccctagaagacgtccccaccccagggtcctggcatccatcctgtggatgcctaaggtcaaggcagcgccttctttggggtttcccgggacacttccaggattgttattttaggcaatagagggtgatgtggttggggcacctgcaaagattcactggagcagtttgagtgggctgggaattgaaaacagtgattcccgttctgactcactgtggtgagagtggctgaagactgtggttagtggttactgttttccacaatttggccttgaccttgaagggacacatcagaactgcgtgggggtggcctgggtgccatcaggcagcaactgtatattggggaggtgaaaccactgcttcttaagctggcttttcagaccccctggctcactttatgctggtctctcccacaggaacgatgtctgggcttggggaaagggcaccctgtggctgctgtggggagggtggtggacctcttcttcccccatagggcccagatgccacctgacctggatgtccacccccacaccctctctctcttcccactgcccactctcctcttgcatcctccctctctaacaccactgtctttcttccaggcttctcactgcagcactaatggaagccacctgaccaccacccagtgggggggatgtatgtggggagggacatggaagtctccgggggctggaggtcatggaagccttgtggggtgaaggatagcaggctttattttacctattacctgcctgaagcacaggcccgtctgctcaggaatgtggtagatgggggtgtttggaggattggctgacctttgggaggagggagtggcccaggtgagggaaccagaagtagaagtagaacaaggctcttagaggctggagggcagaacctggggactggggattcctttctagttctcatactggactctcctctttttctcaccctgccccttcccagggtcctcacccttgggcctcttggggactaccgatgagcctcctccctcaggcccctcgacgacgcaaggggcccaggctcctctcctgcagcagcgcccccaggagctgggagagttgagggtgctgggcagagatgagacagggcgcctccgtgtggtctggaccgcccagcctgacacctttgcctacttccaactgcgcatgcgggtgcccgaggggccgggggcacatgaggaagtgctgccaggggacgtccgccaggctctggtgcctccaccccctcctggaaccccgtatgagctgtcacttcatggggtccctcctgggggcaagccctctgaccccatcatctaccaaggcattatgggtacatcttggactctgctcagatcaatatcctgagattgggggaggagctggggttattgggacttcagaggtaggatggatattgaggggccagtgaagggcagggctgatgtttggggctggatagaggagaaaaggagagaaaaggaattgcaggttcagcaggaagatggatcgagggggatcttaaaacaatgataaggatgggtggggagaggggaaagaggcagaggtaaaaaggccgagggtgggacagagattccaggagagaggctgaaggtccctggccctccacctgcagctttccttgccctgtcccctgcccccactcttcggttgctcctctgcccttccctgccctataaatctttcagggtgggcatgggaaggcctctggacactgaccctcagcccccaatacctcgtccctgggagcctggtttgcagtggacagcagtccatggtcccatcagccagtttctgctgggggtgaaggctccttggggcagggggctccacagccatcaggacttcagacatggatgaggtttgcaggaccagtgaaagacaggtcctggggtacctggctttcacatcccctctttgttcctctctgtgggaccagggtggctgactcatcccccagctccaggtcaagctcaccactggaagagagggtggtaagagagacagcagctcaggtgggcagaggagctttcagactgctctgatgctgcagcagggaggcttgaaactctcattcagaaccagggggacctgaaacccccgcaaagatcctggtgtgcagagagaccaagaccttgtgagggatggagaaactgtcacaagggaagaagcagagattgagagggaaatgcccctcttccagaagagctagtcactgaggggtgggcagatagagtcttccggggagggatctatccaggatggagtgaggtgggcaggggagagggaaggagacacagacaagagaacggttgagtccactatgctttgcttttgcctctcaaactccagacaaggatgaggagaagcctgggaagtcctcaggcccaccacgcctgggtgagctgacggtgacagacaggacctccgactccttgctcctgcgctggacggtccccgagggcgagtttgactccttcgtgatccagtacaaagacagggacgggcagccccaggtggtgcccgtggaaggaccccagcgctcggccgtcatcacctccctggatcctggccgcaagtacaaatttgtcctgtatgggtttgttggcaagaagaggcatggtccgctggtggctgaagccaagatctgtgagtgacagcagtaacaccctgccctctgtactgccctgaagaggttttctcagtgctttgggaacctgctttgggagctccgggaaggcttcctggaggcagtggtgcatgagctgaattctgaagggaaagtagtggtggggcaggcaaagagtttgagaagctcagtgcagcctgagggagtcacggtgagtaaggtggggagagcatggccagtaagagaatcactgttacagtttcctctggctggagaacagggcatgtggggggtgccaaagggcctggtctcagggcttcctgtgctgtgctgaggggcttgggcctcattcgaaggcccctagagggcctctgaagggtaaagtgggagagtgatgagactagatatttatcttgcaaataaccgggtggctgctgagactagctggagaagtgagttaagagctggtaaaggctagcagggttgatcctgcctataatcccagcaccttgggaggccaaggcaggaggatcgcttgaggctaggagtttgagaccaacctggcaacatagtgagaccccccatctctactataacaaaagatattagccaggcgtggtggtgcgtgcctgtagtcccagctacttgagaggcttgaggtgggaggatcgcttgagcccaggagaccgaggctgcagagagccatgattgtgccactgtactccagcctgggtgctatccacactctgcacagagcaacaccctgtctcaaaaaaaagaaaaatgatgatgggtcagctgggatggtggcagtggggctggatgggggaggcgaaggaaagcaaggtgtaccaggcagcccccagggttctggatgagacagtcccattccctgaggcagggagcagcagaggtggggaacaacgccttagataaacttagatcaatatctaagagacacttacataaataccttttgtgcatttattgagagtcagttgtgatcaagatgttctctaagtggatcatcacaccccataaagcacacctgggaggcatgcctactttataggtcaggagaattgaggcaccagagtagtcgtgtggggttggggaagagacagggccactggaaccctgtcgacagcctacactcacagcggaggcagaggaagaagagcccacagggtagcttgcggagtgacttgcagggaggggcagaaccagggagggtgctgtctggactccaggaaggagggtgcggttggacttgtcagattccggaacagtgattcaagggctacggagcgtccacagaatttagcaatggcaaggccacccctggcctgcatgagagctgctgcctggtggaggggtggagctggatcgggagggtggtggaggtgaggacatggctgcaatcagtgtagacatcactttctggaatctgggctgggaatgagagcaaagagggaagatggaggctagagagagatgcacacagagtgggggtgaggaggggtgtgacagtagcttgttgaaatgctgatggcacagctgctggggagtgaagggtcagtgctgcaggcgagggagtccatccatgggtcaaagttcccaaagaggaggagaggcctgcagcatagatgagggaggctgtcccacattaaaacgcttcaaggattgtgctctcctctcttggagaagaagccagctagtagttaggcttggaagcagtggaggttgtactgggaagatttccctggctatggagatgtgaaagggcctggctgggctcccctctttctgaagctccctgctgctctggtttgtggttggaggcagagccacactagtccacgcagtgcttccatgccgtttgaaagaaggcacccattccttaaagtggacaccactcctcaccagggcacacagctcggcaagcagagtgctggctggatttcagtccctctgtactccctcagcaaatgcacttttgtgcagtgaacaacctgcacagcctcacacagcattcctatgtgggatttggcttccccattctccttggacctaagtctctcccttctctctacccactcttcctagtgcctcagagtgacccaagtccagggactccaccccacctgggaaacctgtgggtgacagaccctaccccagattcactgcacctctcctggactgtccctgagggccagtttgacaccttcatggtccagtacagggacagggatggacggccccaggtggtacctgtggaagggcccgagcgttcatttgttgtctcctcactggaccctgaccacaagtacagattcactctgtttggaattgcgaacaagaagcggtatggccccctcacggccgatggcaccactggtgagtagcagccacctcagcccccatgtgaccccttctcagccccatgcacacttcccttcagcccaaaaccagctggggtcccccagcaagacagctgactccagcttcccggccccactccagggctgaggggcagccagactcccccgcactgctgggccccttccatcccaagcagcagctccccgtggcccagaaggtgtgtcataccctggctgtgtcaggcttcccagaagtttagcactcgaattaatggactagtgaccccccaccccccataggtgtgacatcccgtcgaaaccccaagccccagtcccaggctgccagttcagcacctggctggatctccttgtttacagctccagagaggaaagaggagcccccccgccctgagttcctggagcagcccctcctgggggaactgacagtgaccggcgtgaccccagactccttgcgtctctcatggacagtggcccagggccccttcgactcattcatggtccagtacaaggatgcacaggggcagccccaggcagtgcctgttgcgggggatgagaatgaggttactgtccccggcctggatcccgaccggaagtataagatgaacctctacgggcttcgtggcaggcagcgtgtggggcccgagtctgtggtggccaagactggtgagtcatggctgccaggcctccctcccctgctagccccatcctgtgagcgggacttggctggggctccttccagcctccctccatcttcgccttctcagctcattttgccaaagcctccacccacttcctcccgcactgctctcctgtcctctgcatgccaggtccccctcatccagcctccacctcctcatctcttcctcagcctcacttcttcatctccaagggcaggtcctattttcccccattccaaacacctggactcatccttccacctggggctgtcctccccacagatgtcctcaccattcggtcactgtgttctcacccctcagtttttactgggctccttcatggtctggtttgggccatggtcacttctgggcttctgtcacctgctgcccacaacctcctgccatttctgctgtgttcagaggtggcagatccaagtgacaagagcaccacgtttctctagcctttttgcagcatgaagaggactcctctcagctcccgactccttgactcccagcccccttggaacagggcaaagggattgtgttcagcccagcatcccagcctgttcctccatgtccccagcctttccctgtccagtgccattcccctggcctgtgaattatttgatgagagatagtgtggatagtggttaggagcaaagactccggagccaactgcccgagtctcactaccagccttgcaacttacttcctgtaggaccttgtgcaaattgcttaacctctctgtgcctcagctttcccttctgtcaggtggctggatttcagtccctctgcacagagctgttggaattacatgagttaatatatgtataacacttagaaaggccaggcacagtggctcatgcctgtaatcccagcattttgggaggccaaggcgggtggatcacgaggtcaggagatcgagaccatcctggctaacacggtgaaaccgtgtctccactaaaaatacaaaaaattagccaggcatggtggcaggtgcctgtagtcccagctactcaagaggatgaggcaggagaatggcgtgaacccgggaggcggagcttgcagtgagccgagatcgcgccactgcattccagcctgggcgacagagtgagactccatctcaaaaaaaaaacaaaaacaaaaacaaaaaaagcccacacacttagaatagtgcttggagcagcaaagcattttcagagtgagctgcaatttctccctgactctctcacttcccagtaatcttttttgctccccacctccctcccttcctctgggttgtcattcttgccaattctttcctcaatctgctatcccaaagtagtcccccatgtagcaggtcacagaagggctggtttcccttgtgccacagtctccccactccatggagcctcagcagagacctaactgtagggggcgggtaggtgcccacagggctgtgattccagagccagccagggaaggacatgtctctccttggatcccactcaccccagaatttttctcccactcatgcctggagccctgccttagcaattcattccttggggttaaaggggagggaggggcagggctgcctggggaggccacagcaagagcacattccatggtcagatcctcatatgaggggtggggcagccagagtgccctggggagggcacaggtaggaagaggcctcactgccctcctcactgtctgaggtcagcactgtcagtgaacgtggtttggaagaaccctcagaggcttcctctcttcccatctcagctcctttctcagacacgaagggagacccctcacccccacagaacccaccagagcaggatggggcaagggctgtctcagccttctccatccgtgagtgaccgaatggcaaatacaaaggctacagagcccctgagcccacagcgtaagggcatttccatggctgtcatctgtgggcagcagcagcaaagccagcagccctttatgcctctatctcttctctcagctcctcaggaggatgtggacgagacccccagccccacagaactgggcacggaggccccggagtcccccgaggagccgctcctgggggagctgacagtgacaggatcctcccctgattcgctgagcctcttctggaccgtcccccagggcagcttcgactctttcaccgtgcagtacaaggacagggatgggcggccccgggcggtgcgtgttgggggcaaggagagtgaggtcaccgtgggaggcctagagcccgggcacaagtacaagatgcacctgtacggcctccacgaggggcagcgcgtgggcccggtgtccgccgtgggcgtgacaggtgagtgaggggcaggggcctgctttggttccctcccactgctggctcccagcttccctgtagccagttgctctccttgctccagtggaaccttgaggctgcctgccaggggaagacctagaaagagcatgtcactggggactggcgtaccaccagctttcatggccctgagcaagttttaaactttctgcacctctgtttccttgtccgtaaaatggggacacctacctcacagagttattgtgagggttaagtgagttaacagatgtaaagcatcaagaatgggcctggcaaaagtaaatatgctgccagtgtctgctgtgagaattgttataaatattcttactctgaggtctgctttgtcccctttggctggttcagttacttggtcagaatgcacatgaatctaaggccataccaccctgaaggtgtcctatcatctcctctgatctcagaagctaagcagggtcaggtctggttagtacttggatgggagaatgcgcgtgagacattggcctcttcatcagtacagcttgaagcaagctttcttttctttcttgtctttttttttttttttttttttttgagacagagtctcactctgttgcccagcctggagtgcagtggtgcgatctcagctcactgcaacctctgcctcccaagttcaagtgattctcctgcctcagcctcccaaatagctgggactacagatgcgtgccaccacacctggttacttttttgtatttttagtagagacggggttcaccgtgttggccaggctggtctcaaactccagatcctcaagtgagccacctgcctcggcctcccaaagttctggtattacaggcgtgagccaccacgcctgaccacaaagctttctctttcttctttctctctttttctttctttctttctttctttctttctttctttctttctttctttctttctttctttctttctttctttctctttctttctgtctctctctctctctttctttctttttttcctttctttctgttttttgagctctgttgcccaggctggaatgcagtggtgcaatcttggctcactgcaacctttgcctcccaggttcaagtgattctcctgcctcagcctcccgagtagctgggattacaggcatgcaccaccacacctggctaatttttgtatttttaatagagatggggttttaccatgtcagccaggctggtctcaaactcttgacctcaagtgatccacccgccttggccttccaaagtgctgggattataggcataagccaccacgcccggccacaaggctttctttaatactcatccagtgagtgactttacagcaaagaagaacatcccttccaccctttctctcaggcctggttacagggccacatccaccaccacacaggaccagcctgggcacctcctctccagggcctcagcccaagaggctgagtggacagcagtgcctctgggaccctcgggctgacctgcccggtttagtcacagtgaggggaatctcttttttcctttgctcacagaaacaaagacacacctttctcaaaaataacttttactataaggggaaagatttaaaaattaaaagtagagaaatagatagttttccagaacatggtttctgtaattccaccaagctcagcctcatcatgacttggttgatttcatttccagaaccttccaccctcaatttattttctttgcctcagtcagccctgagaagagggagacggcaaagccaccctgagtggctgtccttggggcctgaggttgtagggtggaggctggtgccaggcccagacatgctgccaagtctgctcctggagtgaccctccctctgccgctctgtcccagggacccacactgggctctgtgaggccctgtgcctggtccctggggtaaggatgggctctgtcaggcactgaccaagtcggtgcagtagagataaatggagtttgggaatctgacaaactgagttccttcctgtcttcctctgttctcagctgtatgatttttatttttttattttattattatttttttgagacagagtcttgctttgtcacccaggctggagtgcagtggcatgatctcagctcactgcaacctctggctcccaggttcaagcagtcctcctgcctcagccccccaagtagctgggattacaggcgcccaccaccacacccggctaatttttgtatttttagtagagacagggtttcaccatgttagccaggctggtctcgaacttctgacctcagatgatccacccgccttggcctcccaaagtgctgggattacaggcgtgaggcaccgtgcccagccagctgtatgatcttgaaaaacttacctcctctcctggaacctcagcttcctcatattcaggagggagtaaacgctgcccagcttgttgtcacggttaaaggtggtgatgtaacatgtctggcatcttctcagctcattcatcttttgctcagaccttcccgtgagggaatccctgtatatccatgttctaatgctggatattttgaaacatgtattttacacgtcctggataaaatagatgaggccctttaggaaagaaatgggcatcagtgcgcattatcagagcagcaaaaggacgaagcagctggagtccgccaagctgggggctgtgtctggcagcacacacagtgcagttgccagggggagaggtgcgtggagctcattagacacacttctaaattggaaaaggactgtcccacatgcagcatggggactgccagagtcatgaatcgttataattgtacctttccagttaatccaaaccaccagcaataaagcttgatggtgaaggacattttcattccctcatggaaagaagtgcagagagggcaaaaaggagcagggaatgggtgctgcaggaacaagtaaggttagaaggcaaatgaaatgagagaaaatgcccagcctggtacctgtacatagtagatgttcaatacttggtggtcactctgctccctcccaccacctcagctgcctccatgcctgccctccccagcctgactcatttctgtctgcccgaggcctggtcaccagcctgttttaagcagttgtcacttgcttggagccttgtcttgccctccggaggaagccagagaaacaagttcttgggagccccacccatccagccaccttctctgccattttgcctcttgggaccaccttctagtttgctcactaatgagtgcttcctcatgcgggagtggtggggatctgcaggtcctgagcccagacctgtagaccactcattattttacagacatctgtggagcacctactgtgtgccagggactgggacacagcagtgaataaagcagagctcctgcctgaggagctcacattctagtggagagggacaggcaacaaattgcacaaatatgtcagtggcaccggatgtgacagtgatgagtggtggggaaaagcagagcctagtagggagacagcaagggcctcactgcgagggcagtgtctgaggaaagccctgaaggaggtgagaggacagccacctaggcctttggggaaagagcatcccagacagaaggaagagcaaatgcagagactggcaggcgagaagcagccccagatgtctgcagacagtgagggatgcagtatgttttgtggtggagttggaggagggcaggcaatagggaatgatctaagagatgaatatgggacctcagaggccagtgcaggacttggatttcaccctgagtgaggtagaagccactgcgggaaccagctctggctaatgtgttaacaggatccttctggctgcagacccaacagactaaaggggggtgagggcagaaggcgatgacctgagagaatgttgtgataatccaggaggagccagtggtgcttggaggtggcaaggaggggtcagactctgaaggtagtgacaacaggcggatacccacagggcggatgtggagtttaagagaggactcggggatgactctggcggtttagatctgagcagctggaagaatgaagttgtaatcctggtcaggcgtggaggatcatgcctgtaatcccagcacttggggaggccgaggcgggcggatcacctgaggtcgggagttcaagaccaacctgactaacgtggagaaaccccatctctactgaaaatacaaaattagccggacgtggtggcacatgcctgtaatcccagctactcaggaggctaaggcaggagaatcgcttgaacccaggaggcgtaggttgcggtgagccgagagggcgccatcgcacaccagcctgagcaacaacagcgaaactccgtctcaaaaaaaaaaagttgtaatcttactgaggtggggaggctgtggcgggagcaggtgtcaggaagctcagaggctcagttttggacttgttgagtttgacacacaagtaggcctccaaggaagacgttgcacgaacactagtctggggttcaggggaggtctggacagagggtgtaaatctggagtcattggcatatagatggaatttcagcgctctcccagggtgtcagtgatggttgatactcttctcccccaacaaatgcagcctcagacaccgagcagggacctagtgaaggactgttgaccagacagatgttcagatcaatgcgcttttacatcaaaaccatcatgcgggttccacaaatgcaacagacatcgctgggtgtggtggctcacacctgtaatcccagcactttgggggctgaggcaggtggatcacctgaggtcaggggtttgagaccagcctggccaacatggcaaatgccgtctccactaaaaatacacacacacacaaaattaggcaggcatggtggcgcacgcctgtagtcccagctacttgggaggctaaggcaggaggatcgcttgaacccgggaggcagaggctgcagtgagccgaggtcgcccactgctctgggtgacagcgagactccatctcaaaaataaaaaataaaaaataaataactagacatcattactataagaaaagggggattctttactaacagccccctaccatctctgtcccagccccacaacaagaagagacccctccagccactgagtccccgctggagccacgcctaggagagctgacagtgacagatgtgacccccaactctgtgggcctctcctggacagtccccgagggccagtttgactccttcatagtccagtacaaggacaaggacgggcagccccaggtggtgccggtggcggcagaccagcgagaggtcacagtctacaacctggagcctgagagaaaatataagatgaacatgtatggactacatgatgggcaacgcatgggccccctgtctgtggtcatcgtgacgggtgagtaatggggggactcagtcctcatctctggttacccagagctcccccaccccatggcccttcttccagccctgccttggtaccaccgcaccctcactgaggggctagatcccctcaggccctggctcggtgaccctgccagtctttctgttccctgacccctttactcctcccagggctagagccttctcagccctccagctccttccccatctccactctgccccccgcccaggggaatgtcttatttccatttggcctaaatccagccacagactttctctccccctctccgactgcccacagctgtttccaccccttctctttacaaccctgctgtgacttggacacagctgccacctcctgcttctgcccttttttgttgaggcgaagtgctttacatcctgagtcccttctcaggagtcctctgccacctgcctgcactgcattccatcccagccctggagagttttcatctctccaggaggctgcctcactcttgctctgggctccttcctgcccctcatggcttcctgggcacaggttctccatgattgttgtgctgtggcatctggtgaaacccctaccccacctgaaggcaatgtttttaaatctgtaaaataagctgtataggattacaaaggaaacattatatttatagacagttatcaaaatatttcttttttatttttgagatggagttttgctcttgtcatccaggctggagtgcaatggcgcgatctcggctcactgcaacctccgcttcccaagttcaagcaattctcctgcctcagcctcccgagtaactgggattacgggcacgtgccaccacacccagctaattttttgtatttttagtagaaacagggtttcgccatgttggccaggctggcctcaaactcctgacctcaggtgatccacccgcctcggcctggcatgagccactgcacccggcccaaaatatttcttaaaaatccaaagttacgatttagtaatacttggacttatttactagttcattaaataacaggacttggtggcgcgtttactaaactacaaaatttagaagcagtgatggatataaaaggtattttaaagtttctgcaataactctaaggtgacatgaaaacatctgtggtttctattggtaacaaagtcacaataattctactctggtgggttttctatattagttttggaaagaaatgctgcatttcagttagaggtctggaagtaaaggtgtaactattccccatctcagttcacagcccccctgaggccctcaaagcccaggggttctcccctcagagatctcaaccatgttctttgtcttcccaaatcccagctcccctcccaccagccccagccacagaggcctccaagcctcccctggagccacgcctaggggagctgacagtgacggatataacccctgactctgtgggcctctcatggacagtccctgagggtgaattcgactcctttgtggttcagtacaaggacagggacgggcagccccaggtggtgcccgtggctgcagatcagcgggaggtcactatccctgacctggaaccctcccgcaagtacaagttcctgctctttgggatccaggatgggaaacgacgcagcccagtctctgtggaggcaaagacgggtgagatgggcccctacacagctgagcctgaggccacagccttcccacccttctcttcactccctctgctgagtcttccctttgtccacctgctctgtctcatttgaaaagccacatggggctagcacagtgactcatgcctgtaatcccagcactttgggagtccaaggcaggtcaggagtttgagaccagtctggccaacatggcaaaaccctgtctctactaaaaagacaaaaattagctgggtgtggtgatgggtgctagtaattccagctactcgggagtctgaggcacaagaatcacttgaacccaggaggtggaggctgcagggagctgagattgcgccactgcactccagcctgggtgatagagccagactccgtctcaaaaaagaccaaaaaaaaaaaaaaagaaagaaaagccgcaaagcagatgaggaccaggagagtggggccagttcctgggtctgctgtcccctgctgactctgcctctcttctcgtaatttccacttttgttggatgagggaagcccctacaggcctcttcctgcagggtggatgtgggagcctgggggtgctgggagaaggggcgaggggagccaggaacccttcctgccttgcgaatccatcacctcctgagagtctttgttgtctcccctgtgactctcacccaggttctcaccctcctagctcaggcctgtctgggcccatatgtgcctcctacagaggctgcccttccttctctgccctcctcctgaagtctcagaaattgggaaccagaggagcccagcccagctgtgcccctttccgagggttcagtccaagccctcccctgcccctgggggctccctattgccagaaaacttgcaataacaatgtcgtcagcgtcctcaccgtccaggaaggcagcaggccagctccttctcaagccctgggatggctcctcaggcagacaccagatcccttccctgcctgagctccccggcatcatccccctcaacattctcacaggcagcccacgctccttcaccaggcccagtgggagccttagttctcccgggccagccggtgcagaataagaaagggaacggagaagggtgagaactacctgtgtcgtaacatcctgcctccctgacctgccgagtgcccccatcagggatcctgcgctcctcggggccggccaaatcacccctttcctcaggggccggccaaatcacggccaaatcgtgtgctcctgggtaagaggagatagagacccagtctgtaagaagctgcaccctgctggggaagcagtctgtgagaggcggaaagaggctggacagaaaggggagtaagatgaggcagggagctagggaatctcttttcctggaggtgactcaggacaggtgaccctccccacttgggtcaaggggagagaggcatggaccagacggagatggtggtgaggatgggaggtgatggaaatattttggggaagcactgagcatttgggcagttctgggtttttccagccccagagggaggcagtcaaggagtcgttttggaaaaaataaacacaagaacctttcctctccagttgcccgaggtgacgccagcccaggggccccaccccgccttggggagctgtgggtgacagaccccaccccagactcactgcgcctctcctggacggttcctgagggccagttcgactcttttgtggtccagttcaaggacaaagacgggccccaggtggtgcccgtggagggccatgagcgctctgtcactgtcacccctctggatgccggccgcaagtacagattcctcctctatggcctcctgggcaagaagcgccatggccctctcactgccgacggcaccacgggtgaggggcattccctgcaggtccctgctctgctcccctcaggccaagcagcagacggtcacttgtggtggctgccattaccattatttggccccagccactcggctcagatccagctccccacgtccctgcacaagcccctagcacagcccggcaggactcagccacgcaaagccctgtctccagacctctcaatcctgcccgtcgaggtcacccagtcttccagaaacagctcagccgtttcctctccgtgtctccatctcagaagcccggagtgctatggatgatactggaacaaagcgtcccccaaaaccccgtctgggggaggagctgcaggtgaccaccgtgacccagaactccgtgggcctctcctggacagtccctgagggccagtttgactcctttgtggtccagtacaaagacagggacgggcagccccaggtggtgcccgtggagggcagcctcagggaggtcagcgtgccgggcctggaccctgcccacaggtacaagctgctgctctacgggctgcaccacggcaagcgtgtgggccccatctcggccgtcgccattactggtgagtgtgcggcagctggaacacctgtgcctccttcccgcctggctctcctggtctgactgagccataagatctctgagcttcccattttatatcatttccattgatccagaaagtttccttgtgcccctttagagtcagttgccccagtcccagcctccagcaaccactgtctgctttcgatcatcctggagacagcattttgactctccatgtaatggaatcacaatacgcagtctcttgtgtttcatttcttgcaattagcacaatgcttttgaaattcacccatgtgcagcaaaagctggtctttcgattgctgactgcttgccctcactccctctcctccctcactcctcctgagagtctgggtgcagcgacacaccagccatctgtctctacctgtctctgtgaaccagccggcagggaagaaacggaaactgagaccacggccccgacccctccagcgcctgagccccacctcggggagttgacagtggaggaggccacgtcacacaccctgcatctctcctggatggtgactgagggagaatttgactccttcgaaatccagtacacagatagagacgggcaactccaaatggtccgcataggaggtgaccggaatgacatcaccctctctggcctggaatccgaccacagatacctggtgaccctgtatggtttcagtgatgggaagcatgtaggtcctgtccatgtcgaggccctgacaggtgagaactctgcccactatgcctcctttcagatggctgggagagtccagaggacagcagagtcccgcggataccctgcccacctcagtcctctctttccatgtctctgtccagtcccggaggaggagaagccttcagaacctcccaccgcaacccccgagccccccatcaagcctcgcctgggggagctgaccgtgacagatgccacccctgactccctcagcctgtcctggacagttcccgagggacagtttgaccacttcctggtccagtacaggaatggagatgggcagcccaaggcagtgagggtgccagggcacgaggaaggggtcaccatctcgggcctggagccagaccataaatacaagatgaacctgtacggcttccacggtggccagcgcatgggccctgtgtctgtcgtcggggtgacaggtgagtggatgatgggagccccagggtgggagccatgggagggtcaccctcttgctctttggtgatgactggtggggaatgggacaagggtctggtcagcaccacagacctgcttgtggctggggctggggctccccttgggccttcctgtgaggttgaccactggctcctcctgaacagagaggggccatcgggaattttgctgtgctggtggctgtcccaggtcccccacagctgaccctggaacttgtcatgtgtgttagctgtcagctgagcaggaccacccagccccaagagtaggcctctctgaactgacctcgggtcccccagtcatagccttggcttctccctccttttccccagtacccaaggacatccccctcactctctcttcctccttctcagctgcagaggaagagacccccagccccacagaacccagcatggaggccccggagcccgctgaggagccgctcctgggggagctaacagtgacaggatcctcccctgactcgctgagcctctcctggaccgtcccccagggccgcttcgactccttcaccgtgcagtacaaggacagggacgggcggccccaggtggtgcgtgttgggggcgaggagagtgaagtcaccgtggggggcctggagcctgggcgcaagtacaagatgcacctgtacggcctccacgaggggcggcgcgtgggcccagtgtctgctgtgggcgtcacgggtgagtgtgcactgcagagccctctgggttgggtcttagcaaagtacagcctccagcatctcctccactagggacccagaaccccaagacctcaaacctgtaatacaccctgttcactaaaggctcaggacaggtgtgatctggggacagagagagcaaatccaggagaagtgtcggagccatatgggaaaggcccccagggactgaggcctcttgggaggtgattcactggctggtttgtggctctccgcttttccttggaactctatacataactctttttgtgagattggaacacatttttgaaatacaaattaattaaattaataagtatttgttaaataaaatttcaaatgtataaacagaaagaatagtacaaagaccctgccatcctccttcaatcaaatatcgacttctggccagtctggctcatctctgccccacccacttcctccactagaatcactagaatgttttctttctttctttctttctttctttctttctttctttctttctttctttctttctttctttcttccttccttcctttctttctttctctttctttctttctttcattcttttctttctttctttttagacaaggtctcactctgtcgcctgggctagagtgtactggcacagtcacaattcactgcactgcagcctcaacctcctgggcttaagggatcctcccacttcagcctcccgaatagctgggactacaagtgcactccaccatgcccagctaattttttgtattttttgtagagacagggtttagccatgttgcccaggccagtctcgaactcctgggctcaagttatcctcccacctcagccaaagtgataggattccaggcgtgagccgccacacccggcctgaatgttttctttattaacacctttatggagatataattcatgtggcataaaatacacttgtttttagtgtacaacttactgattttagtatctttacctacttgtgcagccatcaccacgatctaattttagaacttttccatcacccccaaaagaaatcttgggtccagacccattcctacctcagccctagtttataactaatctacttttttctctgtagattgctgttccagaacatttcgtataaatggactcaaacaatatgtattcttttgtgtctagcttctttcactgagcataatgtttttgaggttcatcaatgtagcatgtagaagtactatacttactacattgctattgattgattgattgattgattgattgattttttttgagacaaattcccactctattgcccaggctatagtgcagtggcatgatcatagctcactgcagccccagactcctgggctcaagccatcctcccatctcagccccccaggtagctggggccacaggtgctcgccaccacactcagctaatttaaaaaaattttttgtagagatggggtctcacagtgttacccaggctgatatcaaactcctggcttcaaggaatcctcctgcctgggccttacaaagtgctgggatagcaggcatgagccacctgctctctctcagccactacactgctttttattgccaaacagtattgcattgtgtggttatactactgcagtattttaaaaacgaaccacagacatcctatgctttcatcactaaatatttaaaggtatatctctttttaaaaaaattatttttaaaaaatccacaatatggccaggtgaggtggttcacgcttgtaatcccagcactttgggaggccaaggcaggtggatcacttgaggtaaagagttcaagaccagcctgaccaacatggtgaaaccccgtctctactaaaaataataataataataataaattttaaaaagtacaaaaaagcggagcgtggtggcacgtgcctgtagtcccagctacttggcgggggttgaggcacaagaaattgcttgcacccaggaggtggaggttgcagtgagccaagatcgcgccactgcactccagcctgggtgacagagtgagactctgtgtcaaaaaataaataaataaataataaaattccacaatacaattagcataccttgataagtgaacaatcatgccttgatatcaagtatccaggtagtgctacagtctcccgagtgtctcataattgttgtttcccaatttgttgctgaaatcaggtctatagaaggaggatacattgcaattgagaaaactgaaattttaaatagagtaatcagggaaggcccacagaagaaggtggcttttgaacaaagacttaaaggaagtgtggggatgagccatgaagatatctggggaaagaacatttaggtagagggaacagtcattgtaaaagtactgaggtaggaggctgcctggcatggttgagggaccataaggaagccacaaaatctgattatgattataatcagaaatcgatcttaagttagggccagactgggcccaccttctgacctgaattcaagacagctggggcctcaacacctccttgcagcaagagaaaagattctgtttctatctcttcctagcccccgaagaggagtcccctgatgctcctcttgcaaagctgcgcctagggcagatgacagtgagagacatcacctccgactccctcagcctctcctggacagtccccgagggccagtttgaccatttcttggtccagtttaagaatggggacgggcagcccaaggcggtgcgggtgccgggacacgaggatggggtcaccatctcgggcctggagccagaccacaagtacaagatgaacctgtacggcttccacggtggccagcgcgtgggccccgtgtctgctgttggtttaactggtgagtgtgcagtagggcactgggccctgccctgaactagactcagtttcccttttattgtcagtatctggtggctttattttactttccctgagaccaagcctcccaagctcctgggaatggttctgctggtgccttcactccgagactttggtattgccccaggtcttctgcccgttacacatgggctttttgggttcccaaagaggtgggggaccaggaaaataacacagactgaggcacacctggggttgaccatagcttcagcccatttgagctgtgtgtcctcaagagactcacacaacctgtctgggcacggtggctcatgcctgtaatcccagcactttgggaggccgaagggggcagatcacttgaggtcaggagttcgagaccagcctggccaacatcatgaaacccccatctctactaaaaatacaaaaattagctgggtgtggtggcacatgcctgtagtcccagctactcgggaggctaaggcgggagaatcgcttgaacccaggaggcggaggttgcagtgagccgagatcgagccactgcactccagcctgtgtgacagagtgagaccctgtctcaaaaaaacaaaacaagcaaacaaaaaacagacacacgacctctctgtacatccttttcctcatctgtaaagaaggaataaccatacctgtcgtgaagggtgggcgggagtgtggcttggctctcacacacaatgagagataactgcagtctttcccttctgaggaaggtaggtagttcctgaaaaccgcttagggcaaattctcataattatcactgatttcagtgggaaaaattgtatgtgttctctaagctcccaaattaatacccatttatttttaaaacaacactgaatcctgttaacatggatactattactttaattgtaaatattggccatgtgcacaacttaataaggcattttcctttcattaccctgtaactcggctctttgatgcttttgtaagctcttttatagctgttaccccctagatgcttaagactcagttctcaaaaagaacagacaaatgaaatgtgatgaatttgtaataccactatcaaggcagaataaaaccctatgaagagcagaaaagattaaagaaatcaatgaaaacaaagcaattgatttcacacgggccaaaagaactggcatcactggaggtgctctctctgccgtaagttagcagagctactgcaggtccagagacaactcagctgcaaagatgccctcatgtggtctcatctctctaccctcagctataaaatctaagttggtttctaaaaatgctcaggattaggtggaatttccaagcccaggtggatgaacctcctgatacaacttgcctgttgtgtttggttggtgttctttgttttctttttttttttttctttatgttgagatggagtctcactctgtcacccaggctctcaggctggagtgccgtggtgcgatctcagctcattgcaacctctgcctcccaggtccaagcagttctcctgcctcagccttccgagtagctgggattacaggcatgcaccagcacatctggctaatttttgtatttttagtacagacaggatttcgccatgttggccaggctggtctcaagctcctgacctcaggtgatcctcccgcctcggcctcccaaagtgctgggattacaggcctgagccaccacgcctggccctgattgctgttttttgtttgtttgtttgtttttgtttgtttgtttttttcttgagaaggagtctcgctgtctcccaggatggagtgcagtggcgtgatcttggctcaccgcaagctccgcctcctgggttcatgccattctcctgcctcagcctcctgagtagctgggactacaggtgcccgccaacacgcctggctaattttttgtatttttagtaaagacggggtttcacagtgttagccaggatggtctcaatctcctgacctcatgatccgcccgcctcggcctcccaaagtgctgagattacaggcctgagccaccacacccggccctggttggtgttcttataaagcatcaattctgtcctgcaaaacaaatttgcttggcagctcctaagggtcccaggcctgcacactgagcatcacagggatgccacctgagcatcatgacttcaccacaggtgtggtgttaactgaacattcaaagcagaaaaatgatattctaagcttggggcaccagcatccagactgtgggcccttggtgtgtctaagagaatcccagagtcccttggttaaaaggaggcccaccaggcatgcccacccattctattttctgatgcagccccaggaaaggatgaagaaatggccccagcctcgacagaacctcccacccctgaaccccccatcaagcctcgcctggaggagctgaccgtgacagatgcgacccctgactccctcagcctgtcctggacggttcccgagggacagtttgaccacttcctggtccagtacaagaatggggatgggcagcccaaggcaacacgggtgccaggacatgaggacagggtcaccatctccggcctggagccagacaacaagtacaagatgaacctgtacggcttccacggtggccagcgtgtgggccccgtgtctgccatcggggtgacaggtgaatggacgatgggagccccagggtgggagccatgggagggtcaccctcttgctctttggtgatgactggtggggaatgggacgggtctggtcagcaccacagacctacttgtggctggggctggggctcccattgtacctttttgtgtggttgacccctggctccccctgagcagggaggggccattgggagttttgctgtgctggtggctgtgccaggtcccccacagctgaccctggaatttgtcatgtgtgttagctgtcagctgagcaggaccccaagaatgggcctctctgaactgacctcaggtcccctagtcatagccttggctatttcatatgtcccctagtcatagccttctccctccttttccccacgacgtaagcacatcccccagggaccctgccatcctctctgtgtccctttttctcagctgcagaggaagagacccccagccccacagaacccagcatggaggccccggagccccctgaggagccgctcctgggggagctaacagtgacaggatcctcccctgactcgctgagcctctcctggaccgtcccccagggccgcttcgactccttcaccgtgcagtacaaggacagggacgggcggccccaggtggtgcgtgttgggggcgaggagagcgaggtcaccgtggggggcctggagcctgggcgcaaatacaagatgcacctgtatggcctccacgaggggcggcgcgtgggcccggtgtccaccgtgggcgtgactggtgagtagtgcttggagtctcggggtaaccacctttccctcatgggtacctggtttactgctgtgccctttcaccaagccctgtgggtccagacttgtctcctgtgtcctgccctccctctgtgccctgtggctgtggcctatgctagcggtttgcttgttcactttggcgtggcctccctctaatggtcaaccactgataacctccaagagtgaaatatgtcaggcgcacaccaagcctgacttacgagaattttcctttctttccatcttaataacagcattctttgttataaccacatacacaaatgcacacaagaggaacaatccaacgtcaaaccacgttgggatgactaaataatttaggcaacatctataaaaagagctattatgccgccactgaaatgttttaacataagacccttactttataatgttacattgaaaaaagagagcctaggctgggcacagtggcttacgcctgtaatcccagcactttgggaggccgaggcgggctgatcgcctgaggtcaggagttccagaccagtctagccaacatggtgaaaccccatctctactaaaaatacaaaaattagccaagcatggtggcacatgcctgtaatcccagttacttgggaggtggaggcacgagaattgcttgaacccgggaggcagaggttgcagtgagccgagatcaccactgcactccagcctggcagatacagccaaactcagtctcaaaaaagaagaaaaaggagcccaaatttttgtaaggatgctaatcacaaccatttgaaagtaacaggcatggcaagaagactggaaagaaacacatcccacgggttgcctgatttgttagatagaatagaatattccagcacatttttttctgtattattctattctgcatagtccaaattttcttaaatggcaaacatttcttttacaatcagggaaagggaaaagagaaaatatataatgtcttctccttctttacactccatctgtcctactcctctatcgctcttgtggcttatttcatttatttccttcttttttttttttgagatgaagtttcgctcttgtcgcccaggctggagtgcaatggcatgatctcggctcactacaacctctgcctcctggattcaagcgattctcctgcctcagcctcccgagtagctgggattacaggcatgcgccaccacatctggctaattttgtatttttagtagagagggagtttctccatgttggtcaggctgctcaaactcctgacctcaggtgatctgcccgcctcggcctcccaaagtgctgggattacaggcatgagccaccgcgcccagccagacttatttcatttctaattatgaggaagttcaaaatttctagtccataagaaattggaggggtggagatcatgaggttaattgaattccaaatgctcagtcaggctgccttttctaagtcatcctcagccaggttgttatgcctggcttagagtatttttcgagaattcctaccgatggggaagaatcagccctgctgagaggcggtctcttgcagggcaggtcgccacctctgtggcaccaagtgaggtgcgagctcatctcccaaaggccatccagacagaggaagcactctcaatcggcatccccgattcctgggggagaggcctcatttccatatgcatgttcagaggaccatctgagtgttgggaaacagggggaatagggaaattattggaaaatgaacattagaaaaattcacattccgggggtaagctgtcctggtccacgttcagttttgtgttcctgtctccactgtggggaaccacagaactgacagaggacaggctgagggacccacccctgcccctcctgttctatgtgtattgctgccccacccccaccccacactctattattaattgttgtagcccagaatttctttctttctttttcttttttttttttttttttgagactgagtctcactctgttgcccaggctggagtgcagtggtgtgatctcagctcactgcaacctctgcctcccaggttcaagtgattgtcctgcctcagcctcctgagtagctgggattacaggtgcatgccaccacgcctggctaatttttgtattttcagtagagaccgggtttcatgatattggccaagctagactcgaattcccaacctcaggtgatccacccgcctcggcctcccaaaatgctaggattacaggcgtgaaccactgctcccagcccagaatttcttttttagcccacgtttttctagtgaaaataatacagcaacattatgtggaaagcttgaaaaacagaaaacaagaatctcatagtcctactttctcccccagctgccggcattaataacaatgtgtgtagtgcacattcccttcctgtattttgcatgcagagcgtgttttaaagttgcaatcagtgttcataaagttcttggcacttccttttttgtacacaagtacattgtaatcattcacctcacggctacacaaccagcattcatcatcgtttcaatggttatttgatgcgttgcggtgaaagcactataacaaaattaatcatcttctacgggtcatttgtgttcctgacacatctgctgtcatgaataaccccatcgtgagttcttccatgctataactttttcctgctttaataattttcttaggacagatgcccagaactgggattattgggtcaaaggaaatgagaattactttggctcctgacactatgtctcagttgccttctggaggtttctaacagtgcagctctgccagcagtacaggccgggggctcggggatacctcaccggctcttattccaagagtcactgaacggcgaacacaaagctgccccagccctcagcctgctctggaggggcgcatttgatgtatgacctctgttgacagcaccagcaaagcaagttgcccttaaacccttaaactctgtatccccctatattacctttcagccccacaagaggatgtggacgagacccccagccctacagaaccaggcacagaggccccagagccccccgaggagcctctcctgggggagctgacagtgacaggatcctcccctgactcgctgagcctttcctggaccgtcccccagggccgctttgactccttcaccgtgcagtacaaggacagggacgggcggccccaggcggtgcgtgttgggggccaggagagcaaggtcactgtgaggggcctggagcctgggcgcaagtacaagatgcacctgtacggcctccacgaggggcggcgcctgggcccggtgtctgccgtgggcgtcacaggtgagtgagtgtgggtggggcagggttggaagacagccctagaaaatgtgcccttctctaccattttcctatacatatttctgtcttgatggggctcacagtgaaaggaatatagcaacattatggaaagacatgtcatggagagacaggctgcaatccagcaaatgaagcaaaggcgggtgagcatgtgatagggaggcccagggctcaggtcaggaccagacagggacgcctaagtcaccctgcccatgggtacccaggggacagccaggacctgaggccaggcatgccttagcttggtgacagctttagagagaaggtgaagtgtgtcagataatcacagctggtgcaaaggccaggaggctagaaagagcatggcacgtgagaggcactgaggattgagtggggtgtcctttacggtgagtatctcatcctgaagtgtgggagcagaggaggggaccactcaccaggcctggggtctcccagggatgaggatgtggttgcccaggtctgtgctgagatggccccagcagctgtgcctgtgtgaagctcatccgtgggggctgaagatggggatggggtggcagggagcctggaggcagcgaggccagtaggcagttggtggccctggtgagaggtgacagtggctcaaactaggatcggggactggaggtggggtaggaaggtatccaggggaattcagggtaaagatgctctgaggctgctggcagctggtgaggagctggatccaggaacacaccccaggctctggcctcgggaggagtgtgctgagcttgttgcggagcaaagacagaagcccagtgaacaaaagatggcgaagagaccccagtgctgggaggccaggggtgcagaggccgagtggggctgtgctcaaaagagaggcggtgctggagggacagggagaggtggcctgggtgttgggaggtgggggtgaggtgggggctgagggcaggagggtcagggtgagggataggaaaggccacaggagaggagaggatgaagagctgtgctggaggggctgtgggcagcatcgtcctgctcttgggcactttgtgttttgtgacacatcctttctatgctgaactgaggagccagggacctcactgtccccacacgtgtctgtccaactccagaggatgaagccgagaccacccaagcagtgcctaccatgacccctgagccccccatcaagcctcgcctgggggagctgaccatgacagatgccacccctgactccctcagcctgtcctggacggttcccgagggccagtttgaccacttcctggtccagtacaggaatggggatgggcagcccaaggcggtgcgggtgccggggcacgaggacggggtcaccatctcaggcctggagccagaccataaatacaagatgaacctgtacggcttccacggtggccagcgcgtgggccccatctctgtcattggggtgacgggtgagtggatgatggcagccccagggtgggagccgtgggagggtcaccctcttgctctttggtgatgactggtggggaatgggccaggggtccggtcagcaccacagacctgcttgtggctggggctccccttgggccttcctctgaggctgacccctggctcctcctgagcagggaggggccatcaggagttctgctgtgctggtgactgtcccaggtcccccacagctgaccctggaacttgtcatgtgtgttagctgtcagttgagcaggaccacccagccccaagaatgggcttttctgaaatgacctcacatacccagtagtggccatggtttctccctccttcccttgaagacctgagcacatcccccaggcacctggcatcctctctatatctccttttctcagctgcagaggaagagacccccagccccacggaactcagcactgaggcccgggagccccctgaggagccgctcctgggggagctgacagtgacaggatcctcccctgactcgctgagcctctcctggaccatcccccagggccacttcgactccttcaccgtgcagtacaaggacagggacgggcggccccaggtgatgcgtgtcaggggcgaggagagcgaggtcaccgtggggggcctggagcccgggcgcaaatacaagatgcacctgtacggcctccacgaggggcggcgtgtgggcccggtgtccaccgtgggtgtgacaggtgagtgtttgtgagtgaggaagatggccctagaagatgttgctttctctgcaacttcatgaaaacaaaaatattctcaccagccgggcttcttttgcacgtttccatgcttggggatcttgctaagaggcagattggggttcaacaggtttgggctagggccagagattctgcatttccaacaagaaatgatgcggatgctgctggcccatgatcacgccccttgagtagcaaagttcttcacgacaaaggaattggaccctcttttgaaatctgttgaagagaatttttctgcgtccctgattcctggtagtgtgctttctctgtggagttgactaggggccgtgaaggaagacagaaggcagtgaggggcagcgcgtcgactgcacactctggaagcccactattggaataggaataggaacagacctttctcaccaatgggccaatttgttcattcagcaaagaattccttgccctgatccggacactgtaattttagggtatcaatgtcctctggccaacgacctccagaaactcacctaaaattgaatggatggaattatgctccatgcagtgcaggaggactgtggggtgacttaggaagaggctttagaaagagattgttaaggaactgggcttgtgtttggtgttttaggaaagcatttaaggaagcaaggttttgctctttattagacgctgtcaggaagaagggataaccctattaccgggcgtctcactaagtcttatctttggggaggtcaactagagcaaggccaaagctgccattggtaaagaagcagctatcactcagattagctggatgggtgatgtttggttatttttgtgctttggaaaatgttagagttcatccttactgagacatgatcacagactggccttgttcttgtcttgatccatcctactgacaaatggcctagtctgatgttgatgttccatgaaattgtctgttcaactggaccacgccaagaccagactgtgccaggccagccccaagcagccgtggcctggcagagggaaagggcagctcacgggtgtcagggctgcctttttctttcataggcggaagctggaaagtgacacacacaagttcatgttttcatggggctcacaattgtgggcacaagcagaaaaccggaaagtaagcaaagaaggatgagcatgtggagcccaggagccaagccaggattgggaagggacagtgaagtcactctgcccacaagtacccaggggacagccaggacctgaggccaggcaggccttagcttgatgacagctttggagaggaagtgaagcatgtcaaatcatcacagctagtgcaaaggccaggaggctagaaagagcatggtgtgtgagagacactgaggattgagtggggtgtcctttgcagttggtggatcatcctgaagtgtgggagcagaggaggggaccactcaccaggcctggggtctcccagggatgaggatgtggttgcccaggtctgtgctgagatggccccagcagctgtgcctgtgtgaagttcatccgtgggagctaaagatggggatggggtggcagggagcctggaggcagggaggccagtaggcagttggtggccctggtgagaggtgacagtggctcaaactaggattggggactggaggtgggggaggaaggtatccagggaaactcgggggagaggtactctgaggctgctggcagctggtgaggggctgggtccaggaacacaccccaagctctggcctcgggaggagtgtgctgagcttgttgcggagcaaagacagaagcccagtgaacaaaagatggcgaggagacaccagtgcagggaggctaagggtgcagaggccgagtggggctgtgctcaaaagagaggcggtgctggagggacagggagaggtggcctgggtgttgggaggtgggggtgaggtgggggctgagggcaggggggtcagggtgagggataggaaaggccgcaggagaggagaggatgaagagctgtgctggaggcgctgtgggcagcatcgtcctgctcttgggcactttgtgttttgtgacacatcctttctatgctgaactgagaacccagggacctcactctccccacacgtgtctgtccagctccagaggatgaagcagagaccacccaagcagtgcccaccacaacccctgagccccccaacaagcctcgcctcggggagctgaccgtgacagatgccacccctgactccctcagcctgtcctggatggtccccgagggccagtttgaccacttcctggtccagtacaggaatggggatgggcagcccaaggtggtgcgggtgccggggcacgaggacggggtcaccatctcaggcctggagccagaccacaagtacaagatgaacctgtacggcttccacggtggccagcgcgtgggccccatctctgtcattggggtgacaggtgagtgtacgatgggagccccagagtggggcctgtgggagggtctccctttctctggtgatgggtgaactggcccaggaagcccctctgctcttggctgagccatggtacttttttgtctttccccacttccctgaggactgacagatcttcctgggtggagaagggccctgtgagctctgttggtggctgtcccaagttccccagcactgacctcagagcttgtcatgtgtgttgactgtaaactgagcaagaccacccagctccaaagatgggcctctccaagctgaccccaggacccccactcatggccacagcttcgctctccttcctcacaagacccaaggacatcccccagggaagctgcctcaccttctctgtcccctcttctcagctgcagaggaagaaactcccgcccccacagaacccagcacggaggccccggagccccctgaggagccgctcctgggggagctgacagtgacaggatcctcccctgactcgctgagcctctcctggaccatcccccagggccgcttcgactccttcactgtgcagtacaaggacagggacgggcggccccaggtggtgcgtgtcaggggcgaggagagcgaggtcaccgtggggggcctggagcccgggtgcaaatacaagatgcacctgtacggcctccacgaggggcagcgcgtgggcccagtgtccgctgtgggtgtgacaggtgagtaagtgtgagtgaggcgaggtggggaagatggccctggaagacactgctgtctctccagtcttcgtgaaaacatactctgaagagtattccttcctttgtgtatccaaatgcctggagatttttgttaaaaagcagatttggattcagcaggcttggcctagggcaagagaccatgcatttctttctttttctttctttcttttttttttttttgagatagagtctcgctttgtcacccaggctggagtacagtggctcaatctcggctcactggaacctccgcctcctgggttcaagtgattctcctacctcagcctcctgagtaactgggactacaggcgtgcgccaccacgcccagctaattttttcatatttttagtagagatgggtttcaccgtgttagccaggatggtctcaatctcctgacctcgtgatctgccctcctcggcctcccaaagtgctgggatcataggcgtgagccacggcgcccagccgaccatccatttctaacaagattctcatctatcttgatgccactggtccaaggaacacactttttttgttgttttttattgtagtaaagtacacttgacataattcgccattctaatcgctttctagtttgcagtccagcatgaagtccactcacattgctgtggactgtcaccctccacttccagaactcctcttcccacactgaaacttcctacccactagacacgaactcccattctccccttgccccagcccctggcaacaccattctactctctgtctctatgaatttgactctaggtacctcatataagtgcaatcatacaatatttgtcttttttgaatggttcatttcattaaatacaatgtctttaaggttcatctatgtcgtagcatcagtcagaatttcctttttattttattttctgtggcaatgggggtctcggtatgttgcccaggctggtctcaaactcctggcctcaagcgagtctcccaccttgacctcccaaagtgctgggattataggcaagagccactgcacctggccagaacttccttccttttcaggctgaataatgtttcgttttacacatacagaccacactttgctcatcctttcatccattgatggacatctgggttgcttccacctcttagctatcaagaataatgctgctatgaatatttgtgtgcaaatcacagaacacctttgtagcaaagctcctcccagtaacagatttggaaactctcttagaatttgttgaagcgaatttttcttgcattcatgaatcctcacagaggttaggctcagagttagggttcctgtcctaatgggaaaagttcctgtcctaatggggctaacgtcatgggggacaggctgtggaccagtaagaaagcaaaggcgggtgagcatgtgacaagaagcccagagccaggcaggaatacctaaaccaccctacctgtggatactcaggggacagtcaggatctgaggccaggcaggccttagcttggtgacagctttagagagaaggtgaagcgtgtcagatcagcacaggtggtgcaaaggccaggaggctagaaagagcatggtgtgtgagaagtactgaggattgagtggggtgtcctttgcagtgaatagatagtcctgaagtgtgggagcagaggaggcctggggtctcccagggatgaggatgtgattgcccaggtctgtgctgagatggccccagcagctgtgcctgtgtgaagctcatctgtgggggctaaagatggggatggggtggcagggagcctagaggcagggaagccaataggcagttggtggccctggtgagaggtgacagtggctcaaactaggatcggggactggaggttggggaggaaggtatccagggaaactcgggggagaggtaactctgaggctgctggcagctggtgaggggctgggtccaggaacacaccccaggctctggcctcgggaggagtgtgctgagcttgttgcagagcaaagacagaagcccagtgaacaaaagatggcgaggagaccccagtgcagggagggtaagggtgcagaggccaagtggagctgtgctcaaaagagaggcggtgctggagggacagggagaggtggcctgggtgttgggaggtgggggtgaggtgggggccgagggcaggggggtcagggtgagggataggaaaggccgcaggggaggagaggatgaagagctgtgctggaggcgctgtgggcagcatcgtcctgttcttgggcactttgtgttttgtgacacatcctttctatgctgaactgagaacccagggtcctcactgtccccacacgtgtctgtccagctccaaaggatgaagccgagaccacccaagcagtgcctaccatgacccctgagccccccatcaagcctcgcctgggggagctgaccgtgacagatgccacccccgactccctcagcctgtcctggatggttcccgagggccagtttgaccacttcctggtccagtacaggaatggggatgggcagcccaaggcggtgcgggtgccggggcacgaggacggggtcaccatctcaggcctggagccagaccataaatacaagatgaacctgtacggcttccacggtggccagcgcgtaggccctgtgtctgccattggggtgacgggtgagtgaatgatgggagccccagggtgggagctgtgggagggccacctcttgctctttggtgatgactggtggggaatgggacaggggtctggtcagcaccacagaactgcttgtggctggggctgggactccccttgggccttcctatgtggttgacccctggctccccctgagcagggaggggccatcaggagttttgctgtgctggtggctgtgccaggtccccccacagctgaccctggaacttgttacgtgtgttagctgtcagctgagcaggaccacccagccccaagaatggacttctctgaaatgacctcaggtcccccagtcatagccttggcttctccctccttttccccaggacccaaggacatccccctcactctctctccctccttctccactgcagaggaagagacccccagccccacagaacccagcactgaggccccggaggcccctgaggagccgctcctgggggagttgacagtgacaggatcctcccctgactcgctgagcctctcctggaccgtcccccagggccgcttcgactccttcaccgtgcagtacaaggacagggacgggcagccccaggtggtgcgtgtcaggggcgaggagagcgaggtcaccgtggggggcctggagcccgggcgcaaatacaagatgcatctgtacggcctccacgaggggcagcgcgtgggcccagtgtccaccgtgggcatcacgggtgagtggggggacaggccctcgtccccaggtttacctctgcagcccccttgtgtttctcctttggatcttggcacctcttttgactgggcctctaggtttctgtcttttctcccatgttgctaatgatcctgcctcatccttggattcatggagactgtgtggagtcagatgggcaggtagtccatgccctgtttgttgtagcttccttctcccattgtgatctggaacctccatgttgctcgtgtgctcatttgttagtcttcaggctcccttaaggagtattttagtggctcagaaagtgcttcagatccagctgcccagatctgcatgtgccttcgaatgtagtgattgtgcgactttgcaggcgtttcctaaccttgtgcttcagattcctgcaaagttggggtgatgataataatggcacccacttcatatgttgtgcgagggttaaatgcaccactgtttgtgagctgcttacagcaatgcagggcacagattctaaaacaagcgttttagaggaggccgctaagaaatgctcactccagtcctgggagagcactgcctcccttgcgcagggtcctgcctcctgacccatgggcctgctctgctcttttcagcgcccctgcccacaccactgccggtggagccccgcctgggggagctggcggtggcggccgtgacctcggactcagtgggcctctcatggacggtggcccagggcccctttgactccttcctggtacagtacagggacgcgcaggggcagccccaggcagtgcctgtgagcggagacctccgagcggtcgccgtctcggggctggacccggcccgcaagtacaagttcctgctctttggactccagaatgggaaacgccacggcccagtccctgtggaggccaggaccggtgagtgagggctggaggcctcccgcggccagagccttcgcccccttgtggcacctgttggaatttcacgttctgtgccccacactccagtcctcagcacccactgatttattgggtccaggaaaacccaggccctgagctctcctctcccactcacactcatccctctccctactttccctgcaccccaggggacacttgctttcttgtctggctcctcttttattcctactcctggcccagtcaccctcccgttcctgggaccggctcacagagccatagcagcccaggaagctccgtggcccctttgcctccatcccactctccatgcacctcactgtcttttccagccccagacaccaaaccgtctccccgcctgggggagctgactgtgacagatgcgacccctgactccgtgggcctctcgtggacggtccctgagggcgaattcgactccttcgtggtccagtacaaggataaggatggtcggctccaggtggtgccggtggcagccaaccagcgggaggtcacagtccagggcctggagcccagtaggaaatacaggttcctgctctatggtctgtcaggcaggaaacgactgggccccatctctgctgacagcaccacaggtgagtcccagtccagcctccaccttttccagagctgcctctcatccgagccctcagagctggccctgcagccttcccgtgagattccctctatcagccctgacacaaccatcttaactccgaaagtgagtccctctgtgtgtcaggcacagttctgaagcatatgcattacttcctttcattcgctgactgctgaggaaataaaagggacacgggctttggggccagcagatctgtgttccagttccagtcctagcctttgccagggtgaccatggacaagccgcttcatccccgggacctcagtgtcctcacctgcataatgctgggaatggcgctggactcagtagtggttcccatcctcctccctcctccctgactcggagccgaggggtggaagaaaagggagggcttggctatggaaagacgatggaaaaacctggtgtcactatgcctatgactcagctccctgaggaaggggtgtggtgggtcaccgaccctcaccccactcccaggaccatgagtcactatgcccagaggaggacagagcagccggccagtctgggcctgggtccctgggactccgtaattctcttcccaaaccctcactgtggggacggggtacagatccccacccatcggccccagccccacccgggcaagcctctgctctgccctctgttctcccagctaatcccctgtcttctccctgccccaccctggctgccccggcccagtggggtcagtgtggggctggggaagcaggaggcacggatgttcaggctgatggccacaaggggacaagggggagatcacagcctggcagtgatgggagccgtgcattggccggctgcccagaccagctctcgatgtttggggtgtctccgtgacaacccagagacctccggggagtctctctcagctctggcctcattcttgctcaggggctgggggtcagggtaaacaaaggccctctctgcacccccagccacccatccctcgggagatgatctgtaatgaatttggcgcatcctcgatcacagcagggaaggggcggggcaggaaggagtttgggcagcagcctccagaggaggagggggctgttctccctcattcctgtggggcatggcgggagcaggcctgtgtgtctcctcaaggagctgtccctggggctacactggagggaccatttcccagaacctcacacctccgggaggctgccagggcttaggcaaaggcagcatgtgactaagagctttccctcctccctctgcacagctcccctggagaaggagctacctccccacctgggggaactgaccgtggctgaggagacctccagctctctgcgcctgtcctggacggtagcccagggcccctttgactccttcgtggtccagtacagggacacggacgggcagcccagggcagtgcctgtggccgcagaccagcgcacagtcaccgtagaggacctggagcctggcaagaaatacaagtttctgctctacgggctccttgggggaaagcgcctgggcccggtctctgccctgggaatgacaggtgaggctgctgtgcctggctatagcaagccagcttgtgtgggtttccttgtgcatttgggctgaagacaaagatgactgcaggagtgggcaggccggagtggggcgccctggcctgtccccaggaaggaggaggagtctgcagccctgtgggcttcaacatccatcaaggagtccagagcaggagccaggccaggcgggagggaaaggccctgggaggggctctctaatctcccagccccgactctgccccgtcactgccactgctcctcattactcgctggggctgctgtcgcctccccgaagggtggccttgtccagatagcggcaaacctccctgccgtggatgagtcaggagcattttcttaagaggaacatcactggaaaacaaaatgagcggggacacagaaaccaacagcagtggctgcatttgtggtacaggctcctcttccagagctcgctgatgcccacctcagacaggcctgaccacggcacggctggtgggatttgccagtcacctcaaccagccagttccaccctcagcttctctcagaagggagcaccacactcctcaagctcagtgaatgtatcccggcatgggtggggccagagcctgtgatatctcgaggtgggctcggcaggacaccggggtgtggaagggggaagcgagcacctgactcagacagcgcgggagctcgcaggagtcacgaggccacagcgacttcattgtctgactgggcctggacctataaacttcccacctcagccttgggccaagcctggaagataaaaatggagcaccccatggcgcccctcactcagattctcccctgggcttctcccacgcagccccagaagaggacacaccagccccagagttagccccagaggcccctgagcctcctgaagagccccgcctaggagtgctgaccgtgaccgacacaaccccagactccatgcgcctctcgtggagcgtggcccagggcccctttgattccttcgtggtccagtatgaggacacgaacgggcagccccaggccttgctcgtggacggcgaccagagcaagatcctcatctcaggcctggagcccagcaccccctacaggttcctcctctatggcctccatgaagggaagcgcctggggcccctctcagctgagggcaccacaggtaccaccaggcgtctccggcctctagcctaggactcagaagggagaaacgggggctcagaaggggtggtcgcagggaaagagcgtgaggcgggtaccagggagagaggatggatgggctggatgcgagtggcctttagctctgccccacaggacccccctgtggctgcaagtccctggttacagatagagaaacaggggcagggaggggggtggaagggacgtgctctgggtcaccaagctggtgtgcttctgtctccaatcccttctcccccacccactccgtgcagggctggctcctgctggtcagacctcagaggagtcaaggccccgcctgtcccagctgtctgtgactgacgtgaccaccagttcactgaggctcaactgggaggccccaccgggggccttcgactccttcctgctccgctttggggttccatcaccaagcactctggagccgcatccgcgtccactgctgcagcgcgagctgatggtgccggggacacggcactcggccgtgctccgggacctgcgttccgggactctgtacagcctgacactgtatgggctgcgaggaccccacaaggccgacagcatccagggaaccgcccgcaccctcagcccaggtaaggacccacacacactctgccccaaagtgggggtctttgtacttcacgggggggacctagtgcctcagccagcggtgggggtgggcgagttggtggtgggcctggaggaatctgcagagcgacttccattcctggggactagaggaaaaggggtggtgagcctgtgctggagcagaggcgagggggggactcgcagggagaagcctccctgcccctgcctgcgtcattgttccttgacccctctgcagttctggagagcccccgtgacctccaattcagtgaaatcagggagacctcagccaaggtcaactggatgcccccaccatcccgggcggacagcttcaaagtctcctaccagctggcggacggaggtggtgcctttgccatgtgctcatcgcctcgcatttcctctcccccctgcactctgcccaccctccagccgccctggggttccctgggtaaccctcgatccccaatgttttcaggggagcctcagagtgtgcaggtggatggccaggcccggacccagaaactccaggggctgatcccaggcgctcgctatgaggtgaccgtggtctcggtccgaggctttgaggagagtgagcctctcacaggcttcctcaccacgggtgagatggactgggacccggggcaagaggtgggagccaagaaaacggcatgggtgggagttgagagagaacgaggagggtgaaagggaggtggtggaggctccgattgcggacgggaggccagtggagtctggggaggcacggagtagagagagccgcggggacccttctgagcccctccccttcccccagttcctgacggtcccacacagttgcgtgcactgaacttgaccgagggattcgccgtgctgcactggaagcccccccagaatcctgtggacacctatgacgtccaggtcacagcccctgggggtgagcaggcctgaggcctctggaggggacttgttcagggtggggattgcaggggggaggctggactctggccgaggatggagggggcaggccttgatgcccctctctacactcccagccccgcctctgcaggcggagaccccaggcagcgcggtggactaccccctgcatgaccttgtcctccacaccaactacaccgccacagtgcgtggcctgcggggccccaacctcacttccccagccagcatcaccttcaccacaggtagggtctgtggggtgtgtgggacagggagaggaggtagagggagccaggttgggcctcatccccatctcctcttcctgctttccctcctagggctagaggcccctcgggacttggaggccaaggaagtgaccccccgcaccgccctgctcacttggactgagcccccagtccggcccgcaggctacctgctcagcttccacacccctggtggacagaaccaggtgccccggccccactgacccaactcccctccctgggtgattccaggaggtgctgcctctggccctcccggagggtctccacctccctctcccctgacccccccttgtctgtcccacaggagatcctgctcccaggagggatcacatctcaccagctccttggcctctttccctccacctcctacaatgcacggctccaggccatgtggggccagagcctcctgccgcccgtgtccacctctttcaccacgggtacctggacgcacgggcccggggccgggggctgggtgggcagccagggcctaaggcttggaaaaggactggcccctgctctcctctcccaggtgggctgcggatccccttccccagggactgcggggaggagatgcagaacggagccggtgcctccaggaccagcaccatcttcctcaacggcaaccgcgagcggcccctgaacgtgttttgcgacatggagactgatgggggcggctggctggtgggtggcattgggaagcccaggggtctgtgcagggcagggtctgttgccccgggagccagaggctgatggtgcccccacttgcttcccaggtgttccagcgccgcatggatggacagacagacttctggagggactgggaggactatgcccatggttttgggaacatctctggagagttctggctgggtcagtgcctcacagggactggggaactacggatggggatgggggccctgtggacaccaggaccctgatgagggcacgtatcccacccccaggcaatgaggccctgcacagcctgacacaggcaggtgactactccatgcgcgtggacctgcgggctggggacgaggctgtgttcgcccagtacgactccttccacgtagactcggctgcggagtactaccgcctccacttggagggctaccacggcaccgcaggtaagcagaggctgtgaggctgggagggtgaggctgggaggggaggccctcatggctccttcctccaccctgcccaggggactccatgagctaccacagcggcagtgtcttctctgcccgtgatcgggaccccaacagcttgctcatctcctgcgctgtctcctaccgaggggcctggtggtacaggaactgccactacgccaacctcaacgggctctacgggagcacagtggaccatcaggtgaggggtggggaggcggctcagagctggggtggctggggctcggcctgcctaggtttcagccccacagtgtaacaggcaagggactgagtggctgggtgaaatggaacaatcatgccagcctcgcagagggagctggagttgatttattggctggaaagggccagctcagaattaagcctcaatcctctgcagcggagggtcaggaagggagctctgcggggaggttggttgagtgctgggagctacctccttaaggggaatgggaggagcagatgggacatccggctttgactctctcttgacaacccctttcccagggagtgagctggtaccactggaagggcttcgagttctcggtgcccttcacggaaatgaagctgagaccaagaaactttcgctccccagcggggggaggctgagctgctgcccacctctctcgcaccccagtatgactgccgagcactgaggggtcgccccgagagaagagccagggtccttcaccacccagccgctggaggaagccttctctgccagcgatctcgcagcactgtgtttacaggggggaggggaggggttcgtacaggagcaataaaggagaaactgaggtacccggctggcatcggtcctgccccatcactggctctggcccgggctgtgggcccccatcccccggggctgcagccgcacttggaaaggctgcatcttgaggatgacactgcagtggggcaggggctgcagggagggcagggcgtccccggagggcagcagcgtgaaggcctgcagcagtcgggtcagcaccacgaagagctccaggcgcgccagcggctcgcccaggcacacgcgggcaccgcagccgaaggccagagctctggagttcttgcctggctccaggaagcgatctgcgggcgggtggacaggtgggtggggaggcgttcagcggcagcggggaccagcctccaccacattttcacggcaggcccccggccccccacataccaggccagaactcatgtggcctctcccagaccgtctcatccaggtgggcgccttggaggttcggaatgatgactgtgccctcagggatgtcgtagccggagatgctgaagggggctggagttagaggctggccaggacctccctgggctcgggctttcctcactcatccccaaccctcgggagtcacctgctgggccgtgtggtgcggtggggcaaggctaagggcacaacgggccgcaggcgcagcacctcggcgatggtggcattgagcaagggcagccgtgcacggtccttgtaggggacccgggagctggaggcaccagggcccagttcgtggtctagctcctcctgcagtcgctgctgaatctggggaatgatc

SEQ ID NO: 1471 - DNA, 3432 bp, Homo sapiens
  Genbank Accession No. U89942
actccagcgcgcggctacctacgcttggtgcttgctttctccagccatcggagaccagagccgccccctctgctcgagaaaggggctcagcggcggcggaagcggagggggaccaccgtggagagcgcggtcccagcccggccactgcggatccctgaaaccaaaaagctcctgctgcttctgtaccccgcctgtccctcccagctgcgcagggccccttcgtgggatcatcagcccgaagacagggatggagaggcctctgtgctcccacctctgcagctgcctggctatgctggccctcctgtcccccctgagcctggcacagtatgacagctggccccattaccccgagtacttccagcaaccggctcctgagtatcaccagccccaggcccccgccaacgtggccaagattcagctgcgcctggctgggcagaagaggaagcacagcgagggccgggtggaggtgtactatgatggccagtggggcaccgtgtgcgatgacgacttctccatccacgctgcccacgtcgtctgccgggagctgggctatgtggaggccaagtcctggactgccagctcctcctacggcaagggagaagggcccatctggttagacaatctccactgtactggcaacgaggcgacccttgcagcatgcacctccaatggctggggcgtcactgactgcaagcacacggaggatgtcggtgtggtgtgcagcgacaaaaggattcctgggttcaaatttgacaattcgttgatcaaccagatagagaacctgaatatccaggtggaggacattcggattcgagccatcctctcaacctaccgcaagcgcaccccagtgatggagggctacgtggaggtgaaggagggcaagacctggaagcagatctgtgacaagcactggacggccaagaattcccgcgtggtctgcggcatgtttggcttccctggggagaggacatacaataccaaagtgtacaaaatgtttgcctcacggaggaagcagcgctactggccattctccatggactgcaccggcacagaggcccacatctccagctgcaagctgggcccccaggtgtcactggaccccatgaagaatgtcacctgcgagaatgggctgccggccgtggtgagttgtgtgcctgggcaggtcttcagccctgacggaccctcgagattccggaaagcatacaagccagagcaacccctggtgcgactgagaggcggtgcctacatcggggagggccgcgtggaggtgctcaaaaatggagaatgggggaccgtctgcgacgacaagtgggacctggtgtcggccagtgtggtctgcagagagctgggctttgggagtgccaaagaggcagtcactggctcccgactggggcaagggatcggacccatccacctcaacgagatccagtgcacaggcaatgagaagtccattatagactgcaagttcaatgccgagtctcagggctgcaaccacgaggaggatgctggtgtgagatgcaacacccctgccatgggcttgcagaagaagctgcgcctgaacggcggccgcaatccctacgagggccgagtggaggtgctggtggagagaaacgggtcccttgtgtgggggatggtgtgtggccaaaactggggcatcgtggaggccatggtggtctgccgccagctgggcctgggattcgccagcaacgccttccaggagacctggtattggcacggagatgtcaacagcaacaaagtggtcatgagtggagtgaagtgctcgggaacggagctgtccctggcgcactgccgccacgacggggaggacgtggcctgcccccagggcggagtgcagtacggggccggagttgcctgctcagaaaccgcccctgacctggtcctcaatgcggagatggtgcagcagaccacctacctggaggaccggcccatgttcatgctgcagtgtgccatggaggagaactgcctctcggcctcagccgcgcagaccgaccccaccacgggctaccgccggctcctgcgcttctcctcccagatccacaacaatggccagtccgacttccggcccaagaacggccgccacgcgtggatctggcacgactgtcacaggcactaccacagcatggaggtgttcacccactatgacctgctgaacctcaatggcaccaaggtggcagagggccacaaggccagcttctgcttggaggacacagaatgtgaaggagacatccagaagaattacgagtgtgccaacttcggcgatcagggcatcaccatgggctgctgggacatgtaccgccatgacatcgactgccagtgggttgacatcactgacgtgccccctggagactacctgttccaggttgttattaaccccaacttcgaggttgcagaatccgattactccaacaacatcatgaaatgcaggagccgctatgacggccaccgcatctggatgtacaactgccacataggtggttccttcagcgaagagacggaaaaaaagtttgagcacttcagcgggctcttaaacaaccagctgtccccgcagtaaagaagcctgcgtggtcaactcctgtcttcaggccacaccacatcttccatgggacttccccccaacaactgagtctgaacgaatgccacgtgccctcacccagcccggcccccaccctgtccagacccctacagctgtgtctaagctcaggaggaaagggaccctcccatcattcatggggggctgctacctgacccttggggcctgagaaggccttgggggggtggggtttgtccacagagctgctggagcagcaccaagagccagtcttgaccgggatgaggcccacagacaggttgtcatcagcttgtcccattcaagccaccgagctcaccacagacacagtggagccgcgctcttctccagtgacacgtggacaaatgcgggctcatcagcccccccagagagggtcaggccgaaccccatttctcctcctcttaggtcattttcagcaaacttgaatatctagacctctcttccaatgaaaccctccagtctattatagtcacatagataatggtgccacgtgttttctgatttggtgagctcagacttggtgcttccctctccacaacccccaccccttgtttttcaagatactattattatattttcacagacttttgaagcacaaatttattggcatttaatattggacatctgggcccttggaagtacaaatctaaggaaaaaccaacccactgtgtaagtgactcatcttcctgttgttccaattctgtgggtttttgattcaacggtgctataaccagggtcctgggtgacagggcgctcactgagcaccatgtgtcatcacagacacttacacatacttgaaacttggaataaaagaaagatttatg

SEQ ID NO: 1472 - DNA, 3452 bp, Homo sapiens
  Genbank Accession No. U90552
ctgaagcttgcatgcctgcaggtcgacccacgcgtccgcggacgcgtgggcggacgcgtgggtttttcctttcttccagaaggagatttaaccatagtagaaagaatggagaactattaactgccttccttctgtgggctgtgattttcagaggggaatgctaagaggtgattttcaatgttgggactcaaaggtgaagacactgaaggacagaatttttggcagaggaaagatcttcttcggtcaccatacttgagttagctctagggaagtggaggtttccatttggaattctatagcttcttccaggtcatagtgtctgccccccaccttccagtatctcctgatatgcagcatgaatgaaaatggcaagtttcctggccttccttctgctcaactttcgtgtctgcctccttttgcttcagctgctcatgcctcactcagctcagttttctgtgcttggaccctctgggcccatcctggccatggtgggtgaagacgctgatctgccctgtcacctgttcccgaccatgagtgcagagaccatggagctgaagtgggtgagttccagcctaaggcaggtggtgaacgtgtatgcagatggaaaggaagtggaagacaggcagagtgcaccgtatcgagggagaacttcgattctgcgggatggcatcactgcagggaaggctgctctccgaatacacaacgtcacagcctctgacagtggaaagtacttgtgttatttccaagatggtgacttctatgaaaaagccctggtggagctgaaggttgcagcactgggttctgatcttcacgttgatgtgaagggttacaaggatggagggatccatctggagtgcaggtccactggctggtacccccaaccccaaatacagtggagcaacaacaagggagagaacatcccgactgtggaagcacctgtggttgcagacggagtgggcctgtatgcagtagcagcatctgtgatcatgagaggcagctctggggagggtgtatcctgtaccatcagaagttccctcctcggcctggaaaagacagccagcatttccatcgcagaccccttcttcaggagcgcccagaggtggatcgccgccctggcacggaccctgcctgtcttgctgctgcttcttgggggagccggttacttcctgtggcaacagcaggaggaaaaaaagactcagttcagaaagaaaaagagagagcaagagttgagagaaatggcatggagcacaatgaagcaagaacaaagcacaagagtgaagctcctggaggaactcagatggagaagtatccagtatgcatctcggggagagagacattcagcctataatgaatggaaaaaggccctcttcaagcctgcggatgtgattctggatccaaaaacagcaaaccccatcctccttgtttctgaggaccagaggagtgtgcagcgtgccaaggagccccaggatctgccagacaaccctgagagatttaattggcattattgtgttctcggctgtgagagcttcatatcagggagacattactgggaggtggaggtaggggacaggaaagagtggcatataggggtgtgcagtaagaatgtgcagagaaaaggctgggtcaaaatgacacctgagaatggattctggactatggggctgactgatgggaataagtatcggactctaactgagcccagaaccaacctgaaacttcctaagccccctaagaaagtgggggtcttcctggactatgagactggagatatctcattctacaatgctgtggatggatcgcatattcatactttcctggacgtctccttctctgaggctctatatcctgttttcagaattttgaccttggagcccacggccctgagtatttgtccagcgtgaaaagaagaagagagttcctccaattctgaccgagtgctgatcattccctagagacaccagtaaccccgggcttagctaacgaaagtggggagcctcaggctgaagtaacttttctctgcttctccctgcccagctcagagctgagggcctccccctccacagcaaccaatcacaaccataaagctacaagcacgcactgaagcactttactgatactcattcaattattcatatgacagttgtttgagtttggtaccatcttattttccccttatacagataaggaaactggggtgcagaaaagtgaattgactacaaagtagacatgactagttaacaacacagctgggatctaaacagcaataactaacattaatggagaacttaaaatgctctgagtgctgtgttatgagctttggtggatgtcactcctttaatcctcgcaacaccctgtcgggtagtctcatttagcaagtatggaagttgaggcagggcaacattaagcaacttacataactcatgcagtaatttctgcagttgggagatgttcagcttcagtccccggccctatggccgttcttttccaccctgtttcttcccccataggaagaacccacctgtagccctgaggttcttttcccaggatggctccaggataaggatcactgtaggtggttgtggagttgacacccctgttgactccttcccagctgattgtcagagccttagacccagcacgccttggattagctttgcagagtgtcttggttgagagaataacctcaccgtacccacatgacacgtgatttggaaagagactagaggccacacttgataaatcatggggaacagatgtgttccacccaacaaatgtgataagtgatcatgcagccagagccagccttccttcaatcaaggtttccaggcagagcaaataccctagagattttctgtgatataggaaatttggatgaagggagctagaagaaatacagggatttttttttttttttaagatggagtcttactctgttgctaggctggagtgcagtggtgcgatctcagctccctgcaacctccacctcctgggttcaaacaattctcctgcctcagcctcccgagtactgggaatataggtgcacgccaccacacccaacaaatttttgtacttttagtacagatgagggttcactatgttggccaggatggtctcgatctcttgacctcatgatccacccacctcggtctcccaaagtgctgggattacaggcttgagccaccgggtgaccggcttacagggatatttttaatcccgttatggactctgtctccaggagaggggtctatccacccctgctcattggtggatgttaaaccaatattcctttcaactgctgcctgctagggaaaaactactcctcattatcatcattattattgctctccactgtatcccctctacctggcatgtgcttgtcaagttctagttgttcaataaatttgttaataatgctgaaaaaaaaaaaaaaaaaaaaaaaaaaaaaaaaaaaa

SEQ ID NO: 1473 - DNA, 1548 bp, Homo sapiens
  Genbank Accession No. U90902
aatgaaatgtgtacagcttgccgtgttctgactgtacccttccctcttccatgtctgagaatctccgtgtattttaagaatgtgtgaggagagggtggcgattcatgtttcaatgagcctcttttttttttttccttcctgttttggtctatggctggtcttactctgtgtccatgttcggaagctctagttttgcatagaattatagagatgccaaactctttgaaaagagatccaaatttatcgcttgagagaaagaaaagaaacactattttttgtattttacctgagatacaggggcacaaatagatgagaattttacagtgttagtgtatgtatccctgagcctaaaaaatgaggatataaccttttacagagagagtgaggcgtggtggttttatatttatatatgaaaggccagcaagctcatgcgaaggatatacttttcttccaaaaagcggatttttttttttttaatgtttgaatctatatttgagatgggagtttggttggattaaacatgacaccccggtgggcggtgtgtgtgtctgttgcacatggcagggaggggagcctccttctcatggggttgccatggtgatcattggtttttccatcaaaattgcatcttcatccatagattaccttccccttccctgacagtccataaccaaacctttaaacagaacaacctctttaaaaacttctcttgtgtttaacactttcttcatgccaacgaaacagggtaaacatgctcaaaacattaacagtctaaacagatatccaaatactaagaagaaaaacaagttatagcactttcaattttttttttttttttaaaaaaaggtttatagctttttcttttcccatgtcacaatgtccacttcctaagaagggtttaaaatactatgaaaactttctttttggggaaaatatctatttggtgtttgacacatcagtaggtactttaaagacctgaattttatagtagctttaggagttatattttataaaaatcagttatgactttatatttccagacaatagagagttcagtacatcatgctcttgtgcctctgcctgcttttcctgcgttcccaccctgtattccccccgcctttcgggtttccagggcttcgagcttgatcttttgaaagttttattctattaaatttttgctatatcttctggttttctgaaaaagctttagaatggtttctataccctttgtatcactgcatttttccatatcatctccggttcgatcgcgtccagatggaaaacggaagcagaggcttctaatcgtcgcatttactggctccagtgcaacacatccatctgaaaacactcggaagtctggtgcttggagagggtgccattgtctcttgtacataaggtcatgacgtgtctatgtcaaaagttcttatatatttcttttataagctgaaagaaggtctatttttatgtttttaggtctatgaatggaacgttgtaaatgcttgtcaaacaataaaaataacgaaaagtgaaaaaaaaaaaaaaaaaaaa

SEQ ID NO: 1474 - DNA, 1228 bp, Homo sapiens
  Genbank Accession No. U92315
agacgctgtcgctgcgcacacctggcctctgtgccgcctgctccctgctcgtcctcccctccccaccctcacccacctgccatggacgggcccgccgagccccagatcccgggcttgtgggacacctatgaagatgacatctcggaaatcagccagaagttgccaggtgaatacttccggtacaagggcgtccccttccccgtcggcctgtactcgctcgagagcatcagcttggcggagaacacccaagatgtgcgggacgacgacatctttatcatcacctaccccaagtcaggcacgacctggatgatcgagatcatctgcttaatcctgaaggaaggggatccatcctggatccgctccgtgcccatctgggagcgggcaccctggtgtgagaccattgtgggtgccttcagcctcccggaccagtacagcccccgcctcatgagctcccatcttcccatccagatcttcaccaaggccttcttcagctccaaggccaaggtgatctacatgggccgcaacccccgggacgttgtggtctccctctatcattactccaagatcgccgggcagttaaaggacccgggcacacccgaccagttcctgagggacttcctcaaaggcgaagtgcagtttggctcctggttcgaccacattaagggctggcttcggatgaagggcaaagacaacttcctatttatcacctacgaggagctgcagcaggacttacagggctccgtggagcgcatctgtgggttcctgggccgtccgctgggcaaggaggcactgggctccgtcgtggcacactcaaccttcagcgccatgaaggccaacaccatgtccaactacacgctgctgcctcccagcctgctggaccaccgtcgcggggccttcctccggaaaggggtctgcggcgactggaagaaccacttcacggtggcccagagcgaagccttcgatcgtgcctaccgcaagcagatgcgggggatgccgaccttcccctgggatgaagacccggaggaggatggcagcccagatcctgagcccagccctgagcctgagcccaagcccagccttgagcccaacaccagcctggagcgtgagcccagacccaactccagccccagccccagccccggccaggcctctgagaccccgcacccacgaccctcataataaacacgtcgattctgtctaaaaaaaaaaaaaaaaaaaaaaaaaaaaa

SEQ ID NO: 1475 - DNA, 523 bp, Homo sapiens
  Genbank Accession No. W06950
  unsure (1)..(523): n = a or c or g or t
tctgagatttcagttcntaggttatggcttgtgactccagataaaagatggagaatacctcatgtactgtgacttgaaaatgaattcttaaaattcttaggctctctccatgtatctttcttaaggaaaagtttctgagtgtgatctctcttttgccatagtatcaagtggagggtagttccagaaaagttaaataggaaatcttttgtgacagcagactataatagaagtttgagtaatattttaataaatttatataattcaaatgataaaaatgtatcaatgttatccaatgatttttattaaaaaattaccttattattagaactgtgcctattacataaaaagtgctcatggtatttgnattttaaataatttatttaaatcaagaccactggctctaaattagtgccaggaaaatgccttttaatttctcccatggttaacttttaaaacnagtaatggtacccagttaagttttgatggggttaaattccnctaangaacatattcctccaataac

SEQ ID NO: 1476 - DNA, 574 bp, Homo sapiens
  Genbank Accession No. W20054
  unsure (1)..(574): n = a or c or g or t
gttttttttttttttttcagctttcaaattctctttattaaaaatcttttcttttctcttttgtaaaaacaaacactttgcagtcagttatacagatcaggaaaagtagtgacaatttataggacactcaacaaatttcaatactttacaagttcaaacttaacttagtgttttgggtttttctcataaattcaaaaaacaaactctggtccagttcaagtataatctaattatctaacaggtcacagcctcggactgtccaagaatgggaaaccctgatactaacggctgctgctcacaccatcagattttccaaattctttggggatactgtctaagatagatgctattttgggtgttaacaatgaaaagacaattatacaggccttttgttggtattaacccaggggtaaatatgaatcnggtgcctaaggggagcaattgctcttcagcatccttttttggggagacacctttgaaatggggtggaccaaaacactggaagaaaaagccctttaaaaaataaatcccataatttaccnggggtggccaattaaacnggcattgtgtgtgg

SEQ ID NO: 1477 - DNA, 775 bp, Homo sapiens
  Genbank Accession No. W21787
  unsure (1)..(775): n = a or c or g or t
atttattnttcntcnactnccnnnaccaaggtgaattctcaggctggntacgcntaaagnganantnttaggngacttnattggtgaaggtccagacaggtgacccagtggcatttcataaacaaacgatactgtcccttccaggatgacctggagagagacccttccaaaggcagtggagtggagggcatgggcctccnntgagagaactccagagttggncgggacctactgtgttggcagcagacaggtaggagnctggctggggtaggtcagnggttggtgtttagctggaggtctcctgggncttgtgagccaagctggggcttttatgtgggttctgggctcccagagactccgccagatgacctccagagtctttggggtctcacanttggagaagttctcccctttccaagatgacccccaaaatgaggctcaagaagtggnacananaagggttgccaanaggaaagagttggttngtcgcccttcttggnggngccttgcccntngggcttgacggggcccnaaaaccccttntnacaanggnccttgtttttggcantcaaaaggaggnaaataatcccccaangtncctnggcngggtttntncaaagnaaaaanccaaggccattcaattggccnnnagcncggncngtgnggagggaaacataaaattntcnngccccccccccngagggggttctgaaaggaaanacncggacanaaattgncccaanacctttnggnaatttggtaatttagcngtttt

SEQ ID NO: 1478 - DNA, 773 bp, Homo sapiens
  Genbank Accession No. W21872
  unsure (1)..(773): n = a or c or g or t
tnccangggnccggtnttggncagcaccgctccaaggactccttttgntgtggctccttggtcaacagatagagaaagcctccaccgcctgccccagccaggntctggccatgnacgtggggggccaggacatccatcatacgccgcacagtcaggggctcacagcctggggccatgagcttcttctgntcccagtacgaggtcaggcactggnccagcagaggcaggcttccttgggggaagccttcagcacactcctcagtttggcgtcccaggctgtgggcattctgcaccacagnaggaagtcgggcataccagntcctcagnacatcctgnagaaggttccgagccaggngggtcttgncagtgtccaccaagagcaggtggtcattgagcttctggacaaaggcctcaggcaccgngacctcttctacctccaccttcagnggnagntgancccgggagngcccaccttgatgncaggcattaggccacctattgggtcctgncaggcanctccagtgggtgagcaccttgntccaggtgcagnactgngtggtcagggttccgngccaccaccggncttgggntcgcttnaaggnagccagggagngctttccagnntttnttntgcccaggccaggccngggggaggtcancccagtntgagttnagcccccccngggggggggagttntaannnctgggnccngggaatnancccnnnanttgggntnnaaaaaaanncnnncctctnnnnnnnnnnnnnnccc

SEQ ID NO: 1479 - DNA, 767 bp, Homo sapiens
  Genbank Accession No. W21966
  unsure (1)..(767): n = a or c or g or t
nnnnnnnccnntnnnnnncctttaattcnntgnngattctcntncggtttnncntgcagtaagtcagntcnatctnncncgagggggtaccaagccancatnccattgtggnaaagggggcatgaggatgaggagaaagcaccaatgtgagggcatcctcggtgtccacaggtgagcataaggcaggaggggaagcttccaacacatctggatggcgacacccctggcatggcagacataagatgtgagccccttggtgacacaatcagaggctctttgagaggagggggaggnaaggttggtagtggtgcttcagggcactctggccatccaaatgccacatgctttggtccttctagctgaatggagaggaggcatgttccatctccaagcccgaagcattgattcaccatctttaacttggagattccagactcagtcctggtcaaacatgcctaggagggcaacttggctcagttatgccattcctcttgcctccagacctgaaggatctttcttngaggggagcaggtggaaagccaggggggncacagagggaaaagggtttnggggcagtggncanatnggttggtgccntgcnncaggtgtttcaagttccagagttcccaggttntccaggngggccnncccccccccttcnnaggaagttgggcttnggccaggtttnaggnnggaaccccnttttttcccgttcccnaggnngggtnaanntttngttgnaccccgccctcccggtttgggntccc

SEQ ID NO: 1480 - DNA, 805 bp, Homo sapiens
  Genbank Accession No. W22565
  unsure (1)..(805): n = a or c or g or t
catnnctcaaactgatcacatagtcatcntaagctncaacggagactggaacagtgaaaatctggatttacagcctccacagttggagtggctggagatacagagttgggacgacccctgaaaagtgaaccaaggtcgtctgcacggntgccctggagggcgtggtgcttgaggtcccttctacctctggggcttcatggaatgacttgttgcctccatggagcacctctggggaccactgggtgaatccccaggcattcccttggagagccctcgtccatctgagacctctgtcttgcttctcttcacatgtctgaacaacacatggaccgagggctgcttctttggggaagtggtgatcttntattttagggattggtgcatcttcaagtgttaaccctcaacctggnaggacattaaacaggggtnaacanattcttcaagaaggccaggccanattccaaggaggccccttngggggtttgggnttttttcaaaaaanggaanaaaaggggggnaatntttttttnaaattttnaaaaggccccnnnnnnttttggaaggganaaaanaaaggggnaaagggaagggttttcaaaannaaccccccnaaancccccccggnttttttgntttnnnacccaaaaaaanacccttttnccccccaaaaaccnnaanntngggttcccggggttttaaaagggaatccccnggggaaatttttttttgnaaaantggggggaantnaaaagggttttttttcccaaaaattnttttaanacnaaaaaaaanngnttttggaacc

SEQ ID NO: 1481 - DNA, 627 bp, Homo sapiens
  Genbank Accession No. W23068
  unsure (1)..(627): n = a or c or g or t
tgngttatccnctggaganttctacactacactatccagggnaatctgtggtcagncctcacccccgcaccctctaacattttacttgaactaaatctgagttcagttaaagtaatgtntcctggaatcagagaagccctagggttgggganaaaacaaggatgggccagtactggaatctcaggtacaggtgacttcctggntgtcctggggaagctcgtngttgaaactgctctctccaaatgttgagtaaggagggacctggggagcttcgatgatcagnagacctctggggaaagtgaggnaaatacttgtcacaggatccacctctgnaggaagctggntttncttgggtgaggtncctnagaaacaatgccacctccttgctggttctcttncatggttgggncagacanctccacntttttccatctttngggtctttccaacaatcaacttcnnnntcttgggtttggngggtttgngcaacaattncaanaaaaacaatttttnccaggggcttccccccaggggangggggggggggggnccccccccgaanaannnnnnnnnnnnnnnnnnnnnnnnccccccccccnngngggggnnnnnnnnnnnnnnnncccc

SEQ ID NO: 1482 - DNA, 769 bp, Homo sapiens
  Genbank Accession No. W25986
  unsure (1)..(769): n = a or c or g or t
cnnnnnnnngnggnggggntcgccntcaggagctgtctcactccaggaagtgggcacaacccaccatccacacaatggaaacaagaatggccaggaaatgtcaccaaagtgggacttccatatgcaggatcagcgttcacagtagcacaattctaaccaagttcaagggaaaacaaactctgtctcacacaaacatgggaatacaaaattgttgagccctagccatcactgtctcttaacataatttgctatcaaaaagacaaacgaaatttagtcacggactttggggtgcctattcagctgcacccgattccaggggcagcttagtgtgcttttncattacaaaaaataaagacattaaaaatgcaaaacaaatganctggagggaagaggagtgtttgggacccacgcagttgtcttggttgtaaacagtgaacattgtgctttgttggctcatttagatggaggnctgcagcatgggaggtaccacgctggcagtcagcagtcacancagggtggtcagagacactggtgggaggnnnnnnnnnnnnnnnnnnnnnnnnnnnnnnnnnnnnnnnnnnnnnnnnnnnnnnnnnnnnnnnnnnnnnnnnnnnnnnnnnnnnnnnnnnncnnnnnnnnnnnnnnnnnncnnnnnnnnnnnnnnnnnnnnnnnnnnnnnnnnnnnnnnnnnnnnnnnnnnnnnnnnnnnnnncnnncnnnnnnnncnnnnnnnnnnnnnnnnccnnnnnnnnnncnnnnncnnnnnnnn

SEQ ID NO: 1483 - DNA, 470 bp, Homo sapiens
  Genbank Accession No. W26201
  unsure (1)..(470): n = a or c or g or t
tnnnnnntnnnnnnnttnnnnacagccatgttggtaggcacgaaggaggtctcgctgtctttcttcttgttctgctgctctgccagcagacgggccttggcatcctccgtggaaatgatattttttattttagaatcgatgcccaggtccacctcaggaatgccactcagcatctggttggaaagcatctcctcggtcttcttggntgaggaaacacggatgttttctggaagttcataaagacagtcctctgnattcttnggcttaactttctgttcctcatgttccacgatcccttncctcttctttagctctgtctcaatgtacttcatcatgtctgcatcctcatcccttcggtnggtttctgnagaaaacgatgtccccaggtgcaggtccncccccncactgatcttatcttnggcccnnncntncagnntcttcattccaccanaccaccngagtngattcag

SEQ ID NO: 1484 - DNA, 594 bp, Homo sapiens
  Genbank Accession No. W26589
  unsure (1)..(594): n = a or c or g or t
nttactcctttngctcacaacttcccagcaagaaatgtcttacattgcaaccagttctcacatttagatgtatgggtgaaaagtttcacaaaacagtatttgcctttactacatgatgcattctggcctactttattctgcttcattgctgtgtaatgctggtgaccacctgctaattgatttcccattttactaaatgggctgggacccacggtctgaaaaccctgccttaggctgcaagcatttctgtgatctctgcgagctactccatataggtaaacacacgcgaggtaaactaggaaacagcttctgctttngcagattagaagtgaagttgacatcacgccaagtacgaaaaggntaaacagctgacaaaatttccacttgagcaacccctgggggagcgcaaaacaggagggaatcggggcaagggtgacttgangaaagcactggnagatcacgcactttanggnactctacactgccccatgntagggttatttgnnattgggnaggggatccaagttggctncngggntannnnnnnnnnnnnnnnnnnnnnnnnnnnnnnnnnnnnnnnnnnnnnnnnnnngg

SEQ ID NO: 1485 - DNA, 547 bp, Homo sapiens
  Genbank Accession No. W26941
  unsure (1)..(547): n = a or c or g or t
cnnnnntggngtngngnttgccnacaatcaancagncaaaaaatagtgggtgaaatgattcagtgacctaaggacagccagagcactaagctgctgggaacccatctgtgctgaaatgtagatttcccaggaaactcaggcttgggacaggcgcctacctgctcctcgggcaccaggtgattaggagaggtcgaatctcatttccacgtgagtgaggataaagactgggctgccaaggaggactcctcataaacattgacaaattgctctgccccncctgtgatcccagacgactcctgcagtctgggatcctgagtgtcctgtgggttcatctcggatgggcgctgcataaacagcctgcagggaacgtcttgggagaaccagcttcacaacagataaataaggnagaagtttggaaatattgcaagaattgngaaagtgtggcacacagatacaaagtnggcacatnctccggggaaaattttggccaatagacttggttgatctggngtccccccancctcaatnggtttaaaaaaaaggaatn

SEQ ID NO: 1486 - DNA, 912 bp, Homo sapiens
  Genbank Accession No. W27549
  unsure (1)..(912): n = a or c or g or t
gatatgcaaacctatgagctctgctgtgatatgatagatgtggttattgacatctcttgtatttatggtctcaaagaagatggagcaggaactccctatgacaaggaatccacagccatcataaagcttaataatacaaccgtgcttaatttaaaagaggtgacaaagtncctggctctcgtttgctttgtcagagaggaaagctttgaaagaaaagggctaattgactataatttccattgcttccggaaggccattcatgaagtttnngaggtgagaatgaaagtagtaaaatctcgaaaggttcagaatcggntgcagaagaaaaagagagncaccccnaatgggacccctagagtgctgctgtaggtgaggtttcaggaatgtcttttggaatcagaccctatccatgaggctgntgcgccatgttgcactaaaggaggggaggagggagannngacacatnccatngtttggnggtaaaaaaaaaaccccgnaacccctngncttctttnnttaataangannaatnnnggggnnttccanttggnnttnncaggtnnntgcaannggggnnnnnnnnnnnnnnnnnnnnnnnnnnnnnnnnnnnnnnnnnnnnnnnnnnnnnnnnnnnnnnnnnnnnnnnnnnnnnnnnnnnnnnnnnnnnnnnnnnnnnnnnnnnnnnnnnnnnnnnnnnnnnnnnnnnnnnnnnnnnnnnnnnnnnnnnnnnnnnnnnnnnnnnnnnnnnnnnnnnnnnnnnnnnnnnnnnnnnnnnnnnnnnnnnnnnnnnnnnnnnnnnnnnnnnnnnnnnnnnnnnnnnnnnnnnnnnnnnnnnnnnnnnnnnnnnnnnnnnnnnnnnnnnnnnnnnnnnnnnnnnnnnnnnnnnnnnnnnnnnnnnnnnnnnnnnnnncc

SEQ ID NO: 1487 - DNA, 845 bp, Homo sapiens
  Genbank Accession No. W28438
  unsure (1)..(845): n = a or c or g or t
nnnnnnnnnnnnttntttctcaggagaaggcaggtggttccgatttccaaattagggttctcctcatctcctaccaagaaaagcaaaagcaccgangatggggcagagctggaagaacaaaaacttcaagaagaaacaatcacgttttttgatgcccgagnaaagtttctcccctgaagagaaggaagagggtgaactgatcgggcctgtgggcactgggctggactccagagtgatggtgacatccgcggcaagaacagagttaatcctgcccgagcaggacagaaaagctgacgatgaaagcaaagggtcaggcctgggaccaaatgaaggctgagaggtatggctcatcggtacaagagagatgcaaaaanctaagttggaaagtaaaggctacacacacatntggagcaccccatcccacagcacattacatccacctcacttcacagaacggngaacagagcaggannttgaccagancanctttgtcancatcacacagnccccctaaantggaaccaangctcccagctccctcaaangctttnggntgcaaanganggnacccngactccacaangacaacagnnttcaanttggctttancaggtgnctcaaacgggggggggggtntnnccannttgtnctttcaaannnnnttncnccncccnctnnnnttncaannnnnnnnnnnnnctnnnnnnnnnnnnnnnnnnnnnnnnnncnnnnncnnnnnnnnnnnncnnnnnnnnnnncnccnncnnnnnnnnncnnncnnccncnnnnnntcncncnnncnnncncnncnnnnnnnnnnnncncnnncnnccncnnncncnntt

SEQ ID NO: 1488 - DNA, 614 bp, Homo sapiens
  Genbank Accession No. W30677
  unsure (1)..(614): n = a or c or g or t
cctggtcgctaatgtcagttaaatagcttattcctgtcccacttgatttcactggtaagaatgagaatgaaatacttaaaggttttatttgaggggacttagctgccattttatggaaaaacatgtagtataaaaggtttttctccagggtcatttgacagaattctccaggtgttcagagaaagaggtcgccccaagtggcccagagtcgtgacagtccggagggctggtgtggccggtggngctgctcttcatctgatggagccaggaggtccgccggtgggggaaaggcttcttccgaggcttctgcactcgcctgggaagaggcccagtcactacaggaccctgagatgtccagaccccttatgcaaagaggcaaaatttgtttgcctttggccccatcatggaagtaacttaaaaatacatatctaatcttccagaacaaagccacacnacaacacacctcccctcctttgagcctggcacacagcaccgggctctctggaatttggnaagtgtttcattttggtgggccaatgctccggggnaaggggggctgagcnaggatgtgcantagaagcagggggttgtccctctgnaagattttttgggga

SEQ ID NO: 1489 - DNA, 435 bp, Homo sapiens
  Genbank Accession No. W39635
  unsure (1)..(435): n = a or c or g or t
ggcgtagacgagttaagtcctggtctgcgtggaggtcgacgactccgtccagactacggacctgtctgggtctcagccgccaaagaccccgtccggtangtgagtggctcactttgagggcaagccttctcggatcgaggcttcttcatggccgctcagatcgtgagccagcgcgcgctgctctctttgcggaggatggcgtctaatgagcgcagttgattcgaggtgggcgctggggcacgtctcccttttggcatactgtttgaggggtactgaggtgaaagggcggtcactgttcgggtcgtttttacacagcggttgtgcgccccgtccctgccagtcttaatgtcttcatctccttggacacgttagaataantgggccgggatctccctgacttttgcttggcgatgcggctgggccttttgtaaggcg

SEQ ID NO: 1490 - DNA, 481 bp, Homo sapiens
  Genbank Accession No. W45137
  unsure (1)..(481): n = a or c or g or t
tcggttgaaaatgtatttatttttttcaaatgatctttttcaagcaataaataaaaccagacatattgacttctaaaaaacaaaaccaaacaaaaaaaaaatcccctaaactatatacatcctacaggaatacaggcattatcaaatgtagaaatggtatcactctgaaagatggggctatttacacaagttacaagaattgcgttgctgtctttaagaagtctcctccttgnataactcataaactctaagggagagagagtactgggtggggaagcggggttcaaagaggagacatcctccattctttattgatggacaagacagtctcaaggaaaaaaccttccattatcccaaaaccaccggtanttggagtccccttaaaccaaggggctcccacaggattcaggcctgggntttttccaaaaaaggcctggggaaaggggtggcttnccacttccggggaacttnccccagggng

SEQ ID NO: 1491 - DNA, 622 bp, Homo sapiens
  Genbank Accession No. W55956
  unsure (1)..(622): n = a or c or g or t
gtatcctgcacgtggnaatattcagaattgtagatagcataactctccctgctcctattcttttgagcctaggtataattttttttttttttttttagaaaaagacatatttagctttaatttctatttatgctaaacatatttataagtagtctgtcaatataataccaactatttttatttttacataattcaattatttcatttgacatgtctggcagactcaagacattaagtaaaaaattggaactatgatttttctttgtcattttttaaaaaagaattattttattaacctgctggcatataatctggagttcttttcacaaccttactttttctgatttgctttattgaatgattgaatactcatttctttctaaaaatatgttgtaaattctcccttggcaagatttctccctatgaggggagttattatttgagtctgccaagtggttaccatgggggcaaggtgccatgatggtattcctggggtgcattgggtttttgcgcantggaaanttaagacacctatagtaagtggactcattcatagatgaggttcagaaccctttacggtcncgggagaaggcctctgtccggacaggcagaagagtggttt

SEQ ID NO: 1492 - DNA, 582 bp, Homo sapiens
  Genbank Accession No. W56118
  unsure (1)..(582): n = a or c or g or t
gaatggagtgaagaaaggcagtatggcaggcaccagcaaagagttgagggctgttgctcttaaaaattattttttttattattattttgaaagtatggaagttttccattcactggggaaaggagggaaaagtgcatttatttttatacagagttacttaattacctccaaaacacatatgttggaaatcgcttttgctggtgcaaagtatattaatgagcaggaatacatacattgaggttatgaatagagagctcaatttgtacctttgctgtcttgctcaagcttggtatggcatgaaaactcgactttattccaaaagtaacttcaaaatttaaaatactagaacgtttgctgcgataaatcttttgggatttttgtgtttttctaatgagaatactgtttttcattacctaaagaacaatttgctaaacatgagaaatcactcactttgattatggtatagattacataggaagaacaatcacatcagtaagttatagtttatattaaaggtaattttcnggtggccccataaccaatataccagcantccatgatagcatttcagcatttcccaag

SEQ ID NO: 1493 - DNA, 614 bp, Homo sapiens
  Genbank Accession No. W58252
  unsure (1)..(614): n = a or c or g or t
gagtttagcttgtggtaaatgactcacaaaactgattttaaaatcaagttaatgtgaattttgaaaattactacttaatcctaattcacaataacaatggcattaaggtttgacttgagttggttcttagtattatttatggtaaataggctcttaccacttgcaaataactggccacatcattaatgactgacttcccagtaaggctctctaaggggtaagtaggaggatccacaggatttgagatgctaaggccccagagatcgtttgatccaaccctcttattttcagaggggaaaatggggcctangaagttacagagcatctagctggtgcgctggcaccccttggcctcacacagactcccgagtagctgggactacaggcacacagtcactgaagcaggccctgtttgcaattcacgttgccacctccaacttaaacattcttcatatgtgatgtccttagtcactaaggttaaactttcccacccagaaaaggcaacttagataaaatcttagagtactttcatactcctctaaggtcctcttccagcctcactttgagtcctccctgggggttgataggaattttcnctggctttctcaataant

SEQ ID NO: 1494 - DNA, 541 bp, Homo sapiens
  Genbank Accession No. W60864
  unsure (1)..(541): n = a or c or g or t
gtgcttcatgtttattttaggagagtattggggagcggtctggtctctcagggatggcactctgtgggtctgtatcgcggtaggagttggaatgaggtgcagggtgggcttcaggaatggctggatccaggtatcatgttgctgactgtcatgattcgggctcatttgtaatacggcctctgtgtgttgaggtcgctgtagacatccgacctctgaccctggagctcctgataaggcgactcggtctcaagtgatacgctgtttccgggtcgctgcctccgcancccctcgcccccgagggaccaagccggcccaggaagtacacggccagggcaatnagcactgtcagcaccaggtctcccatcacgatcccttgccagcacgcccgggctcaaccgtagagcaactgcaaatccgctctggggcctggggcctggacaaggacggagaccacttacagccaagcaggaagaggcaggagcaaggaaccttgctgcaagggttcaagtccccccatgaaagccggatgctgcctcgtgcc

SEQ ID NO: 1495 - DNA, 607 bp, Homo sapiens
  Genbank Accession No. W61000
tttttttcatttttgcaacaggcttttattacttttttttaaaacccatataagaaagacatttaaaaagaaaatatcctggaaacaaacacttacacactgagcaacacaaccaaagaaggcactaccagcagttactcccacctctgggagggaacaggtactcgatactatacttttttcagaggtttagacctcagcataggccttgggtctaactgtgctttagtaaagtctgaattgtccaataattttctcatttcataaacacccttatctctttatatatagctatatgcctttatgtgtatatatacatgactttttttttccttctcaaaaataaaatagccatccccatagagggaggttctcagcagcattcacagcggttgcagcaggagccatgccttctattaatgttagagacatgcaggacgaggaaaatgactctccacctgctccctttaatatacagcagggagagagttctaaagggagggaagtgataaggtgagcatgagatggtaaccagggttttgtggttaaaaaatctagagtgcgagctgtgtgccttgaaccctggagctatgccagtcatcgcgag

SEQ ID NO: 1496 - DNA, 400 bp, Homo sapiens
  Genbank Accession No. W61185
tcagttggtaaaaccagctgctgatttattaggtatctagagcggcaggttcatcctgttccagataggatactcatctgcagcaaaggctacttagagatatttcacacctgctgatgtgggttggactacatcttcctataactcgttccagcattcttccaacagatgcacacgctgcttctccttccgggaaacagcacatggagtccaagcacttgatacctgcatttgtttcagtaagctgtgccttttcagtacttgtagggtggaggtgtcggtcaaagaccttctttatgatatcaagaaatagacatgtaacaaccattgagggattatgggcaaaccaagcagaaccactttgacagggagctgaataaacacaaaatacatattcctg

SEQ ID NO: 1497 - DNA, 604 bp, Homo sapiens
  Genbank Accession No. W63576
  unsure (1)..(604): n = a or c or g or t
gancgctccgaccagacagcgtctcattggccaaatatgggagggttccgcttaaagaccgcctcttactggccaggagtggacttggttagggctaccttctcattggttgcagccagagnacttctgcccgggctgcctctcccccgctaggcctggtgcctctggtggaggctccctcccttggccgtcccaatagagccnggggtacttccactggccaggctcccgggcatctgnttgaccccagcctggggaggagggctggtctcngctcctcaggggcttagtccgtcccaccccttcccttccctnncgccccgggcccaggcccctcagctgtcagcatgttttgatggcctcccactgncccacacgccgcgggacctccaggggcgactctagtggcctgaggagatgtatttataggccccaagcaggctgctccccctcggccggtgcccaggatggcttcttccggcggggcttggcaaantttttaataaatgctttccctcaaaaaaaaaaaaaaaaaaaaaaaaatgttcggcgaanttattccttagtgnggtaatttacttggantggcgtgtttaaaagtgtt

SEQ ID NO: 1498 - DNA, 627 bp, Homo sapiens
  Genbank Accession No. W63676
  unsure (1)..(627): n = a or c or g or t
tcaaatactgagatgtttattgcattttaaaaatatccacactcttaaatatcctgtttcaaattcctcctaaaatcctttacagcacacaacatcaactactgcagtagcgttctcacaatattacacttgaaaataccatttaggaacaatattttaggaaatagagggtttaaggcaagacattcatttggaaaagttaatttctctctatcatccagattgacacgattatttttccacctcttcagtgccttgggatacgcaacatacattcagcaacagggcacgcgtgtgaccctacggacaagtgctgaggttgggagtgcccactgaaatatggaaatattcttacataaggcgtggcccacggggacatggcatgggagggcttgtttcactccatttccaatctggtgtacaggaaattccttatctataactgtccatttccccccagttaactgcttttccaacaaactcaaaccccttgaaaangtgctaagattggttctgttaacancaaaaaaaaaaacagcctcagagccttcccgatcactgtttagtgatgaatgntcgangcatttcttgatctgttgcaacatgttgttgtgaaantgtctgtcc

SEQ ID NO: 1499 - DNA, 495 bp, Homo sapiens
  Genbank Accession No. W63785
  unsure (1)..(495): n = a or c or g or t
agtaattaaaacgttattttcttttctttaaaaaatggaactaaaatacgcttcctattaacttctaccctttgtcctacaccaattgtctaggaccatccaaaaaaacctaattctttttctatgttagaaatatttattaaatgcctaccatactaggcatggaatgaggtacaaagatgaaacaatccctttaattaggggtagaaagacaaaagcataaatttcataacagagctatacaaaatctgtagcgagagtaatcacaactaccagaaagtctgagaactacctcaaaataaacactatttaagatgtatgttgggagaatgggtaaaatatcagcagggtccagggtagaaataaaaagatactccagacattcctgggaaagagaacagcatacataaaggcaaagaatgacaaaaggcttaatccacctagaagacataaccattatnaatatattggcacctgaaaacaggcttaaaaaca

SEQ ID NO: 1500 - DNA, 599 bp, Homo sapiens
  Genbank Accession No. W67816
  unsure (1)..(599): n = a or c or g or t
cgtgaagtctttcagtggagccagggtctggtttgtcgtgaggagctccgcaatngtcctctcaacagagcgccgtttccgccaaagnttttccaaggggtcgtcccagggccccgctccgtgtcccgccccggcgcccaccccggcgccagcctcctcctcctcctgctgtggctccggcaagggctgctgcggcgactcaggctgctgcggctccagctccaccagttgctgctgcttcccaaggagacgccgtcgacagcggagtagtggttgctgctgctgcgggggcggcacacganggtcccaagcgctccaacaaccggagctcaggatgctgctccggctgctgagaggcccgcaacccccagcgctgcgctaagagaaacccgcccagcccagagcnggcccgccccnttgcggctcccacgcggggctgggcctcggagtttgccccgtaaagcgaattgcactttgatgttcagaaacccactttgttctnagccacgcaaaactccctgaacccgatgtgatttttctcccggggaattcgagagccatgcntggganatggaacctaattgtttaaangggcttga

SEQ ID NO: 1501 - DNA, 609 bp, Homo sapiens
  Genbank Accession No. W68223
  unsure (1)..(609): n = a or c or g or t
ggagaaaagccgtatnaatgtaaggagtgtggaatagccttcactcagngtgcccagctcattagacatcagaaaactcattctggagaaaaaccctatgagtgtagtaagtgtaaganatcttttgtgcacctgtctaccctgattgaacattggagaattcacactggagaaaaaccatatcaatgtaaggactgcaaaaagaccttttgtcgtgtgatgcagttcactctgcacaggagaattcatactggtgaaaaaccctatgaatgcaaggaatgtnggaaagtccttcagcgcccattcttctcttgttactcataagagaacacacagtggagaaaaaccngtataaatgcaaggaatgtggaaaagccttcagtgcgcactcttcccttgttactccntaagagaacacacagtggagagaaccctatacatgccatgcctggtggggagggccttttaatacttcctccacactttggtccacattatnggattccatactgggtggaaacccnttcagtgcagtcatgcgggaagtcctttagtcccttagctgcaggtctcacctnctcggcnctggtagatgtggtatggggaatt

SEQ ID NO: 1502 - DNA, 579 bp, Homo sapiens
  Genbank Accession No. W68521
  unsure (1)..(579): n = a or c or g or t
ccancgnacatcgacggccatggcgcgttcgaacctcccgctggcgctgggcctggcctggtcgcattctgcctcctgncgctgcacgcgacgcccgggcccggccgcaggagcgcatggtcggagaactccgggacctgtcgcccgacgacccgcagtgcagaaggcggcgcaggcggccgtcggcagctacaacatgggcagcaacagcatctactacttccgagacacgcacatcatcaaggcgcagancagctggtggccggcatcaagtacttcctgacgatggagatggggagcacagactgccgcaagaccaagggtcactggagaccacgtcgacctcaccactttgccccctggaagcaaggggccgcagaaggaagaagctgcnttgttgacttttgaaggtccttgtggttccctggcaagaactcctctcaagtcctaaaagcacaactgtgtgcagatgtgataagtccccgaaggcgaaagcaatttgggttttgggcatggtggaaggcatttcaagtccgtnggccgtatctgtnaaaataaatggcaattctgcttntttca

SEQ ID NO: 1503 - DNA, 510 bp, Homo sapiens
  Genbank Accession No. W68630
  unsure (1)..(510): n = a or c or g or t
atttataaatttattgcctgttttattataacaacattatactgtttatggtttaatacatatggttcaaaatgtataatacatcaagtagtacagttttaaaattttatgcttaaaacaagttttgtgtaaaaaatcgcagatacattttacatcggcaaatcaatttttaagtcatcctaaagattgatttttttttgaaatttaaaaacacatttaatttcaatttctctcttatataacctttattactatagcatggtttccactacagtttaacaatgcagcaaaattcccatttcacggtaaattgggttttaagcggcaaggttaaaatgctttgaggatcctgaatacacctttgaacttcaaatgaaggttatggttgttaatttaaccctcatggcataagcagaggcacaagttagcnggcatggtgctctagactggtagagccgagccaccggtgagaagcaanggacagcagcaggaagagccatgggacccccc

SEQ ID NO: 1504 - DNA, 446 bp, Homo sapiens
  Genbank Accession No. W69365
ttaaatgtctcatctcagtttattagcctctacagttctaaatttactaaagagggcaaaaatacaggttttgaaagcactccttcccaggctcacaggcagcagacatgacttagaaggaaaaagggcatacagcggttcttcaagatttaatgagctcgactctcctggctcccagcaggcaggctggctgtcaggtaagcctcttccatccaaggtggaaggatcacagtccctccagttagacaggaggaaaattaggacccaaaaagatgaagttatttgcccaaggttctacagctaaagtaggattaaaacccagagctctggccgagcgcggtggctcacacctgtaatctccggcacttttggggaggccgaggcggggcaagatcaccgagggtcaagagatcgagaccatcctgggccaacatgggtgaaacccc

SEQ ID NO: 1505 - DNA, 604 bp, Homo sapiens
  Genbank Accession No. W72043
  unsure (1)..(604): n = a or c or g or t
tttttacctcatggtctctctttaattgaccaaaaccttccatttttctctaaatacaaagcgatctgtgttctgagcaacctttccccgaacacacagcttcagtgcagcacgctgacctgagtatccaccatgtgccaggcaagtgctgggcaaccgaggcaccaaggtccgggccacctgcccgcagcaaggcccagctgaggtggtggagggagcccctgaggtcaggggccgtttcggttcagggtggcaggtgtccagcactggggtatggcgtcgaggcttccatggggtgggggaggccagcttccttctgacaggatgggcgcatacagtncctggtgtgatttntgcacaacccgtgttccaggttgcacatcctcccaaaggagacacccagaccctttcagcacggggcgggcaagttgctgcggcggaaggcagnattttnagctgntgaggnaaggtcattggattcaaagtgtttttatcnggtaaaangggttggtcttnaatttcttaaacccatattgggtaagtgaatgataaaaaattgggttggggtttaaganaaagtggaactctttttgaaaaagcaagt

SEQ ID NO: 1506 - DNA, 604 bp, Homo sapiens
  Genbank Accession No. W72424
  unsure (1)..(604): n = a or c or g or t
gacttggaggaagagactttatttggccccagccctagccccacagccaagacagtttgacataacaggccccggggccntggttgggtagaggcagggtggcctggcctcctgattagtggctgtggcgtggcncaatgactgtggccgtggcgtggcatngtgatcttggccactgtggtcttagggggtgccctccccgaggcctggcttatggtggtggccagggcctcgtcaccctcgtgcatcttctcgtgggaggcccaggttagcctcgccatcagcatgatgaactcctcgaagctcagctgcttgtctgcatttgtgtccaggtcctcccatgatgtgttctatganctttttcaatcntaatcnccctctttgaggaaattttgcagatcctttcgnaacaagttctttgnattcccccgggttaagggtgtctggggtgccccagtttaaagagtantggtggaaaggtgttgaataagggtcccaangttggggttcagctgggaaattttgnaagtcatcggcttggaatctggttaaagccgactcgtgccgaattnttggccccanggcaaaatccccaaagggggtt

SEQ ID NO: 1507 - DNA, 424 bp, Homo sapiens
  Genbank Accession No. W72885
  unsure (1)..(424): n = a or c or g or t
tttttttttttcaatagagaatctggatctattgaaacatgtttaaaacggggttggtcacaacaggatgggcacaaatggnnnnnngggaggggagtggggccgcaccagcccctgccagtgcctgaggtgcagctnggcgagtncttttgcttctgcttctccacgctggtggttcgagatggtcccaagccccactggnganggccctgccttgccctgcagaggcagggtnggctccacttccccatctcctcccccatgggctgcaggggcatttatgatgcccaacaggtggcactgtcgcgctccttcctccctgtctccgtggctcagaaacaggttaagggtagaggtagatggggagacgtgggggccanacagtctccggtggcagtgagggagcttgggaacctgaaggggn

SEQ ID NO: 1508 - DNA, 677 bp, Homo sapiens
  Genbank Accession No. W73855
  unsure (1)..(677): n = a or c or g or t
tgaacatgaagccggccactgcctctgctctgctcctgctcctgctgggcctggcctggacccaggggagccacggctggggtgcggaccgtcatcactgcagaaacgtgcaggcagagcgantcagaactacaattacaaccagcatgcgtatcccactgcctatggtgggaagtactcagtcaagacccctgcaaaggggngagtctcaccttcttcctcggcttcccgggtgcaacctggcctgctgcagtgggtgaagttttggtaggcaatttcttgcaaccaccaccgaggccccgaaaagcactggtcgtcagggagctcctccccttggcccccagcctgtgccagccctggcccggctgccacacctctgtttcctaggctggggacccagcttgtctctccttgtttcttcccactgcactgtggtnttcagtggccaccagcctcgtcacatacaccagcattttctgtactctccctttggtgactgaagtactgtgacagttctcaggaaggagganttctacttttgagttntctgtggaaataaaacatgaanttgtttcctaaaaaaaaaaaaaaaaaaaaaagtggggcgaanttttccctagtngggtaattagttgatgcgtgtttnaagcgnatggnaactgggtccaattaacctt

SEQ ID NO: 1509 - DNA, 580 bp, Homo sapiens
  Genbank Accession No. W74442
  unsure (1)..(580): n = a or c or g or t
aaatgtttaaagagaatttattctatagagtgcattcttgcactctataggtgacagaaaaacaaactgtgctttaaataccaaacaagtaaatcagaaagcttattttctatttaaaatatatctaagacacacttatataaaaagaaaacagaccctcctaacatgtaacattaccgttcgtggcaattgttctcaacctttcactctccttttgaccttagcattaagctcctttgctcacttctgagctctcagttacagttcttgaggtggcatcctaaccaatttgcactatctttcaggtgaagcgctggatatttaccagataattgaactcaccaaaggctccttggaaaaacgaagccagcctggaccatagcactgcctggaggtctgtatttgctcccgtgganttcatcggggtgggtgcaggctcccaaactcaggctttcagctgtgctttttgcaaaagggcttgctaaggccagccatttttcagtagcaggacctgccaagaagattccttctaactgaaggtgcagttgaattcagtgggttcagaacctcgtgccgattc

SEQ ID NO: 1510 - DNA, 675 bp, Homo sapiens
  Genbank Accession No. W74476
  unsure (1)..(675): n = a or c or g or t
gagtttggctatttattgatgccacacagagggaggttatgattacagtctggttttaagtactgaaatatccaccaaggtaccccttgaggaggctgggtagaaggggaaatggcaaagcagcacagagatgcagggagggcaatgggctgggccgtgtatgtcatacaattattttggaggacaatgatgggtaggattgtgctttacccaccatgttttttagtaacataacttagaatactacttgaataagcagtacagacaacaggagtagcatcaaatatgttagctaggttgtaacaccaggcagttcatgtcatgtggcctctccttcaaaagtgaatcactgtggaccaagcaccagaaacatcgtcccaaagattcatcttgaagtcagaaaggagaagagctaagacctgcactctctggagtagcagtgtgcagctttcagagtttggaagattttagtcactaaatgggatgttattactaaaaccatataaccctcacattgtgttccagatctggatgaaggtatcagaacattccctgnctatctgaagctcncgtgggtgtcaccgaacntgctgctcggagttgacggngtgtgccctcttagaaaccctcccaaacaagctcctcaaggggcctgaagntccggggttttttttt

SEQ ID NO: 1511 - DNA, 663 bp, Homo sapiens
  Genbank Accession No. W74591
  unsure (1)..(663): n = a or c or g or t
tttaaactcaattcagtaaatctttattgagctcccacggggtgcgtgaatttaggatctataatttacataagtaggaaagtgttactttagcccccttttttaaaaaaaagcaaattacaatttctgtatatatttcaagtgaatcatttaatgtgagtgaggctcagttaggtgttaccataagtattaacagaagaaaaagggaaagcacaaacattttccctctaccagaaaagggtctgatgtaagataaactagcctgttggtttaacaatagctcattaaaaaggccagagaatctgggagaagatgtacttggaagcactgtcctctgagggcccattcccaagggacagcaaaatactgaaaaaaattaactggctcaaaaattatattgagagataaaaagagttagtcacagcttagaaaaaaattccagaataaatgacactagctagattagtaattctgatgtttccttgtcatagtactctgtgcgaaacagagggctacaactggtgccctttgaccagagtggttttaataatagatctccagtgcaccactgtatttccagtataatctggtattgtncctcggccgatctggctcgagcaaattcccatgtggcggataatcgancagcangtgtcngggaat

SEQ ID NO: 1512 - DNA, 467 bp, Homo sapiens
  Genbank Accession No. W80832
  unsure (1)..(467): n = a or c or g or t
aaaaactgtttttcccattaattttcatcggcttctccgcgccggggtcgcacgtcctcatgagcttcgctgggctggagacagctagtacactctccgcagtgctgtgaaacctgattctctgcgtcgactccagagtaataggggcgccctctagtgaggccggaggaccctaccagagctagcatctttctgaaccaccccagggggacgttaggtggcagtgatgaggcaggtcacccactcccccgtcctggatgccactcagctagcccagctgagtgggggtgggaaggaatagcgttttggagttgattccctaacttcccacctggcttcttgtgaaggtggtgtttgagggccaaggtaggtgtcagcaaggcatagaaagataaatcccaagattcttggcaagtcttgcaatcttatgtagcnaattttgggaactgaagctcaaagcctcgtgc

SEQ ID NO: 1513 - DNA, 622 bp, Homo sapiens
  Genbank Accession No. W81116
  unsure (1)..(622): n = a or c or g or t
ggaaaatcaaaatttttttattaatttactggatttcctatacctaacaatccttaaaacaactatcaacagctgcaacacaaaccacaggcaaaatgaaaaacagatgccccagacagcaccccaccacatggcacacacttaataaggaacaaaatcctacagggtgctgacataactcgctttaagcatgcaatgattcctgcagtgctccctggcaatcaacctctctgcaccctggggctggatacttcaaagtctttgttctcttaacaggtttgaagtcaacatggcaagttaaggacaagttagatgagatccccctaagttcataacgtggagttcctcttgctctccaatgttcatccacaagttacagggtccaatccccctataagagatggcttaagcatcccaatgggggaaacagcctgccagccacatgggcagatttccatntatttccaagtcccgcaggccacaagactggaaagccatagagaattggacagctcaagcctcacctggaacaatgtgtttgaaagggggtctctcaggacagacactttggatttcataagttngggccattttgggcccaatataccaattggngtgtcat

SEQ ID NO: 1514 - DNA, 648 bp, Homo sapiens
  Genbank Accession No. W84421
  unsure (1)..(648): n = a or c or g or t
ttttataaaagcttgtttttctttattagaatacttttttcaattctgatttgtcacaatttagattctttttctaagaataagcagaaatttacaaaatttaatttttatttatacattcatccgttcaatacacatttcaagaaagctgtattgcaccctttcagtggtagttacaggacaaagaaacaaaataatccaagagagagaccaacaaatgtatatttataacacagagtaataaacacaaataaatgtggagttatttaagcatgtaagatggtacatgctctaccaggtatgggggcttctctaagacacaagatcagattaaagtcttgaaagataatctggggttagtcaagcaggtagaagtgtgaagagcactttctgagcggaatctccatgtgccaagtctagttcaagagactggatagagattagcaatttggagaatgcaatattaagaaatggcaaaggtgagcctacagagattccaaagttgcatagtgaggtttgtgtttgagaaagtggccncaggcagcccccaaaagagggttaatagaaaggagctgaggtggaaatcaggcttgtgttcancagtgtggcanattgggagcatgggagatctgnctttnaaggncaagg

SEQ ID NO: 1515 - DNA, 619 bp, Homo sapiens
  Genbank Accession No. W84893
  unsure (1)..(619): n = a or c or g or t
tttttttgcacaaacagttttatttgatgaaccacagtgactaacaggatcagaagacagtgcagatattctgaagaaggcactgggggaggtaagggggtatcacagcaggcagcctcctctgcttctgtcccagttcacagatgagttccaggcaggaagtctctgcaggtcacccacggcggcctcagagggacaatttcttcccttctagaagcctcttccagtgttcactggatgctttgaggacagctctgggcagaggaggtgactctgtgaaagatgctatcttaagatggggagactaggctgtgaggagccccttcccctctcctcctccctctgcccccagagctggcgtcattccagggagggtcaagatgtccattcacatcaagctgggcttttcttatctccatcgctcatgtcttgtccttcactttcatagtcctccaagaacaaaacccggaatagacactcccagcctctagctcacaaaggcccactattaatttcatcctcacggttctctggcagtgtagnatcaggtatttganattgtccagnccattccagtcccaaccagcctggtgcgaatnttggctgggcaaatcccata

SEQ ID NO: 1516 - DNA, 446 bp, Homo sapiens
  Genbank Accession No. W85857
gagatgaagtctcgctctgtctcctaggcttcagtgtagtggcacagtctcaactcactgcagccttgacatccttccacctcagtagttgggactataggcacatgccactatgcctggccaattatttttattttttaatttttactagagacgaggtcttgctttgtttcttaggctggtctggaactcctggcctcaagcaatccccccaccaccctctcccaaagtactggtattataagcatgagccaccatgcctggggtatctgtgtcttttccatttatttgtagagttactttgtcttttactaattcaatgatctgtttaatcttttattaaattataaaaataataaatacttttaaataagtgaaaaatgtccttcactcttgagacccataatcttatctcaggaaataattgcaattgagaaaatgggcca

SEQ ID NO: 1517 - DNA, 625 bp, Homo sapiens
  Genbank Accession No. W87383
ataatttggataatacaatttacattccttttgctagaagcactcctgaaaagaaatcaccactttctaagagactatcccctcagccacaaataagagcagctacaacacagctagtcagcaacagcggacttgctgtctctggaaaagaaaataaactgtgtacacctgtaatctgttcctcttcaacaaaggaagcagaagatgcacctgaaaaactttccagagcatctgatatgaaggacacacagctcctcaagaaaataaacggaagcaattggtaagatccctgctgccaccaaggagccagaggaacaaactgcatgtcatggcccatcaggttgtcttagcaacagccttcaagtgaaaggcaatactgtctgtgatggtagtgttttcacttctgacttgatgtctgactggagcatctcttcgttttcaacgttcacttctcgtgatgaacaagacttcagaaatggccttgcggcattagatgccaacatagctagactccagaagtctttaaggactggtcttctggagaaatgaattcagaagaaaactcatcaggtgcttctttttaaaactagacttggctatattgaatgtgtattttctttagtga

SEQ ID NO: 1518 - DNA, 456 bp, Homo sapiens
  Genbank Accession No. W89075
  unsure (1)..(456): n = a or c or g or t
gattaaacaacatcatttatttgctcacagttctggaggttcggnaagtgcaagatcaaggtgtggacacgtttggttctcctgaggcctcttcccttggcttgtaaacagttgccttcttgctgtgtccttgcgtggcctttcctctgggtgcacatctccatggtatctcttccttttctgtagtctcagctactctggaggctgaggtgggaggattgcttgagtccgggaggcagaggttgcaatgagctgagatcacaccactgcacgccaaccataaaaagtgaggtacccaaagagtgcagatataaaataaattgagaaaacttaaaggcaatttgcngtattgggnaacatttctgcattcttttcttttgaaggactttgaagttcacagtatatgggcaatattgaggtatggcagagaaatgaaaaagccatggttggtaaggg

SEQ ID NO: 1519 - DNA, 594 bp, Homo sapiens
  Genbank Accession No. W91952
  unsure (1)..(594): n = a or c or g or t
tagcagcagtatctattaatacatgccttttcctcccatccacctcccccgcacacacacaaagatgacctgggacatgatttttttattcccacattttcttggagcacaaacaactttgttgaggattttggaaggaaagcacaactgggtcctttattcatttctgggacagaaagagggtcagtggacttttgtgggcctccagcttctctcagagtctccccctctgcagcccatcctgggacgtgtattaactggagggaagatgggtcttgcagtacatttgttttgcccagccatcactcttttttgtgaggagcctaaatacattcttcctggggtccagagtccccattcaaggcagtcaagttaagacactaacttggccctttcctggatggaaatatttcctccatagcagaagttgtgttctgacaagactgagagagttacatgttggggaaaaaaagaagatttacttagtagaactggaccaggagcattaagttctgaaattttggatcatcccggaaatgaagcagtgtagccngccctctcatcaatccgtcggggtgccagactcaaggtttt

SEQ ID NO: 1520 - DNA, 352 bp, Homo sapiens
  Genbank Accession No. W93079
  unsure (1)..(352): n = a or c or g or t
gagacagggtgtcactctatcacccagggtggagtgatgattgagactctgcctcaacaaaataaaaataataatatatttagacatattataagagtagtcatctagcatcctcagaaaatagctaagcaaatataagttattttcncttttgccagattcatcccaaatgttcagatgtttaagagtgattacataggagaatacataagaaattggtaacagtggtttcttccagaagagaaagctagaagactaaaggaagaggggaaggagacttttttgctgtataccttttccgtatttttaaattcttttagtttttttggtttcnctgtgttttaaatttttt

SEQ ID NO: 1521 - DNA, 421 bp, Homo sapiens
  Genbank Accession No. W93113
gataccagatgcatgtaatgaaatatcctgttaatgtagcactgtaaggaagtcatatacagaataagaaccaaatttttcaagaagacgagaagtagctatttcacctttctttcatttaacataaaaaaacggtgcaggcagcctctccattttccctgaatgtcatcttttggctgatggcagaagccaaccactatttgcatactgatgctcccataattacagttgagtcccttaaacatagtctccaagttacgatttgtttgcaatataatatagcagggttaccaactttataagcaatgctatgtgtcattttgctttaggctacagtatcacattcatcttgtaagcatcaaataaatacaattaaatatgacaggtctttaaactgggcttgaagggtgatgggcattag

SEQ ID NO: 1522 - DNA, 426 bp, Homo sapiens
  Genbank Accession No. W93868
  unsure (1)..(426): n = a or c or g or t
atcagataaaactaaaagatttcaccattacagccctgcctcataactaaataataaaaattattccaccaaaaaattctaaaacaatgaagatgactctttactgctctgcctgaagccctagtaccataattcaagattgcattttcttaaatgaaaattgaaagggtgctttttaaagaaaatttgacttaaagctaaaaagaggacatagcccagagtttctgttattgggaaattgaggcaatagaaatgacagacctgtattctagtacgttataattttctagatcagcacacacatgatcagcccactgagttatgaagctgacaatgactgcattcaacggggccatggcagggaaagctgacccctaccccagggnaagtnatagcttctttaaaaggtcttccaaagggntttgg

SEQ ID NO: 1523 - DNA, 408 bp, Homo sapiens
  Genbank Accession No. W96205
  unsure (1)..(408): n = a or c or g or t
ntttatttttaaagaaggaagangctttattcggccaggagcatcggcaggcttgcgtctcaagaactgagtcccagagaaagagttcttggcccttttaaggncttacagctctaaggggtccacatgaaagggtcgtgatagattgaacaagcatggggtacatggctaggtgggggtggtgagcaaggcaagtgtttctccataccattgtctgtgatctatagacagcacaagcggttagggtgtgggttaatctttaacctacgggcctggcaagtggtgctgatcagtctgttattttttcagtttttacttcctccttttctttggagataggggacagtaggagaaatggcctctctcctcattcccccctttgagaacctcactcactagtgggagttc

SEQ ID NO: 1524 - DNA, 1761 bp, Homo sapiens
  Genbank Accession No. X00351
ttgccgatccgccgcccgtccacacccgccgccagctcaccatggatgatgatatcgccgcgctcgtcgtcgacaacggctccggcatgtgcaaggccggcttcgcgggcgacgatgccccccgggccgtcttcccctccatcgtggggcgccccaggcaccagggcgtgatggtgggcatgggtcagaaggattcctatgtgggcgacgaggcccagagcaagagaggcatcctcaccctgaagtaccccatcgagcacggcatcgtcaccaactgggacgacatggagaaaatctggcaccacaccttctacaatgagctgcgtgtggctcccgaggagcaccccgtgctgctgaccgaggcccccctgaaccccaaggccaaccgcgagaagatgacccagatcatgtttgagaccttcaacaccccagccatgtacgttgctatccaggctgtgctatccctgtacgcctctggccgtaccactggcatcgtgatggactccggtgacggggtcacccacactgtgcccatctacgaggggtatgccctcccccatgccatcctgcgtctggacctggctggccgggacctgactgactacctcatgaagatcctcaccgagcgcggctacagcttcaccaccacggccgagcgggaaatcgtgcgtgacattaaggagaagctgtgctacgtcgccctggacttcgagcaagagatggccacggctgcttccagctcctccctggagaagagctacgagctgcctgacggccaggtcatcaccattggcaatgagcggttccgctgccctgaggcactcttccagccttccttcctgggcatggagtcctgtggcatccacgaaactaccttcaactccatcatgaagtgtgacgtggacatccgcaaagacctgtacgccaacacagtgctgtctggcggcaccaccatgtaccctggcattgccgacaggatgcagaaggagatcactgccctggcacccagcacaatgaagatcaagatcattgctcctcctgagcgcaagtactccgtgtggatcggcggctccatcctggcctcgctgtccaccttccagcagatgtggatcagcaagcaggagtatgacgagtccggcccctccatcgtccaccgcaaatgcttctaggcggactatgacttagttgcgttacaccctttcttgacaaaacctaacttgcgcagaaaacaagatgagattggcatggctttatttgttttttttgttttgttttggttttttttttttttttggcttgactcaggatttaaaaactggaacggtgaaggtgacagcagtcggttggagcgagcatcccccaaagttcacaatgtggccgaggactttgattgcacattgttgtttttttaatagtcattccaaatatgagatgcattgttacaggaagtcccttgccatcctaaaagccaccccacttctctctaaggagaatggcccagtcctctcccaagtccacacaggggaggtgatagcattgctttcgtgtaaattatgtaatgcaaaatttttttaatcttcgccttaatacttttttattttgttttattttgaatgatgagccttcgtgcccccccttccccctttttgtcccccaacttgagatgtatgaaggcttttggtctccctgggagtgggtggaggcagccagggcttacctgtacactgacttgagaccagttgaataaaagtgcacacctta

SEQ ID NO: 1525 - DNA, 1371 bp, Homo sapiens
  Genbank Accession No. X01683
ctgcaggggggggggggggctgggacagtgaatcgacaatgccgtcttctgtctcgtggggcatcctcctgctggcaggcctgtgctgcctggtccctgtctccctggctgaggatccccagggagatgctgcccagaagacagatacatcccaccatgatcaggatcacccaaccttcaacaagatcacccccaacctggctgagttcgccttcagcctataccgccagctggcacaccagtccaacagcaccaatatcttcttctccccagtgagcatcgctacagcctttgcaatgctctccctggggaccaaggctgacactcacgatgaaatcctggagggcctgaatttcaacctcacggagattccggaggctcagatccatgaaggcttccaggaactcctccgtaccctcaaccagccagacagccagctccagctgaccaccggcaatggcctgttcctcagcgagggcctgaagctagtggataagtttttggaggatgttaaaaagttgtaccactcagaagccttcactgtcaacttcggggacaccgaagaggccaagaaacagatcaacgattacgtggagaagggtactcaagggaaaattgtggatttggtcaaggagcttgacagagacacagtttttgctctggtgaattacatcttctttaaaggcaaatgggagagaccctttgaagtcaaggacaccgaggaagaggacttccacgtggaccaggtgaccaccgtgaaggtgcctatgatgaagcgtttaggcatgtttaacatccagcactgtaagaagctgtccagctgggtgctgctgatgaaatacctgggcaatgccaccgccatcttcttcctgcctgatgaggggaaactacagcacctggaaaatgaactcacccacgatatcatcaccaagttcctggaaaatgaagacagaaggtctgccagcttacatttacccaaactgtccattactggaacctatgatctgaagagcgtcctgggtcaactgggcatcactaaggtcttcagcaatggggctgacctctccggggtcacagaggaggcacccctgaagctctccaaggccgtgcataaggctgtgctgaccatcgacgagaaagggactgaagctgctggggccatgtttttagaggccatacccatgtctatcccccccgaggtcaagttcaacaaaccctttgtcttcttaatgattgaacaaaataccaagtctcccctcttcatgggaaaagtggtgaatcccacccaaaaataactgcctctcgctcctcaacccctcccctccatccctggccccctccctggatgacattaaagaagggttgagctgg

SEQ ID NO: 1526 - DNA, 3284 bp, Homo sapiens
  Genbank Accession No. X02344
gagcccgtatgtcttcctgcctttaaggcatcgcagcctcctcgcctggaggccccggggctcgctccgtcggaccccgctccagaacccgcccagcgcgcaggataccgtgtcccggcgcgcaaggccagagaggggcgcaactctggacgtggggccgccaccgagcctgcccttcccggctcccgaaaggccccgggctcagagccaagactgcgcttgcccgaggctgtcgggcccgccctccctcgcgcccccagcgcagctgcccgccgcccgaccggaagcccgcactccgcctcgccccaccccgtccgcgcgccggccgcggcactgcggcggttaccaggacgctgaagcagcgcagccaatagcgccacgctggcggcgtgctcccggcagccagccaatgagacggcaaatcaatcatttgaaacacccaatggacggagcactgcggcgccaggagggggattgtgatagggagataggaggctgcggctgaccaataaagaccaaactggcttaaaaaggcggaccttaggcagcttgattgacgggggcaaggccaatcaaacgagggagcttgccagcctcgttctggcagcccattccgagactagcggaggcgggcagggagggtatataagcgttggcggacggtcggttgtagcactctgcgcgcccgctcttctgctgctgtttgtctacttcctcctcttccccgccgccgccgccgccgccatcatgagggaaatcgtgcacttgcaggccgggcagtgcggcaaccaaatcggcgccaaggtaagttgccggggcgctggggccaggcgggcctagccgggcggtgtgggcgggcggccggggaagatggcggcagcagcggccgggcggcgccccgcattgcggccgccgggccccctccgcggggaattggccgagccgggcgaccgaagcccccaggcaacccgcggccagggcagcgcggggcggggggaggggcggggagggccggctgccgcgcccgtccggggcggggctgcctccctgcgcaccggccgcggtgactcagccccgcccgcccgggcccgcccgcgtcccttgtagttttgggaggtgatcagcgatgagcacggcatcgaccccacgggcacctaccacggggacagcgacctgcagctggaacgcatcaacgtgtactacaatgaggccaccggtgaggccccggccccttccccgaccgcctcggggaccccgcggcccctgccttgctgacgccctcccgtccccgcaggcggcaagtacgtgccccgcgccgtgctcgtggatctggagcccggcaccatggactccgtgcggtcggggcccttcgggcagatcttccggccggacaacttcgttttcggtgagccgtggctggggactgggcggcggctcaaaggtcaaggggctgctccaagggcaccgccgtgggaactgcgcagcggggcccctggaagcctcctcttctctgagccactcaatccctgtagtaaatcgggctttgggagcaaggctccaggcgtgtctgccgaggcgaggagcgccacacacgtaatctccctgcagggagctgagctggggcagtggctgttcctctgtccttgggaattggcagtggcccccccggggaggggtttgttaagctgtcaggtttggcccctgacttaattcgtagcagggcaggctgccgtcttttggctttgaagggtccgtttgctctacctccagggtgaattctgtggtcagctcacaccatgtcactcggcttttttcgcatggcggtgaccagtagtgctgtctacctggctgacaaatgattagctgtgttctctcacaggtcagagtggtgctgggaacaactgggccaaggggcactacacagaaggcgcggagctggtggactcggtgctggatgttgtgagaaaggaggctgagagctgtgactgcctgcagggtttccagctgacccactccctgggtggggggactgggtctgggatgggtaccctcctcatcagcaagatccgggaggagtacccagacaggatcatgaacacgtttagtgtggtgccttcgcccaaagtgtcagacacagtggtggagccctacaacgccaccctctcagtccaccagctcgtagaaaacacagacgagacctactgcattgataacgaagctctctacgacatttgcttcagaaccctaaagctgaccacgcccacctatggtgacctgaaccacctggtgtctgctaccatgagtggggtcaccacctgcctgcgcttcccaggccagctcaatgctgacctgcggaagctggctgtgaacatggtcccgtttccccggctgcacttcttcatgcccggctttgccccactgaccagccggggcagccagcagtaccgggcgctgaccgtgcccgagctcacccagcagatgtttgatgccaagaacatgatggctgcctgcgacccccgccatggccgctacctgacggttgccgccgtgttcaggggccggatgtccatgaaggaggtggatgagcaaatgcttaatgtccaaaacaaaaacagcagctattttgttgagtggatccccaacaatgtgaaaacggctgtctgtgacatcccacctcgggggctaaaaatgtccgccaccttcattggcaacagcacggccatccaggagctgttcaagcgcatctccgagcagttcacggccatgttccggcgcaaggccttcctgcactggtacacgggcgagggcatggacgagatggagttcaccgaggccgagagcaacatgaatgacctggtgtccgagtaccagcagtaccaggatgccacagccgaggaggagggcgagttcgaggaggaggctgaggaggaggtggcctagagccttcagtcactggggaaagcagggaagcagtgtgaactctttattcactcccagcctgtcctgtggcctgtcccactgtgtgcacttgctgttttccctgtccacatccatgctgtacagacaccaccattaaagcttattctaagtgtgtggtttcgctttgcccattccttccagtaggccctccgggtgctgttgccgaatgtcagggcgtagttgtcctgcatggctgcggggagccaggctgcagctgagctggggcttatgtgcccaggaccagcatgggctggacacccaggcttcagagaagtgtggggctgccctgggccctgggtatctgc

SEQ ID NO: 1527 - DNA, 7258 bp, Homo sapiens
  Genbank Accession No. X02419
ttcaataggaagcaccaacagtttatgccctaggactttgttcccacaatcctgtaacatcatatcacgacacctaacccaatccttatcaagccctgtcaaaaacggactttaaaccaagctgcaaattttcagtaatctggccttgcctttccccctctgatagcaccatcaaacaaacccccttactgccgaaagcaataagcccggctttgttccatccactggttgtgttggtgatatctggggactgccactgaacagacgcacagagggagcccctacaggcaggggtttttctgtctgtgcttcttgggagagtatgtctcgtacatttgtcgcgtgatgaagacttcacagctccatccagcgaccagactcacagctccatccagctgcggcaagggggtctgaggcagtcttaggcaagttggggcccagcgggagaagttgcagaagaactgattagaggacccaggaggcttcagagctgggctgaggtagagagtctcctgtgcgccttctctcctctctgcaattcggggactccttgcactggggcaggccccggcaggtgcatgggaggaagcacggagaatttacaagcctctcgattcctcagtccagacgctgttgggtcccctccgctggagatcgcgcttcccccaaatctttgtgagcgttgcggaagcacgcggggtccgggtcgctgagcgctgcaagacaggggagggagccgggcgggagagggaggggcggcgccggggcgggccctgatatagagcaggcgccgcgggtcgcagcacagtcggagaccgcagcccggagcccgggccagggtccacctgtccccgcagcgccggctcgcgccctcctgccgcagccaccggtgagtgccgcggtcctgagatccccgggccggatgcgcggcggccccagctcccgagcgtctgcctgccccgccctgggctgcccgggctccctgggctccccggcggctgcacggagtcaaggcgccccgtcccgggcgtcccccgcgggtgccgatccaggctgcccggagtccggagcccatagaggagagagacagctggggagcctggtcaccgcgggcatctcccctgcgctgcagtcgcccgcctggcctgccttcccgttcctccgcctcttgccctgacttctccttcctttgcagagccgccgtctagcgccccgacctcgccaccatgagagccctgctggcgcgcctgcttctctgcgtcctggtcgtgagcgactccaaagtgagtgcgctcttgctttgactgatgctgcccaaggacctctgatcagcaccaggggagaggaggggctgctcagggagctggggtctccggattccatccacagcagggccagactctccccaggaaatgggacagggtggcagcggaggcttgagaaccacgggggttggcactggctggcaagggaggaagagggccaccgggactgccccagcctgcgggcatctggtagatgaagcttaatccatttctcctggctggaaaccatggtcttccatttgagaactagatacgaacagggtgaggcgagagggagagggaagagtgggttttgggattggggccagtttaccctcaccctggatccctggagcatgggacctttgatgaagcctcctcccgaatctcttccagggcagcaatgaacttcatcaagttccatgtgagtatccacccctacaacagttggctgcacagacaagttgggaaggcttcaggggacactcccctccctgccctctgctgcagcgtgcgccaccccttaccacttccactccccctcgcttaccccacctttgttctctccagcgaactgtgactgtctaaatggaggaacatgtgtgtccaacaagtacttctccaacattcactggtgcaactgcccaaagaaattcggagggcagcactgtgaaataggtatggggatctccactgcaactgggagagaaatttggggacagggagggatgggtgggaggcaagagcaggcaggagttaggagctggaggtagggtgggtgacatcttcatccctatgtgacaagcataaacacacacacacgctcacgaaacagtggccacacaaatgtgaggtggggttggaaggagaccctgtccagtcttctggcaggtctgaaacgacatctttaaaatgtccgttggcagccgggcatggtggctcacgcttgtaatcccagcattttgagaggtcaagtttgagtggatcatttaggtcaggagttcaagaccagcctggacaacatggtgtaaccctgcctctactaaaaatgcaaaaatcagcctggcatggtggtggatgcctgtagtcccagctacttgggaggctgaggcaggagaattgcttgaacatgggaggccagatctcagtgagctgagatcacaccactgcactccaactgggcgacagagcaagactccatctcaaaaaaaaaaaaaaataaaagttagttggaatgttcttctctttctcatattctctcatcctcctgtccccttgtagataagtcaaaaacctgctatgaggggaatggtcacttttaccgaggaaaggccagcactgacaccatgggccggccctgcctgccctggaactctgccactgtccttcagcaaacgtaccatgcccacagatctgatgctcttcagctgggcctggggaaacataattactgcaggtgaggtgggggcaacaaggaccaaaagccctccctacagcttcccagaaaccttgttaccatccccttctcccagagggctggccatagcacaagagaagtgcggcctctggttgagtcttccctgaggggaggaggcagggaaggccctctgggttggaatgacatcccctatctttctgtgttgtgccaggaacccagacaaccggaggcgaccctggtgctatgtgcaggtgggcctaaagccgcttgtccaagagtgcatggtgcatgactgcgcagatggtgagcatcactgacctgctgatgacaggtgggtggaaggggacaaacttacatgtccccttattccatcacaggaggactgaggaggtggggggtgcccgagagggatgctttctcctacctgcctccctaagacatccctctgtttgtcctccaggaaaaaagccctcctctcctccagaagaattaaaatttcagtgtggccaaaagactctgaggccccgctttaagattattgggggagaattcaccaccatcgagaaccagccctggtttgcggccatctacaggaggcaccgggggggctctgtcacctacgtgtgtggaggcagcctcatgagcccttgctgggtgatcagcgccacacactgcttcatgtacggccctgggtttctcctcttcgactcttctgccccaccccaagcacatccctttctccttcccagcaaagtgttccgcctcatttctccctcatctgcccctgtccatgcgcccatggccttggggacaagtcgtgctttgaggcctctagggagggaaggaagaagtggcatgatttcatgggactaagctgtttgatgggtatcttcttccacagtgattacccaaagaaggaggactacatcgtctacctgggtcgctcaaggcttaactccaacacgcaaggggagatgaagtttgaggtggaaaacctcatcctacacaaggactacagcgctgacacgcttgctcaccacaacgacattggtgagggggaacgcccgcgactactgtggccataatggcttggggagagtgggacccagggagagactggagctgagttgaagctgccggtggggcaggggtggggcgagggaccttgaagcctcgatatacatgacaaaggatggcagggaagagttccatgaagtctgaggggcctggtgctcctctggagagaccctgaatttccccaacaagtagccctcttgcgagtggaaacagccctgtgggtatatggcttgggctgggaaggccctgtttatatgaattagaaaaagacacaccttcctttgtgggatgcagcctctgtctgtgctaggatatagaacttggagaatggagccttgggatggattccagcctaactacctcagggggatcctctagagtgcagctgggagtttttgcagaaacgacctgtacagctgtatgcagtggctctggccatccaagcctttttcaacacctggaacaaagcccttggggcatggggcaggggaggtttccaggtgataagcgaccagcagacctccctggatgactgacctagggataggcatagctacttcctcggcacttggaggggacagatggggaccgcctaaccagtagtgatctttctcctctgaccctctgtcctcccccagccttgctgaagatccgttccaaggagggcaggtgtgcgcagccatcccggactatacagaccatctgcctgccctcgatgtataacgatccccagtttggcacaagctgtgagatcactggctttggaaaagagaattctagtaagtgacaattgcgactgacttagaaggtcctgaggagtgttttgacctgaaaatgagcccagtgtgatcaagggaagactgcagagttagaggtgggagcactgaggcggtggcagatgggtccagggatggatgaagagtgttgtttagggagcgatgggctgcaaaggtaaatagatggtaggggctataggtggaggtaaatggctcagatttgcatggagagagaataatgggcctctccctgggtgatgatactttatggtgtcccctctctggcgagacgtcccacgtggaggcagataaatcttgatgcaaacgcctccctgttttctccacctagccgactatctctatccggagcagctgaaaatgactgttgtgaagctgatttcccaccgggagtgtcagcagccccactactacggctctgaagtcaccaccaaaatgctgtgtgctgctgacccacagtggaaaacagattcctgccaggtgagtgttccaagcatctctctccacctcttccatatctccccagagctcctgggcttgttccagccagcttaagggtgtctctctctagccaaagccctaagtagccagaatcaggagctcaggtctttgagggtttaaaccagtccttatgtgtttgccagacattaccaaaaaaatcccagctctgcgctagtcacttcagactgggggcacgagatcctagaaagaggaaacagtaaaagacaatgtaactcagtgcccagggtgtgttgtgaactataaatgatcaggtgttcaggagagggaggtgagtgccaacctgagggtcagggaggggaggctttaaaggaaatgtgacttgataggcatttgaagaggcagagggaagaaaggaaggtgtttcagttgaaagatacaaaactgagaaggaggctggcatattccgggtggggaggagaactagggtctgggagtgtggatggaatagtggcagatgacagggcttttaaagccaagcaggggattttccaacttcgatgtggtagaaatggggctgcgtcaggcacagtggctcatgcctgtaatcccagcattgggctaggccgtagtcgatggatcattgaggccagagttgagaccggcctggaccaacatggtgaaaccctgtgtctactaaaaaatgcaaaaaaaaaaattagccaggtgtggtggtgcctgcctgtaatcccagctaatcaggaggctgagacatggaatcgcttgagcacaggaggcaagtttgacgtgagctgagatcacgtcattgcacgccagcctgggcgacagagcgagattctgtcctcccgccgaaaaaagaaagaaaatgggaagtcgctaaggactttgactgggaaactcttccctctctctggtatggttgggtgatgggatcagaaatcccctcctcacttctctagggctcatcttttgtatctttggcgtcacagggagactcagggggacccctcgtctgttccctccaaggccgcatgactttgactggaattgtgagctggggccgtggatgtgccctgaaggacaagccaggcgtctacacgagagtctcacacttcttaccctggatccgcagtcacaccaaggaagagaatggcctggccctctgagggtccccagggaggaaacgggcaccacccgctttcttgctggttgtcatttttgcagtagagtcatctccatcagctgtaagaagagactgggaagataggctctgcacagatggatttgcctgtgccacccaccagggtgaacgacaatagctttaccctcaggcataggcctgggtgctggctgcccagacccctctggccaggatggaggggtggtcctgactcaacatgttactgaccagcaacttgtctttttctggactgaagcctgcaggagttaaaaagggcagggcatctcctgtgcatgggtgaagggagagccagctcccccgacggtgggcatttgtgaggcccatggttgagaaatgaataatttcccaattaggaagtgtaacagctgaggtctcttgagggagcttagccaatgtgggagcagcggtttggggagcagagacactaacgacttcagggcagggctctgatattccatgaatgtatcaggaaatatatatgtgtgtgtatgtttgcacacttgtgtgtgggctgtgagtgtaagtgtgagtaagagctggtgtctgattgttaagtctaaatatttccttaaactgtgtggactgtgatgccacacagagtggtctttctggagaggttataggtcactcctggggcctcttgggtcccccacgtgacagtgcctgggaatgtacttattctgcagcatgacctgtgaccagcactgtctcagtttcactttcacatagatgtccctttcttggccagttatcccttccttttagcctagttcatccaatcctcactgggtggggtgaggaccactccttacactgaatatttatatttcactatttttatttatatttttgtaattttaaataaaagtgatcaataaaatgtgatttttctgatgacaaatctccctggtgcttgtatgggaaggagttggagtacataaaaaggagaaaataacaaaggtgg

SEQ ID NO: 1528 - DNA, 2532 bp, Homo sapiens
  Genbank Accession No. X03350
agtgcactcaagcagagaagaaatccacaaagactcaccagtctgctggtgggcagagaagacagaaacgacatgagcacagcaggaaaagtaatcaaatgcaaagcagctgtgctatgggaggtaaagaaacccttttccattgaggatgtggaggttgcacctcctaaggcttatgaagttcgcattaagatggtggctgtaggaatctgtcgcacagatgaccacgtggttagtggcaacctggtgaccccccttcctgtgattttaggccatgaggcagccggcatcgtggagagtgttggagaaggggtgactacagtcaaaccaggtgataaagtcatcccgctctttactcctcagtgtggaaaatgcagagtttgtaaaaacccggagagcaactactgcttgaaaaatgatctaggcaatcctcgggggaccctgcaggatggcaccaggaggttcacctgcagggggaagcccattcaccacttccttggcaccagcaccttctcccagtacacggtggtggatgagaatgcagtggccaaaattgatgcagcctcgcccctggagaaagtctgcctcattggctgtggattctcgactggttatgggtctgcagttaacgttgccaaggtcaccccaggctctacctgtgctgtgtttggcctgggaggggtcggcctatctgctgttatgggctgtaaagcagctggagcagccagaatcattgcggtggacatcaacaaggacaaatttgcaaaggccaaagagttgggtgccactgaatgcatcaaccctcaagactacaagaaacccatccaggaagtgctaaaggaaatgactgatggaggtgtggatttttcgtttgaagtcatcggtcggcttgacaccatgatggcttccctgttatgttgtcatgaggcatgtggcacaagcgtcatcgtaggggtacctcctgcttcccagaacctctcaataaaccctatgctgctactgactggacgcacctggaagggggctgtttatggtggctttaagagtaaagaaggtatcccaaaacttgtggctgattttatggctaagaagttttcactggatgcgttaataacccatgttttaccttttgaaaaaataaatgaaggatttgacctgcttcactctgggaaaagtatccgtaccgtcctgacgttttgaggcaatagagatgccttcccctgtagcagtcttcagcctcctctaccctacgagatctggagcaacagctaggaaatatcattaattcagctcttcagagatgttatcaataaattacacatgggggctttccaaagaaatggaaattgatgggaaattatttttcaggaaaatttaaaattcaagtcagaagtaaataaagtgttgaacatcagctggggaattgaagccaacaaaccttccttcttaaccattctactgtgtcacctttgccattgaggaaaaatattcctgtgacttcttgcatttttggtatcttcataatctttagtcatcgaatcccagtggaggggacccttttacttgccctgaacatacacatgctgggccattgtgattgaagtcttctaactctgtctcagttttcactgtcgacattttcctttttctaataaaaatgtaccaaatccctggggtaaaagctagggtaaggtaaaggatagactcacatttacaagtagtgaaggtccaagagttctaaatacaggaaatttcttaggaactcaaataaaatgcccacattttactacagtaaatggcagtgtttttatgacttttatactatttctttatggtcgatatacaattgattttttaaaataatagcagatttcttgcttcatatgacaaagcctcaattactaattgtaaaaactgaactattcccagaatcatgttcaaaaaatctgtaattttgctgatgaaagtgcttcattgactaaacagtattagtttgtggctataaatgattatttaggatgatgactgaaaatgtgtataagtaattaaaagtaatatggtggctttaagtgtagagatgggatggcaaatgctgtgaatgcagaatgtaaaattggtaactaagaaatggcacaaacaccttaagcaatatattttcctagtagatatatatatacacatacatatatacacatatacaaatgtatatttttgcaaaattgttttcaatctagaacttttctattaactaccatgtcttaaaatcaagtctataatcctagcattagtttaatattttgaatatgtaaagacctgtgttaatgctttgttaatgcttttcccactctcatttgttaatgctttcccactctcaggggaaggatttgcattttgagctttatctctaaatgtgacatgcaaagattattcctggtaaaggaggtagctgtctccaaaaatgctattgttgcaatatctacattctatttcatattatgaaagaccttagacataaagtaaaatagtttatca

SEQ ID NO: 1529 - DNA, 594 bp, Homo sapiens
  Genbank Accession No. X04470
gtcactcctgccttcaccatgaagtccagcggcctcttccccttcctggtgctgcttgccctgggaactctggcaccttgggctgtggaaggctctggaaagtccttcaaagctggagtctgtcctcctaagaaatctgcccagtgccttagatacaagaaacctgagtgccagagtgactggcagtgtccagggaagaagagatgttgtcctgacacttgtggcatcaaatgcctggatcctgttgacaccccaaacccaacaaggaggaagcctgggaagtgcccagtgacttatggccaatgtttgatgcttaacccccccaatttctgtgagatggatggccagtgcaagcgtgacttgaagtgttgcatgggcatgtgtgggaaatcctgcgtttcccctgtgaaagcttgattcctgccatatggaggaggctctggagtcctgctctgtgtggtccaggtcctttccaccctgagacttggctccaccactgatatcctcctttggggaaaggcttggcacacagcaggctttcaagaagtgccagttgatcaatgaataaataaacgagcctatttctctttgcac

SEQ ID NO: 1530 - DNA, 2305 bp, Homo sapiens
  Genbank Accession No. X06374
ttcttggggctgatgtccgcaaatatgcagaattaccggccgggtcgctcctgaagccagcgcggggagcgagcgcggcggcggccagcaccgggaacgcaccgaggaagaagcccagcccccgccctccgccccttccgtccccaccccctacccggcggcccaggaggctccccggctgcggcgcgcactccctgtttctcctcctcctggctggcgctgcctgcctctccgcactcactgctcgccgggcgccgtccgccagctccgtgctccccgcgccaccctcctccgggccgcgctccctaagggatggtactgaatttcgccgccacaggagaccggctggagcgcccgccccgcgcctcgcctctcctccgagcagccagcgcctcgggacgcgatgaggaccttggcttgcctgctgctcctcggctgcggatacctcgcccatgttctggccgaggaagccgagatcccccgcgaggtgatcgagaggctggcccgcagtcagatccacagcatccgggacctccagcgactcctggagatagactccgtagggagtgaggattctttggacaccagcctgagagctcacggggtccacgccactaagcatgtgcccgagaagcggcccctgcccattcggaggaagagaagcatcgaggaagctgtccccgctgtctgcaagaccaggacggtcatttacgagattcctcggagtcaggtcgaccccacgtccgccaacttcctgatctggcccccgtgcgtggaggtgaaacgctgcaccggctgctgcaacacgagcagtgtcaagtgccagccctcccgcgtccaccaccgcagcgtcaaggtggccaaggtggaatacgtcaggaagaagccaaaattaaaagaagtccaggtgaggttagaggagcatttggagtgcgcctgcgcgaccacaagcctgaatccggattatcgggaagaggacacggatgtgaggtgaggatgagccgcagccctttcctgggacatggatgtacatggcgtgttacattcctgaacctactatgtacggtgctttattgccagtgtgcggtctttgttctcctccgtgaaaaactgtgtccgagaacactcgggagaacaaagagacagtgcacatttgtttaatgtgacatcaaagcaagtattgtagcactcggtgaagcagtaagaagcttccttgtcaaaaagagagagagagagagagagagagaaaacaaaaccacaaatgacaaaaacaaaacggactcacaaaaatatctaaactcgatgagatggagggtcgccccgtgggatggaagtgcagaggtctcagcagactggatttctgtccgggtggtcacaggtgcttttttgccgaggatgcagagcctgctttgggaacgactccagaggggtgctggtgggctctgcagggcccgcaggaagcaggaatgtcttggaaaccgccacgcgaactttagaaaccacacctcctcgctgtagtatttaagcccatacagaaaccttcctgagagccttaagtggtttttttttttgtttttgttttgttttttttttttttgttttttttttttttttttttttttacaccataaagtgattattaagcttccttttactctttggctagctttttttttttttttttttttttttttttttaattatctcttggatgacatttacaccgataacacacaggctgctgtaactgtcaggacagtgcgacggtatttttcctagcaagatgcaaactaatgagatgtattaaaataaacatggtatacctacctatgcatcatttcctaaatgtttctggctttgtgtttctcccttaccctgctttatttgttaatttaagccattttgaaagaactatgcgtcaaccaatcgtacgccgtccctgcggcacctgccccagagcccgtttgtggctgagtgacaacttgttccccgcagtgcacacctagaatgctgtgttcccacgcggcacgtgagatgcattgccgcttctgtctgtgttgttggtgtgccctggtgccgtggtggcggtcactccctctgctgccagtgtttggacagaacccaaattctttatttttggtaagatattgtgctttacctgtattaacagaaatgtgtgtgtgtggtttgtttttttgtaaaggtgaagtttgtatgtttacctaatattacctgttttgtatacctgagagcctgctatgttcttcttttgttgatccaaaattaaaaaaaaaataccaccaac

SEQ ID NO: 1531 - DNA, 1801 bp, Homo sapiens
  Genbank Accession No. X07290
gaattcgggattcgggtgaatgtagtgattgtgggaaaaccttcagctgtagctctgccctcattctgcatcggaggatccacacgggggagaaaccctatgaatgtaatgagtgtgggaagaccttcagctggagctccaccctcacccaccatcagagaatccacactggtgagaaaccctacgcctgcaatgaatgtgggaaggccttcagcaggagctcaacccttattcaccatcagagaatccacactggagaaaaaccctatgaatgtaatgaatgtgggaaagccttcagccagagctcacacctctatcagcaccagagaatccacactggagagaagccctacgaatgtatggaatgtggaggaaagtttacctacagttcaggccttattcagcatcaaagaatccacaccggggagaacccctatgaatgtagtgagtgtgggaaagccttcaggtacagctcggctcttgttcgccatcagagaattcacactggagagaagcctttgaatgggatcggcatgagcaaaagctccctcagagttacgaccgagttaaatatcagagagtccacgtgaaagagccacacacccattttcctcactttccctgagtctcaagagctcttgccttaccctataaatctcaacagcttaggatgtgtccctttcaactcagacttttcattttagagaatggggcagatggggcaaatcgttgaattttcccagaaatcacaccagccttagaaagcgtcaaggcaagtggatggcgtgctgggaatagaaagcagctctgggaccagttaccccatttaggaaaggagtttgcactaaactgtttttctcacagcagaggaacctttccaaggtggggatggaagcacagtcgggacagaattcgatggattcctttagttggagtccgcgtagtcagcacagacagcagtggaaaggacgctctgggtcctgttatttgctagggagggtaaagggagactatttcgggctactgttcctagtccagctttaagtttcggtaagaaacatgctgttttgtttcatgatttcgttaattatggaaatttggcattgagggattattttattgagggtagaagagattccagaatcatcatctgtgatgatggtgtcctttagggctcttggagcagccagaccatgtttccaagagaaacctggtgatattgccagcagaccccctgccatccccccagttgtcctggggctaatgggcaaatctgtccaaacagctagtaaccggctgtgagggagagggtcagaagcacttagcgttggcctctgattgctgtcctctcttgtcctcttcccactccaatgatgaaaatgattttctctaaatgcctgggtaaggatgctttcaaggagctcacttggcctgcttgccctgccctctcacctctgacacccagccccaggagccagaccactcctgcctccacctctgactcttcagcagctgagattaatgcagagaaagagcaaagcctaaaaggagaaaaaaaaaacaaaaaaacaaaaaaacgaagcccagagaaggcagctgtgcctgagcctggtagcagagctcgttgctgggtgaggatggcactccccgagttttcccaaccgacgggatgaccttccattgtgttttcccaaccctgctcatcctgtagcataaatgaagtgcactattaaacagaatagtttttcagaagaaaaaaaaaaaaaaaaaaaaaaaaaaaaaaaaaaaaaaacccgaattc

SEQ ID NO: 1532 - DNA, 1709 bp, Homo sapiens
  Genbank Accession No. X07696
ggtacctcctgccagcacctcttgggtttgctgagaactcacgggctccagctacctggccatgaccaccacatttctgcaaacttcttcctccacctttgggggtggctcaacccgagggggttccctcctggctgggggaggtggctttggtggggggagtctctctgggggaggtggaagccgaagtatctcagcttcttctgctaggtttgtctcttcagggtcaggaggaggatatgggggtggcatgagggtctgtggctttggtggaggggctggtagtgttttcggtggaggctttggagggggcgttggtgggggttttggtggtggctttggtggtggcgatggtggtctcctctctggcaatgagaaaattaccatgcagaacctcaatgaccgcctggcctcctacctggacaaggtacgtgccctggaggaggccaatgctgacctggaggtgaagatccatgactggtaccagaagcagaccccagccagcccagaatgcgactacagccaatacttcaagaccattgaagagctccgggacaagatcatggccaccaccatcgacaactcccgggtcatcctggagatcgacaatgccaggctggctgcggacgacttcaggctcaagtatgagaatgagctggccctgcgccagggcgttgaggctgacatcaacggcttgcgccgagtcctggatgagctgaccctggccaggactgacctggagatgcagatcgagggcctgaatgaggagctagcctacctgaagaagaaccacgaagaggagatgaaggagttcagcagccagctggccggccaggtcaatgtggagatggacgcagcaccgggtgtggacctgacccgtgtgctggcagagatgagggagcagtacgaggccatggcggagaagaaccgccgggatgtcgaggcctggttcttcagcaagactgaggagctgaacaaagaggtggcctccaacacagaaatgatccagaccagcaagacggagatcacagacctgagacgcacgatgcaggagctggagatcgagctgcagtcccagctcagcatgaaagctgggctggagaactcactggccgagacagagtgccgctatgccacgcagctgcagcagatccaggggctcattggtggcctggaggcccagctgagtgagctccgatgcgagatggaggctcagaaccaggagtacaagatgctgcttgacataaagacacggctggagcaggagatcgctacttaccgcagcctgctcgagggccaggatgccaagatggctggcattggcatcagggaagcctcttcaggaggtggtggtagcagcagcaatttccacatcaatgtagaagagtcagtggatggacaggtggtttcttcccacaagagagaaatctaagtgtctattgcaggagaaacgtcccttgccactccccactctcatcaggccaagtggaggactggccagagggcctgcacatgcaaactccagtccctgccttcagagagctgaaaagggtccctcggtcttttatttcagggctttgcatgcgctctattccccctctgcctctccccaccttctttggagcaaggagatgcagctgtattgtgtaacaagctcatttgtacagtgtctgttcatgtaataaagaattacttttccttttgcaaat

SEQ ID NO: 1533 - DNA, 1691 bp, Homo sapiens
  Genbank Accession No. X14640
gcaagcttctatctgcacctgctcatcaatcctgctctcaccatgagcctccgcctgcagagctcctctgccagctatggaggtggtttcgggggtggctcttgccagctgggaggaggccgtggtgtctctacctgttcaactcggtttgtgtctgggggatcagctgggggctatggaggcggcgtgagctgtggttttggtggaggggctgatagtggctttggaggtggctatggaggtggccttggaggtggctatggaggtggccttggaggtggctttggtgggggttttgctggtggctttgttgactttggtgcttgtgatggcggcctcctcactggcaatgagaagatcaccatgcagaacctcaacgaccgcctggcttcctacctggagaaggtgcgcgccctggaggaggccaacgctgacctggaggtgaagatccgtgactggcacctgaagcagagcccagctagccctgagcgggactacagcccctactacaagaccattgaagagctccgggacaagatcctgaccgccaccattgaaaacaaccgggtcatcctggagattgacaatgccaggctggctgtggacgacttcaggctcaagtatgagaatgagctggccctgcgccagagcgtggaggccgacatcaacggcctgcgccgggtgctggatgagctcactctgtctaagactgacctggagatgcagatcgagagcctgaatgaagagctagcctacatgaagaagaaccatgaagaggagatgaaggaatttagcaaccaggtggtcggccaggtcaacgtggagatggatgccaccccaggcattgacctgacccgcgtgctggcagagatgagggagcagtacgaggccatggcagagaggaaccgccgggatgctgaggaatggttccacgccaagagtgcagagctgaacaaggaggtgtctaccaacactgccatgattcagaccagcaagacagagatcacggagctcaggcgcacgcttcaaggcctggagattgagctgcagtcccagctgagcatgaaagctgggctggagaacactgttgcagagacggagtgccgctatgccctgcagctgcagcagatccagggactcatcagcagcatcgaggcccagctgagcgagctccgcagtgagatggagtgccagaaccaagagtacaagatgctgctggacatcaagacacgtctggagcaggagatcgccacctaccgcagcctgctcgagggccaggacgccaagatgattggtttcccttcctcagcaggaagcgtcagcccccgtagcacctctgttaccacgacttctagtgcctctgttaccaccacctctaatgcctctggtcgccgcacttctgatgtccgtaggccttaaatctgcctggcgtcccctccctctgtcttcagcacccagaggaggagagagccggcagttccctgcaggagagaggaggggctgctggacccaaggctcagtccctctgctctcaggaccccctgtcctgactctctcctgatggtgggccctctgtgctcttctcttctgtcggatctctctcctctctgacctggatacgctttggtttctcaacttctctaccccaaagaaaagattattcaataaagtttcctgcctttctgaaacat

SEQ ID NO: 1534 - DNA, 8224 bp, Homo sapiens
  Genbank Accession No. X15998
gctgccccgagcctttctggggaagaactccaggcgtgcggacgcaacagccgagaacattaggtgttgtggacaggagctgggaccaagatcttcggccagccccgcatcctcccgcatcttccagcaccgtcccgcaccctccgcatccttccccgggccaccacgcttcctatgtgacccgcctgggcaacgccgaacccagtcgcgcagcgctgcagtgaattttccccccaaactgcaataagccgccttccaaggccaagatgttcataaatataaagagcatcttatggatgtgttcaaccttaatagtaacccatgcgctacataaagtcaaagtgggaaaaagcccaccggtgaggggctccctctctggaaaagtcagcctaccttgtcatttttcaacgatgcctactttgccacccagttacaacaccagtgaatttctccgcatcaaatggtctaagattgaagtggacaaaaatggaaaagatttgaaagagactactgtccttgtggcccaaaatggaaatatcaagattggtcaggactacaaagggagagtgtctgtgcccacacatcccgaggctgtgggcgatgcctccctcactgtggtcaagctgctggcaagtgatgcgggtctttaccgctgtgacgtcatgtacgggattgaagacacacaagacacggtgtcactgactgtggatggggttgtgtttcactacagggcggcaaccagcaggtacacactgaattttgaggctgctcagaaggcttgtttggacgttggggcagtcatagcaactccagagcagctctttgctgcctatgaagatggatttgagcagtgtgacgcaggctggctggctgatcagactgtcagatatcccatccgggctcccagagtaggctgttatggagataagatgggaaaggcaggagtcaggacttatggattccgttctccccaggaaacttacgatgtgtattgttatgtggatcatctggatggtgatgtgttccacctcactgtccccagtaaattcaccttcgaggaggctgcaaaagagtgtgaaaaccaggatgccaggctggcaacagtgggggaactccaggcggcatggaggaacggctttgaccagtgcgattacgggtggctgtcggatgccagcgtgcgccaccctgtgactgtggccagggcccagtgtggaggtggtctacttggggtgagaaccctgtatcgttttgagaaccagacaggcttccctccccctgatagcagatttgatgcctactgctttaaacgtcgaatgagtgatttgagtgtaattggtcatccaatagattcagaatctaaagaagatgaaccttgtagtgaagaaacagatccagtgcatgatctaatggctgaaattttacctgaattccctgacataattgaaatagacctataccacagtgaagaaaatgaagaagaagaagaagagtgtgcaaatgctactgatgtgacaaccaccccatctgtgcagtacataaatgggaagcatctcgttaccactgtgcccaaggacccagaagctgcagaagctaggcgtggccagtttgaaagtgttgcaccttctcagaatttctcggacagctctgaaagtgatactcatccatttgtaatagccaaaacggaattgtctactgctgtgcaacctaatgaatctacagaaacaactgagtctcttgaagttacatggaagcctgagacttaccctgaaacatcagaacatttttcaggtggtgagcctgatgttttccccacagtcccattccatgaggaatttgaaagtggaacagccaaaaaaggggcagaatcagtcacagagagagatactgaagttggtcatcaggcacatgaacatactgaacctgtatctctgtttcctgaagagtcttcaggagagattgccattgaccaagaatctcagaaaatagcctttgcaagggctacagaagtaacatttggtgaagaggtagaaaaaagtacttctgtcacatacactcccactatagttccaagttctgcatcagcatatgtttcagaggaagaagcagttaccctaataggaaatccttggccagatgacctgttgtctaccaaagaaagctgggtagaagcaactcctagacaagttgtagagctctcagggagttcttcgattccaattacagaaggctctggagaagcagaagaagatgaagatacaatgttcaccatggtaactgatttatcacagagaaatactactgatacactcattactttagacactagcaggataatcacagaaagcttttttgaggttcctgcaaccaccatttatccagtttctgaacaaccttctgcaaaagtggtgcctaccaagtttgtaagtgaaacagacacttctgagtggatttccagtaccactgttgaggaaaagaaaaggaaggaggaggagggaactacaggtacggcttctacatttgaggtatattcatctacacagagatcggatcaattaattttaccctttgaattagaaagtccaaatgtagctacatctagtgattcaggtaccaggaaaagttttatgtccttgacaacaccaacacagtctgaaagggaaatgacagattctactcctgtctttacagaaacaaatacattagaaaatttgggggcacagaccactgagcacagcagtatccatcaacctggggttcaggaagggctgaccactctcccacgtagtcctgcctctgtctttatggagcagggctctggagaagctgctgccgacccagaaaccaccactgtttcttcattttcattaaacgtagagtatgcaattcaagccgaaaaggaagtagctggcactttgtctccgcatgtggaaactacattctccactgagccaacaggactggttttgagtacagtaatggacagagtagttgctgaaaatataacccaaacatccagggaaatagtgatttcagagcgattaggagaaccaaattatggggcagaaataaggggcttttccacaggttttcctttggaggaagatttcagtggtgactttagagaatactcaacagtgtctcatcccatagcaaaagaagaaacggtaatgatggaaggctctggagatgcagcatttagggacacccagacttcaccatctacagtacctacttcagttcacatcagtcacatatctgactcagaaggacccagtagcaccatggtcagcacttcagccttcccctgggaagagtttacatcctcagctgagggctcaggtgagcaactggtcacagtcagcagctctgttgttccagtgcttcccagtgctgtgcaaaagttttctggtacagcttcctccattatcgacgaaggattgggagaagtgggtactgtcaatgaaattgatagaagatccaccattttaccaacagcagaagtggaaggtacgaaagctccagtagagaaggaggaagtaaaggtcagtggcacagtttcaacaaactttccccaaactatagagccagccaaattatggtctaggcaagaagtcaaccctgtaagacaagaaattgaaagtgaaacaacatcagaggaacaaattcaagaagaaaagtcatttgaatcccctcaaaactctcctgcaacagaacaaacaatctttgattcacagacatttactgaaactgaactcaaaaccacagattattctgtactaacaacaaagaaaacttacagtgatgataaagaaatgaaggaggaagacacttctttagttaacatgtctactccagatccagatgcaaatggcttggaatcttacacaactctccctgaagctactgaaaagtcacattttttcttagctactgcattagtaactgaatctataccagctgaacatgtagtcacagattcaccaatcaaaaaggaagaaagtacaaaacattttccgaaaggcatgagaccaacaattcaagagtcagatactgagctcttattctctggactgggatcaggagaagaagttttacctactctaccaacagagtcagtgaattttactgaagtggaacaaatcaataacacattatatccccacacttctcaagtggaaagtacctcaagtgacaaaattgaagactttaacagaatggaaaatgtggcaaaagaagttggaccactcgtatctcaaacagacatctttgaaggtagtgggtcagtaaccagcacaacattaatagaaattttaagtgacactggagcagaaggacccacggtggcacctctccctttctccacggacatcggacatcctcaaaatcagactgtcaggtgggcagaagaaatccagactagtagaccacaaaccataactgaacaagactctaacaagaattcttcaacagcagaaattaacgaaacaacaacctcatctactgattttctggctagagcttatggttttgaaatggccaaagaatttgttacatcagcaccaaaaccatctgacttgtattatgaaccttctggagaaggatctggagaagtggatattgttgattcatttcacacttctgcaactactcaggcaaccagacaagaaagcagcaccacatttgtttctgatgggtccctggaaaaacatcctgaggtgccaagcgctaaagctgttactgctgatggattcccaacagtttcagtgatgctgcctcttcattcagagcagaacaaaagctcccctgatccaactagcacactgtcaaatacagtgtcatatgagaggtccacagacggtagtttccaagaccgtttcagggaattcgaggattccaccttaaaacctaacagaaaaaaacccactgaaaatattatcatagacctggacaaagaggacaaggatttaatattgacaattacagagagtaccatccttgaaattctacctgagctgacatcggataaaaatactatcatagatattgatcatactaaacctgtgtatgaagacattcttggaatgcaaacagatatagatacagaggtaccatcagaaccacatgacagtaatgatgaaagtaatgatgacagcactcaagttcaagagatctatgaggcagctgtcaacctttctttaactgaggaaacatttgagggctctgctgatgttctggctagctacactcaggcaacacatgatgaatcaatgacttatgaagatagaagccaactagatcacatgggctttcacttcacaactgggatccctgctcctagcacagaaacagaattagacgttttacttcccacggcaacatccctgccaattcctcgtaagtctgccacagttattccagagattgaaggaataaaagctgaagcaaaagccctggatgacatgtttgaatcaagcactttgtctgatggtcaagctattgcagaccaaagtgaaataataccaacattgggccaatttgaaaggactcaggaggagtatgaagacaaaaaacatgctggtccttcttttcagccagaattctcttcaggagctgaggaggcattagtagaccatactccctatctaagtattgctactacccaccttatggatcagagtgtaacagaggtgcctgatgtgatggaaggatccaatcccccatattacactgatacaacattagcagtttcaacatttgcgaagttgtcttctcagacaccatcatctcccctcactatctactcaggcagtgaagcctctggacacacagagatcccccagcccagtgctctgccaggaatagacgtcggctcatctgtaatgtccccacaggattcttttaaggaaattcatgtaaatattgaagcaactttcaaaccatcaagtgaggaataccttcacataactgagcctccctctttatctcctgacacaaaattagaaccttcagaagatgatggtaaacctgagttattagaagaaatggaagcttctcccacagaacttattgctgtggaaggaactgagattctccaagatttccaaaacaaaaccgatggtcaagtttctggagaagcaatcaagatgtttcccaccattaaaacacctgaggctggaactgttattacaactgccgatgaaattgaattagaaggtgctacacagtggccacactctacttctgcttctgccacctatggggtcgaggcaggtgtggtgccttggctaagtccacagacttctgagaggcccacgctttcttcttctccagaaataaaccctgaaactcaagcagctttaatcagagggcaggattccacgatagcagcatcagaacagcaagtggcagcgagaattcttgattccaatgatcaggcaacagtaaaccctgtggaatttaatactgaggttgcaacaccaccattttcccttctggagacttctaatgaaacagatttcctgattggcattaatgaagagtcagtggaaggcacggcaatctatttaccaggacctgatcgctgcaaaatgaacccgtgccttaacggaggcacctgttatcctactgaaacttcctacgtatgcacctgtgtgccaggatacagcggagaccagtgtgaacttgattttgatgaatgtcactctaatccctgtcgtaatggagccacttgtgttgatggttttaacacattcaggtgcctctgccttccaagttatgttggtgcactttgtgagcaagataccgagacatgtgactatggctggcacaaattccaagggcagtgctacaaatactttgcccatcgacgcacatgggatgcagctgaacgggaatgccgtctgcagggtgcccatctcacaagcatcctgtctcacgaagaacaaatgtttgttaatcgtgtgggccatgattatcagtggataggcctcaatgacaagatgtttgagcatgacttccgttggactgatggcagcacactgcaatacgagaattggagacccaaccagccagacagcttcttttctgctggagaagactgtgttgtaatcatttggcatgagaatggccagtggaatgatgttccctgcaattaccatctcacctatacgtgcaagaaaggaacagttgcttgcggccagccccctgttgtagaaaatgccaagacctttggaaagatgaaacctcgttatgaaatcaactccctgattagataccactgcaaagatggtttcattcaacgtcaccttccaactatccggtgcttaggaaatggaagatgggctatacctaaaattacctgcatgaacccatctgcataccaaaggacttattctatgaaatactttaaaaattcctcatcagcaaaggacaattcaataaatacatccaaacatgatcatcgttggagccggaggtggcaggagtcgaggcgctgatccctaaaatggcgaacatgtgttttcatcatttcagccaaagtcctaacttcctgtgcctttcctatcacctcgagaagtaattatcagttggtttggatttttggaccaccgttcagtcattttgggttgccgtgctcccaaaacattttaaatgaaagtattggcattcaaaaagacagcagacaaaatgaaagaaaatgagagcagaaagtaagcatttccagcctatctaatttctttagttttctatttgcctccagtgcagtccatttcctaatgtataccagcctactgtactatttaaaatgctcaatttcagcaccgatggccatgtaaataagatgatttaatgttgattttaatcctgtatataaaataaaaagtcacaatgagtttgggcatatttaatgatgattatggagccttagaggtctttaatcattggttcggctgcttttatgtagtttaggctggaaatggtttcacttgctctttgactgtcagcaagactgaagatggcttttcctggacagctagaaaacacaaaatcttgtaggtcattgcacctatctcagccataggtgcagtttgcttctacatgatgctaaaggctgcgaatgggatcctgatggaactaaggactccaatgtcgaactcttctttgctgcattcctttttcttcacttacaagaaaggcctgaatggaggacttttctgtaaccagg

SEQ ID NO: 1535 - DNA, 1940 bp, Homo sapiens
  Genbank Accession No. X16662
aggcctgctcactcctcagctgcaggagccagacgtgtggagtcccagcagaggccaacctgtgtctcttcatctccgtgagaaaggtgcccccgaagtgaaagagatggcctggtggaaagcctggattgaacaggagggtgtcacagtgaagagcagctcccacttcaacccagaccctgatgcagagaccctctacaaagccatgaaggggatcgggaccaacgagcaggctatcatcgatgtgctcaccaagagaagcaacacgcagcggcagcagatcgccaagtccttcaaggctcagttcggcaaggacctcactgagaccttgaagtctgagctcagtggcaagtttgagaggctcattgtggcccttatgtatccgccatacagatacgaagccaaggagctgcatgacgccatgaagggcttaggaaccaaggagggtgtcatcattgagatcctggcctctcggaccaagaaccagctgcgggagataatgaaggcgtatgaggaagactatgggtccagcctggaggaggacatccaagcagacacaagtggctacctggagaggatcctggtgtgcctcctgcagggcagcagggatgatgtgagcagctttgtggacccggcactggccctccaagacgcacaggatctgtatgcggcaggcgagaagattcgtgggactgatgagatgaaattcatcaccatcctgtgcacgcgcagtgccactcacctgctgagagtgtttgaagagtatgagaaaattgccaacaagagcattgaggacagcatcaagagtgagacccatggctcactggaggaggccatgctcactgtggtgaaatgcacccaaaacctccacagctactttgcagagagactctactatgccatgaagggagcagggacgcgtgatgggaccctgataagaaacatcgtttcaaggagcgagattgacttaaatcttatcaaatgtcacttcaagaagatgtacggcaagaccctcagcagcatgatcatggaagacaccagcggcgactacaagaacgccctgctgagcctggtgggcagcgacccctgaggcacagaagaacaagagcaaagaccatgaagccagagtctccaggactcctcactcaacctcggccatggacgcaggttgggtgtgaggggggtcccagcctttcggtcttctatttccctatttccagtgctttccagccgggtttctgacccagaggtggaaccggcctggactcctcttcccaacttcctccaggtcatttcccagtgtgagcacaatgccaaccttagtgtttctccagccagacagatgcctcagcatgaagggcttggggacttgtggatcattccttcctccctgcaggagcttcccaagctggtcacagagtctcctgggcacaggttatacagaccccagccccattcccatctactgaaacagggtctccacaagaggggccagggaatatgggtttttaacaagcgtcttacaaaacacttctctatcatgcagccggagagctggctgggagcccttttgttttagaacacacatccttcagcagctgagaaatgaacacgaatccatcccaaccgagatgccattaacattcatctaaaaatgttaggctctaaatggacgaaaaattctctcgccatcttaataacaaaataaactacaaattcctgacccaaggacactgtgttataagaggcgtgggctcccctggtggctgaccaggtcagctgccctggccttgcacccctctgcatgcagcacagaagggtgtgaccatgccctcagcaccactcttgtccccactgaacggcaactgagactgggtacctggagattctgaagtgcctttgctgtggttttcaaaataataaagatttgtattcaactc

SEQ ID NO: 1536 - DNA, 1740 bp, Homo sapiens
  Genbank Accession No. X52015
gaattccgggctgcagtcacagaatggaaatctgcagaggcctccgcagtcacctaatcactctcctcctcttcctgttccattcagagacgatctgccgaccctctgggagaaaatccagcaagatgcaagccttcagaatctgggatgttaaccagaagaccttctatctgaggaacaaccaactagttgctggatacttgcaaggaccaaatgtcaatttagaagaaaagatagatgtggtacccattgagcctcatgctctgttcttgggaatccatggagggaagatgtgcctgtcctgtgtcaagtctggtgatgagaccagactccagctggaggcagttaacatcactgacctgagcgagaacagaaagcaggacaagcgcttcgccttcatccgctcagacagtggccccaccaccagttttgagtctgccgcctgccccggttggttcctctgcacagcgatggaagctgaccagcccgtcagcctcaccaatatgcctgacgaaggcgtcatggtcaccaaattctacttccaggaggacgagtagtactgcccaggcctgcctgttcccattcttgcatggcaaggactgcagggactgccagtccccctgccccagggctcccggctatgggggcactgaggaccagccattgaggggtggaccctcagaaggcgtcacaacaacctggtcacaggactctgcctcctcttcaactgaccagcctccatgctgcctccagaatggtctttctaatgtgtgaatcagagcacagcagcccctgcacaaagcccttccatgtcgcctctgcattcaggatcaaaccccgaccacctgcccaacctgctctcctcttgccactgcctcttcctccctcattccaccttcccatgccctggatccatcaggccacttgatgacccccaaccaagtggctcccacaccctgttttacaaaaaagaaaagaccagtccatgagggaggtttttaagggtttgtggaaaatgaaaattaggatttcatgatttttttttttcagtccccgtgaaggagagcccttcatttggagattatgttctttcggggagaggctgaggacttaaaatattcctgcatttgtgaaatgatggtgaaagtaagtggtagcttttcccttctttttcttctttttttgtgatgtcccaacttgtaaaaattaaaagttatggtactatgttagccccataattttttttttccttttaaaacacttccataatctggactcctctgtccaggcactgctgcccagcctccaagctccatctccactccagattttttacagctgcctgcagtactttacctcctatcagaagtttctcagctcccaaggctctgagcaaatgtggctcctgggggttctttcttcctctgctgaaggaataaattgctccttgacattgtagagcttctggcacttggagacttgtatgaaagatggctgtgcctctgcctgtctcccccaccaggctgggagctctgcagagcaggaaacatgactcgtatatgtctcaggtccctgcagggccaagcacctagcctcgctcttggcaggtactcagcgaatgaatgctgtatatgttgggtgcaaagttccctacttcctgtgacttcagctctgttttacaataaaatcttgaaaatgccaaaaaaaaaaaaaaaaaaaccggaatcccggccggaattc

SEQ ID NO: 1537 - DNA, 3881 bp, Homo sapiens
  Genbank Accession No. X54162
gctgaagtgttcgaccagcaggaggttttctcctcagcccactcgctgcatccagatcagctcaccccgcgccctttcctgcccaccaggactctgatagcccctggcagccacagcccattttgccaagatgtctagagtagccaaatatcgccggcagtgagtgaagaccccgacatcgacagcctgctgggaccctgtctcccgaggagatggaggagctggagaaggagctggacgtggtggacccagacgggagtgttcccgtggggctgcggcagagaaaccagacggagaaacagtccacgggtgtgtacaaccgggaggccatgctcaacttctgtgaaaaggagaccaagaaacttatgcagagggagatgtccatggatgaaagcaagcaagtggagaccaagacagatgccaagaatggacaggaaaggggcagagatgccagcaaaaaagccctgggccccagacggaactcagatctggggaaggagccaaagaggggtggtttaaagaaaagcttctctagagacagagatgaagctggtggcaagagtggcgagaagcccaaggaggagaagatcatccggggcattgacaagggccgggtcagggctgcagtggataagaaggaggcagggaaggatgggagaggagaggagagggcagtggccaccaagaaggaagaggagaagaaagggggtgacaggaacacaggcttgagcagggacaaggataaaaagagagaggagatgaaggaggtggccaagaaagaggatgatgagaaggtaaaaggggagcgtaggaacacagacaccagaaaagagggtgagaagatgaaaagagcaggtgggaacacagacatgaaaaaggaggatgagaaggtaaaaagaggaactgggaacacagacaccaaaaaggacgatgaaaaagtcaagaagaatgaacccttacatgaaaaggaagccaaggatgacagcaagaccaaaacacccgagaaacagacgcccagtggccccaccaagccctctgaaggaccggccaaggtggaggaggaggcagctcccagcatatttgatgagcctctggagagagtgaagaacaatgaccccgagatgactgaggtgaacgtcaacaactcagactgcatcacaaatgagatcttggtccggtttactgaggctctggagttcaacactgtggttaagctgttcgccttggccaacacgcgagccgatgaccacgtggcctttgccattgccatcatgctcaaggccaacaagaccatcaccagcctcaacctggactccaaccacatcacaggcaaaggcatcctggccatcttccgggccctcctccagaacaacacgctgaccgagctccgcttccacaaccagcgacacatctgtggaggcaagacggagatggagatcgccaagctgctgaaggagaatacctccctgctcaagctgggctaccattttgagctggccgggccccgaatgactgtcaccaatctgctcagccgcaacatggacaagcagagacaaaagcggctgcaggagcaaaggcaggcacaggaagccaagggagagaagaaggatctgctggaggtacccaaggccggggccgtggctaagggctccccaaaaccttcacctcaaccatctccaaagccctctccaaagaactcacccaaaaaagggggtgctccagctgccccaccaccccctccccctcccttggctccaccccttatcatggagaacctgaagaattcactctcaccagctacccagaggaagatgggagacaaagtcctccctgcccaggagaagaactcccgtgaccagctattggctgccatccgctccagcaacctcaagcagctcaagaaggtggaagtgcccaaactgcttcagtaggaccaggctgccaggcaccatctgccaatgccatgactgctcaggcctcacctcccagggctacacagaccctgcccaccccatccctggctgacctgctgtggatgtccctattctgccatgggagcgtccaggcctgggtcacgctcaaggaaggatgccttatctcttctcactttccttttcttgtctctgaggctctccaaattttgctttagtacatggagctcaggtttctggacaagaagagtccttttagcacatcactgagaagatggcactgtccagggcccatgtagctggcaagctgcaaaaggcctgtgatccaggaaagatgtcccacagggaccacatccaccccagccccactgccctccagggccaggattcaggcctctgaggagcccacggggcaaagctgctgggccagtggcactctgtgtgggaaaatggcagaaagatggagaggcatgggggcccaaaggggagcgtggggaggggctgaggataccccaaagtccaggctaattagaggatgtggcaggggcagtggcctggatgcacagtgcctgatgggagtaggctccagacaggaggagtgggacagacagcagctggacttgaaggtttgatgccaaagcagacattttcctcacacccacctgctgctgtatgaatagctgtgtatctgtttttccataagattttgataatatatacaaacctttagctgtgaatggctgtgccccacctgttgtcctgaactgtgagtcctgatcctaaccctgggctccctggaggactctagaagctcaggttccctgccacactatttgagttggccaagaaataaattcacatcctcagaaagtgcagcatggaggaaaatctgaactctaagcagaagactctccactgacctggttgtccaggtctagaaggccaggcctctactaggtctgctcctgaaccagtcctgctgcctggagtcagtagccagagttgttctcaggggtgctggggcagagtggagcccagggtgctgggatggctatattaggcatgttcagggatgctcattccatgactctgcctaaccatgggctcagggccaggtcctcacagcagtcacaggcccaggaaggcggcaggcagagaagtggagtgactatttggagaatagcacccatatctgtgtgccctagggctcagaggggcctcatcttccccagccctccccacctgctcaccaattccacttcctgccccaactgcaggaatgctgacaatgctgccatgcccaccatcgggtgtaggtgaaaggcatctttctgaatttcattctcttgaaggtgctgccaccccttggcactgtggaactgccaccttgggtctgtgtcacttgtaggtttctctgcctccaggttgcctcaacagcaggaggcacagcagtttcaccatctttgaggtgagggtggggtgccccagctaggaagcaagatcgctgtgctaggtctgaccaaaaccagagggcagtctagtcctgggggtaaagccctcagatcccagggtacactcttctccattccctccacccacttgcctgtcaccccagtcacctaagcaatcactgggcccagaggagaggagacagacacacactggctcctggacctaaagggtatgagctggagctaaggccagctagagcttccactgtcagccctcactgtcagccccactgcacccccctgtgcctgctgggcactgggcactagctagatgctttaggttgcttcagctgatccttcaactctgtgaggtggataccaatattctattttgcagatagaatttggcccagagaggttaactaatatatccatgatcacacagctaataaaagtcagagctcaggaaaaaaaaaaaaaaaaaaaaaaaaaaaaaaaa

SEQ ID NO: 1538 - DNA, 799 bp, Homo sapiens
  Genbank Accession No. X55110
cgggcgaagcagcgcgggcagcgagatgcagcaccgaggcttcctcctcctcaccctcctcgccctgctggcgctcacctccgcggtcgccaaaaagaaagataaggtgaagaagggcggcccggggagcgagtgcgctgagtgggcctgggggccctgcacccccagcagcaaggattgcggcgtgggtttccgcgagggcacctgcggggcccagacccagcgcatccggtgcagggtgccctgcaactggaagaaggagtttggagccgactgcaagtacaagtttgagaactggggtgcgtgtgatgggggcacaggcaccaaagtccgccaaggcaccctgaagaaggcgcgctacaatgctcagtgccaggagaccatccgcgtcaccaagccctgcacccccaagaccaaagcaaaggccaaagccaagaaagggaagggaaaggactagacgccaagcctggatgccaaggagcccctggtgtcacatggggcctggccacgccctccctctcccaggcccgagatgtgacccaccagtgccttctgtctgctcgttagctttaatcaatcatgccctgccttgtccctctcactccccagccccacccctaagtgcccaaagtggggagggacaagggattctgggaagcttgagcctcccccaaagcaatgtgagtcccagagcccgcttttgttcttccccacaattccattactaagaaacacatcaaataaactgactttttccccccaataaaagctcttcttttttaatataaaaaaaaaaaaa

SEQ ID NO: 1539 - DNA, 1426 bp, Homo sapiens
  Genbank Accession No. X56667
cggagcgggagcggtgcaggctgaggtctccgagcggctcgccatggctggcccgcagcagcagcccccttacctgcacctggccgagctgacggcgtcccagttcctggaaatatggaagcactttgacgcagacggaaatgggtatattgaaggtaaagagctagaaaactttttccaagagctggagaaggcaaggaaaggctctggcatgatgtcaaagagtgacaactttggagaaaagatgaaggagttcatgcagaagtatgataaaaactcagatgggaaaatcgagatggcagagctggcgcagatcctgccaaccgaagagaacttccttctgtgcttcaggcagcacgtgggctccagcgccgagtttatggaggcttggcggaagtacgacacagacaggagtggctacatcgaagccaatgagctcaagggattcctgtcagacctgctgaagaaggcgaaccggccgtacgatgagcccaagctccaggaatacacccaaaccatactacggatgtttgacttgaacggggatggcaaattgggcctctcagagatgtcccgactcctgcctgtccaggaaaacttcctgcttaaatttcagggcatgaagctgacctcagaggagtttaacgcgatcttcacattttacgacaaggatagaagcggctacattgacgagcatgagctggatgcccttttgaaggatctgtacgagaaaaacaaaaaggaaatcaatattcaacagctcaccaactacagaaagagcgtcatgtccttggcagaggcagggaagctctaccgcaaggacctggagattgtgctctgcagcgagccccccatgtaaagtggggacgggggctgcttctccacctcccccaaaccctgcttctgctgccctgatgcgtctacccagactcagagaccgtgagcgccccgcccccacccctacagcctgcacacacctgcctgcagagcaggaaacgagagatagaggatgggcagctggggggctgtcctgagccccctgcacccacccctgcccaggcagtctttgctcagtggatcacacacatggaaggtgatgggggcatgggtggagggtccctaattctcttcgctgtgatgcatgagctccctcgctgtatgatttaggcttctatgtccaacagagtggactcttccctctcgctcccctctgccggtcccccatgccaccacccaccccaaacttccaggttccatccaccaccttgccaatggtgtagctgtcctctcagaactcctgtgtgtggaaggcacccgccctttccttgccttctttactcggcgtgctccttttctctttgggtttcttgtttaccaaagaagagtttacagacaataaaatggaaaggtcctgctgtggaaactt

SEQ ID NO: 1540 - DNA, 3212 bp, Homo sapiens
  Genbank Accession No. X56807
gaattcccgctcggcccgcgacctgccccgagccctctccatggaggcagcccgcccctccggctcctggaacggagccctctgccggctgctcctgctgaccctcgcgatcttaatatttgccagtgatgcctgcaaaaatgtgacattacatgttccctccaaactagatgccgagaaacttgttggtagagttaacctgaaagagtgctttacagctgcaaatctaattcattcaagtgatcctgacttccaaattttggaggatggttcagtctatacaacaaatactattctattgtcctcggagaagagaagttttaccatattactttccaacactgagaaccaagaaaagaagaaaatatttgtctttttggagcatcaaacaaaggtcctaaagaaaagacatactaaagaaaaagttctaaggcgcgccaagagaagatgggctccaattccttgttcgatgctagaaaactccttgggtccttttccacttttccttcaacaggttcaatctgacacggcccaaaactataccatatactattccataagaggtcctggagttgaccaagaacctcggaatttattttatgtggagagagacactggaaacttgtattgtactcgtcctgtagatcgtgagcagtatgaatcttttgagataattgcctttgcaacaactccagatgggtatactccagaacttccactgcccctaataatcaaaatagaggatgaaaatgataactacccaatttttacagaagaaacttatacttttacaatttttgaaaattgcagagtgggcactactgtgggacaagtgtgtgctactgacaaagatgagcctgacacgatgcacacacgcctgaagtactccatcattgggcaggtgccaccatcacccaccctattttctatgcatccaactacaggcgtgatcaccacaacatcatctcagctagacagagagttaattgacaagtaccagttgaaaataaaagtacaagacatggatggtcagtattttggtctacagacaacttcaacttgtatcattaacattgatgatgtaaatgaccacttgccaacatttactcgtacttcttatgtgacatcagtggaagaaaatacagttgatgtggaaatcttacgagttactgttgaggataaggacttagtgaatactgctaactggagagctaattataccattttaaagggcaatgaaaatggcaattttaaaattgtaacagatgccaaaaccaatgaaggagttctttgtgtagttaagcctttgaattatgaagaaaagcaacagatgatcttgcaaattggtgtagttaatgaagctccattttccagagaggctagtccaagatcagccatgagcacagcaacagttactgttaatgtagaagatcaggatgagggccctgagtgtaaccctccaatacagactgttcgcatgaaagaaaatgcagaagtgggaacaacaagcaatggatataaagcatatgacccagaaacaagaagtagcagtggcataaggtataagaaattaactgatccaacagggtgggtcaccattgatgaaaatacaggatcaatcaaagttttcagaagcctggatagagaggcagagaccatcaaaaatggcatatataatattacagtccttgcatcagaccaaggagggagaacatgtacggggacactgggcattatacttcaagacgtgaatgataacagcccattcatacctaaaaagacagtgatcatctgcaaacccaccatgtcatctgcggagattgttgcggttgatcctgatgagcctatccatggcccaccctttgactttagtctggagagttctacttcagaagtacagagaatgtggagactgaaagcaattaatgatacagcagcacgtctttcctatcagaatgatcctccatttggctcatatgtagtacctataacagtgagagatagacttggcatgtctagtgtcacttcattggatgttacactgtgtgactgcattaccgaaaatgactgcacacatcgtgtagatccaaggattggcggtggaggagtacaacttggaaagtgggccatccttgcaatattgttgggcatagcattgctcttttgcatcctgtttacgctggtctgtggggcttctgggacgtctaaacaaccaaaagtaattcctgatgatttagcccagcagaacctaattgtatcaaacacagaagctcctggagatgacaaagtgtattctgcgaatggcttcacaacccaaactgtgggcgcttctgctcagggagtttgtggcaccgtgggatcaggaatcaaaaacggaggtcaggagaccatcgaaatggtgaaaggaggacaccagacctcggaatcctgccggggggctggccaccatcacaccctggactcctgcaggggaggacacacggaggtggacaactgcagatacacttactcggagtggcacagttttactcagccccgtcttggtgaagaatccattagaggacacactctgattaaaaattaaacaatgaaagaaagtgtatctgtgtaatcaagatgaaaatcacaagcatgcccaagactatgtcctgacatataactatgaaggaagaggatcggtggctgggtctgtaggttgttgcagtgaacgacaagaagaagatgggcttgaatttttggataatttggagcccaaatttaggacactagcagaagcatgcatgaagagatgagtgtgttctaataagtctctgaaagccagtggctttatgacttttaaaaaaaattacaaaccaagaattttttaaagcagaagatgctatttgtgggggtttttctctcattatttggatggaatctctttggtcaaatgcacatttacagagagacactataaacaagtacacaaatttttcaatttttacatatttttaaattacttatcttctatccaaggaggtctacagagaaattaaagtctgccttatttgttacatttgggtataatgacaacagccaatttatagtgcaataaaatgtaattaattcaagtccttattatagactatttgaagcacaacctaatggaaaattgtagagaccttgctttaacattatctccagttaattaagtgttcatgtggtgggaattc

SEQ ID NO: 1541 - DNA, 1450 bp, Homo sapiens
  Genbank Accession No. X57348
ccaggcagcagttagcccgccgcccgcctgtgtgtccccagagccatggagagagccagtctgatccagaaggccaagctggcagagcaggccgaacgctatgaggacatggcagccttcccaggcagcagttagcccgccgcccgcctgtgtgtccccagagccatggagagagccagtctgatccagaaggccaagctggcagagcaggccgaacgctatgaggacatggcagccttcatgaaaggcgccgtggagaagggcgaggagctctcctgcgaagagcgaaacctgctctcagtagcctataagaacgtggtgggcggccagagggctgcctggagggtgctgtccagtattgagcagaaaagcaacgaggagggctcggaggagaaggggcccgaggtgcgtgagtaccgggagaaggtggagactgagctccagggcgtgtgcgacaccgtgctgggcctgctggacagccacctcatcaaggaggccggggacgccgagagccgggtcttctacctgaagatgaagggtgactactaccgctacctggccgaggtggccaccggtgacgacaagaagcgcatcattgactcagcccggtcagcctaccaggaggccatggacatcagcaagaaggagatgccgcccaccaaccccatccgcctgggcctggccctgaacttttccgtcttccactacgagatcgccaacagccccgaggaggccatctctctggccaagaccactttcgacgaggccatggctgatctgcacaccctcagcgaggactcctacaaagacagcaccctcatcatgcagctgctgcgagacaacctgacactgtggacggccgacaacgccggggaagaggggggcgaggctccccaggagccccagagctgagtgttgcccgccaccgccccgccctgccccctccagtccccgccctgccgagaggactagtatggggtgggaggccccacccttctcccctaggcgctgttcttgctccaaagggctccgtggagagggactggcagagctgaggccacctggggctggggatcccactcttcttgcagctgttgagcgcacctaaccactggtcatgcccccacccctgctctccgcacccgcttcctcccgaccccaggaccaggctacttctcccctcctcttgcctccctcctgcccctgctgcctcttgattcgtaggaattgaggagtgtctccgccttgtggctgagaactggacagtggcaggggctggagatgggtgtgtgtgtgtgtgtgtgtgtgtgtgtgtgcgcgcgcgccagtgcaagaccgagactgagggaaagcatgtctgctgggtgtgaccatgtttcctctcaataaagttcccctgtgacactcaaaaaaaaaaaaaaaaaaaaaaaaaaaaaaaaaaaaaaaaaaa

SEQ ID NO: 1542 - DNA, 2247 bp, Homo sapiens
  Genbank Accession No. X57766
ccggggcggatggctccggccgcctggctccgcagcgcggccgcgcgcgccctcctgcccccgatgctgctgctgctgctccagccgccgccgctgctggcccgggctctgccgccggacgtccaccacctccatgccgagaggagggggccacagccctggcatgcagccctgcccagtagcccggcacctgcccctgccacgcaggaagccccccggcctgccagcagcctcaggcctccccgctgtggcgtgcccgacccatctgatgggctgagtgcccgcaaccgacagaagaggttcgtgctttctggcgggcgctgggagaagacggacctcacctacaggatccttcggttcccatggcagttggtgcaggagcaggtgcggcagacgatggcagaggccctaaaggtatggagcgatgtgacgccactcacctttactgaggtgcacgagggccgtgctgacatcatgatcgacttcgccaggtactggcatggggacgacctgccgtttgatgggcctgggggcatcctggcccatgccttcttccccaagactcaccgagaaggggatgtccacttcgactatgatgagacctggactatcggggatgaccagggcacagacctgctgcaggtggcagcccatgaatttggccacgtgctggggctgcagcacacaacagcagccaaggccctgatgtccgccttctacacctttcgctacccactgagtctcagcccagatgactgcaggggcgttcaacacctatatggccagccctggcccactgtcacctccaggaccccagccctgggcccccaggctgggatagacaccaatgagattgcaccgctggagccagacgccccgccagatgcctgtgaggcctcctttgacgcggtctccaccatccgaggcgagctctttttcttcaaagcgggctttgtgtggcgcctccgtgggggccagctgcagcccggctacccagcattggcctctcgccactggcagggactgcccagccctgtggacgctgccttcgaggatgcccagggccacatttggttcttccaaggtgctcagtactgggtgtacgacggtgaaaagccagtcctgggccccgcacccctcaccgagctgggcctggtgaggttcccggtccatgctgccttggtctggggtcccgagaagaacaagatctacttcttccgaggcagggactactggcgtttccaccccagcacccggcgtgtagacagtcccgtgccccgcagggccactgactggagaggggtgccctctgagatcgacgctgccttccaggatgctgatggctatgcctacttcctgcgcggccgcctctactggaagtttgaccctgtgaaggtgaaggctctggaaggcttcccccgtctcgtgggtcctgacttctttggctgtgccgagcctgccaacactttcctctgaccatggcttggatgccctcaggggtgctgacccctgccaggccacgaatatcaggctagagacccatggccatctttgtggctgtgggcaccaggcatgggactgagcccatgtctcctgcagggggatggggtggggtacaaccaccatgacaactgccgggagggccacgcaggtcgtggtcacctgccagcgactgtctcagactgggcagggaggctttggcatgacttaagaggaagggcagtcttgggacccgctatgcaggtcctggcaaacctggctgccctgtctcatccctgtccctcagggtagcaccatggcaggactgggggaactggagtgtccttgctgtatccctgttgtgaggttccttccaggggctggcactgaagcaagggtgctggggccccatggccttcagccctggctgagcaactgggctgtagggcagggccacttcctgaggtcaggtcttggtaggtgcctgcatctgtctgccttctggctgacaatcctggaaatctgttctccagaatccaggccaaaaagttcacagtcaaatggggaggggtattcttcatgcaggagaccccaggccctggaggctgcaacatacctcaatcctgtcccaggccggatcctcctgaagcccttttcgcagcactgctatcctccaaagccattgtaaatgtgtgtacagtgtgtataaaccttcttcttcttttttttttttaaactgaggattgtcattaaacacagttgttttct

SEQ ID NO: 1543 - DNA, 3226 bp, Homo sapiens
  Genbank Accession No. X60382
aatccatctgagaatatgctgccacaaataccctttttgctgctagtatccttgaacttggttcatggagtgttttacgctgaacgataccaaacgcccacaggcataaaaggcccactacccaacaccaagacacagttcttcattccctacaccataaagagtaaaggtatagcagtaagaggagagcaaggtactcctggtccaccaggccctgctggacctcgagggcacccaggtccttctggaccaccaggaaaaccaggctacggaagtcctggactccaaggagagccagggttgccaggaccaccgggaccatcagctgtagggaaaccaggtgtgccaggactcccaggaaaaccaggagagagaggaccatatggaccaaaaggagatgttggaccagctggcctaccaggaccccggggcccaccaggaccacctggaatccctggaccggctggaatttctgtgccaggaaaacctggacaacagggacccacaggagccccaggacccaggggctttcctggagaaaagggtgcaccaggagtccctggtatgaatggacagaaaggggaaatgggatatggtgctcctggtcgtccaggtgagaggggtcttccaggccctcagggtcccacaggaccatctggccctcctggagtgggaaaaagaggtgaaaatggggttccaggacagccaggcatcaaaggtgatagaggttttccgggagaaatgggaccaattggcccaccaggtccccaaggccctcctggggaacgagggccagaaggcattggaaagccaggagctgctggagccccaggccagccagggattccaggaacaaaaggtctccctggggctccaggaatagctgggcccccagggcctcctggctttgggaaaccaggcttgccaggcctgaagggagaaagaggacctgctggccttcctgggggtccaggtgccaaaggggaacaagggccagcaggtcttcctgggaagccaggtctgactggaccccctgggaatatgggaccccaaggaccaaaaggcatcccgggtagccatggtctcccaggccctaaaggtgagacagggccagctgggcctgcaggataccctggggctaagggtgaaaggggttcccctgggtcagatggaaaaccagggtacccaggaaaaccaggtctcgatggtcctaagggtaacccagggttaccaggtccaaaaggtgatcctggagttggaggacctcctggtctcccaggccctgtgggcccagcaggagcaaagggaatgcccggacacaatggagaggctggcccaagaggtgcccctggaataccaggtactagaggccctattgggccaccaggcattccaggattccctgggtctaaaggggatccaggaagtcccggtcctcctggcccagctggcatagcaactaagggcctcaatggacccaccgggccaccagggcctccaggtccaagaggcccctctggagagcctggtcttccagggccccctgggcctccaggcccaccaggtcaagcagtcatgcctgagggttttataaaggcaggccaaaggcccagtctttctgggacccctcttgttagtgccaaccagggggtaacaggaatgcctgtgtctgcttttactgttattctctccaaagcttacccagcaataggaactcccataccatttgataaaattttgtataacaggcaacagcattatgacccaaggactggaatctttacttgtcagataccaggaatatactatttttcataccacgtgcatgtgaaagggactcatgtttgggtaggcctgtataagaatggcacccctgtaatgtacacctatgatgaatacaccaaaggctacctggatcaggcttcagggagtgccatcatcgatctcacagaaaatgaccaggtgtggctccagcttcccaatgccgagtcaaatggcctatactcctctgagtatgtccactcctctttctcaggattcctagtggctccaatgtgagtacaccccacagagctaatctaaatcttgtgctagaaaaagcattctctaactctaccccaccctacaaaatgcatatggaggtaggctgaaaagaatgtaatttttattttctgaaatacagatttgagctatcagaccaacaaaccttccccctgaaaagtgagcagcaacgtaaaaacgtatgtgaagcctctcttgaatttctagttagcaatcttaaggctctttaaggttttctccaatattaaaaaatatcaccaaagaagtcctgctatgttaaaaacaaacaacaaaaaacaaagcaacaaaaaaaaaaattaaaaaaaaaaacagaaatagagctctaagttatgtgaaatttgatttgagaaactcggcatttcctttttaaaaaagcctgtttctaactatgaatatgagaacttctaggaaacatccaggaggtatcatataactttgtagaacttaaatacttgaatattcaaatttaaaagacactgtatcccctaaaatatttctgatggtgcactactctgaggcctgtatggcccctttcatcaatatctattcaaatatacaggtgcatatatacttgttaaagctcttatataaaaaagccccaaaatattgaagttcatctgaaatgcaaggtgctttcatcaatgaaccttttcaaaacttttctatgattgcagagaagctttttatatacccagcataacttggaaacaggtatctgacctattcttatttagttaacacaagtgtgattaatttgatttctttaattccttattgaatcttatgtgatatgattttctggatttacagaacattagcacatgtaccttgtgcctcccattcaagtgaagttataatttacactgagggtttcaaaattcgactagaagtggagatatattatttatttatgcactgtactgtatttttatattgctgtttaaaacttttaagctgtgcctcacttattaaagcacaaaatgttttacctactccttatttacgacacaataaaataacatcaatagatttttaggctgaattaatttgaaagcagcaatttgctgttctcaaccattctttcaaggcttttcattcgacacaataaaataacatcaatagatttttagggatgggtggcttt

SEQ ID NO: 1544 - DNA, 1707 bp, Homo sapiens
  Genbank Accession No. X60673
cggcgctgggctgaggggaggggttgtcttaaaagtctctccttccccctgtaggggcggccggcgagtcccagtgagagcggagggtgccagaggtagggggccgagaaacaaagttcccggggcttcctccggggccgcggtcggggctgcgcgtttgaccgcccccctcctcgcgaagcaatggcttccaaactcctgcgcgcggtcatcctcgggccgcccggctcgggcaagggcaccgtgtgccagaggatcgcccagaactttggtctccagcatctctccagcggccacttcttgcgggagaacatcaaggccagcaccgaagttggtgagatggcaaagcagtatatagagaaaagtcttttggttccagaccatgtgatcacacgcctaatgatgtccgagttggagaacaggcgtggacagcactggctccttgatggttttcctaggacattaggacaagccgaagccctggacaaaatctgtgaagtggatctagtgatcagtttgaatattccatttgaaacacttaaagatcgtctcagccgccgttggattcaccctcctagcggaagggtatataacctggacttcaatccacctcatgtacatggtattgatgacgtcactggtgaaccgttagtccagcaggaggatgataaacccgaagcagttgctgccaggctaagacagtacaaagacgtggcaaagccagtcattgaattatacaagagccgaggagtgctccaccaattttccggaacggagacgaacaaaatctggccctacgtttacacacttttctcaaacaagatcacacctattcagtccaaagaagcatattgaccctgcccaatggaagaaccaggaagatgtggtcattcattcaatagtgtgtgtagtattggtgctgtgtccaaattagaagctagctgaggtagcttgcagcatcttttctagttgaaatggtgaactgataggaaaacaaatgagtagaaagagttcatgaagaggccctcctctgcctttcaaaaggctggtcacctacacatgtttaaggtgtctctgcacatgtctcaagcccatcacaagaaagcaagtacagtgtggatttcaaatggtgtgtaacttcagctccagctggtttttgacagctgttgctgtggtaatatttttgacatgtgatggtgatagtctctggttctccccatccccacaaaggctgttgaaccacagcaccaggaagcctgagaatgaatcctgagggctctagcccaggctttgtcccaggctttctggtgtgtgccctcctggtaacagtgaaattgaagctacttactcatagtggttgtttctctggtcttgagtgactgtgtccacagttcatttttttccggtaggaataactccttttctacatccacgctccatagagtctctccttttcagacatcctgggatgaaagaatttggcttttttttttcttttttttttggacatctgttttcactcttaggcttttaaacaatagttattgcttttatccctctcagattctaataactgagagcgatggggctatattgaatctctgtatgcactgagaactgagctatgaagagaatcttattaaactgctggtctgactttatggattgacactgttcctttcttttattgtgaaaaaaaaaaaaaaa

SEQ ID NO: 1545 - DNA, 2000 bp, Homo sapiens
  Genbank Accession No. X68277
tttgggctgtgtgtgcgacgcgggtcggaggggcagtcgggggaaccgcgaagaagccgaggagcccggagccccgcgtgacgctcctctctcagtccaaaagcggcttttggttcggcgcagagagacccgggggtctagcttttcctcgaaaagcgccgccctgcccttggccccgagaacagacaaagagcaccgcagggccgatcacgctgggggcgctgaggccggccatggtcatggaagtgggcaccctggacgctggaggcctgcgggcgctgctgggggagcgagcggcgcaatgcctgctgctggactgccgctccttcttcgctttcaacgccggccacatcgccggctctgtcaacgtgcgcttcagcaccatcgtgcggcgccgggccaagggcgccatgggcctggagcacatcgtgcccaacgccgagctccgcggccgcctgctggccggcgcctaccacgccgtggtgttgctggacgagcgcagcgccgccctggacggcgccaagcgcgacggcaccctggccctggcggccggcgcgctctgccgcgaggcgcgcgccgcgcaagtcttcttcctcaaaggaggatacgaagcgttttcggcttcctgcccggagctgtgcagcaaacagtcgacccccatggggctcagccttcccctgagtactagcgtccctgacagcgcggaatctgggtgcagttcctgcagtaccccactctacgatcagggtggcccggtggaaatcctgccctttctgtacctgggcagtgcgtatcacgcttcccgcaaggacatgctggatgccttgggcataactgccttgatcaacgtctcagccaattgtcccaaccattttgagggtcactaccagtacaagagcatccctgtggaggacaaccacaaggcagacatcagctcctggttcaacgaggccattgacttcatagactccatcaagaatgctggaggaagggtgtttgtccactgccaggcaggcatttcccggtcagccaccatctgccttgcttaccttatgaggactaatcgagtcaagctggacgaggcctttgagtttgtgaagcagaggcgaagcatcatctctcccaacttcagcttcatgggccagctgctgcagtttgagtcccaggtgctggctccgcactgttcggcagaggctgggagccccgccatggctgtgctcgaccgaggcacctccaccaccaccgtgttcaacttccccgtctccatccctgtccactccacgaacagtgcgctgagctaccttcagagccccattacgacctctcccagctgctgaaaggccacgggaggtgaggctcttcacatcccattgggactccatgctccttgagaggagaaatgcaataactctgggaggggctcgagagggctggtccttatttatttaacttcacccgagttcctctgggtttctaagcagttatggtgatgacttagcgtcaagacatttgctgaactcagcacattcgggaccaatatatagtgggtacatcaagtccatctgacaaaatggggcagaagagaaaggactcagtgtgtgatccggtttctttttgctcgcccctgttttttgtagaatctcttcatgcttgacatacctaccagtattattcccgacgacacatatacatatgagaatataccttatttatttttgtgtaggtgtctgccttcacaaatgtcattgtctactcctagaagaaccaaatacctcaatttttgtttttgagtactgtactatcctgtaaatatatcttaagcaggtttgttttcagcactgatggaaaataccagtgttgggtttttttttagttgccaacagttgtatgtttgctgattatttatgacctgaaataatatatttcttcttctaagaagacattttgttacataaggatgacttttttatacaatggaataaattatggcatttctattg

SEQ ID NO: 1546 - DNA, 1334 bp, Homo sapiens
  Genbank Accession No. X70326
gcagacccccatcatgggcagccagagctccaaggctccccggggcgacgtgaccgccgaggaggcagcaggcgcttcccccgcgaaggccaacggccaggagaatggccacgtgaaaagcaatggagacttatcccccaagggtgaaggggagtcgccccctgtgaacggaacagatgaggcagccggggccactggcgatgccatcgagccagcaccccctagccagggtgctgaggccaagggggaggtcccccccaaggagacccccaagaagaagaagaaattctctttcaagaagcctttcaaattgagcggcctgtccttcaagagaaatcggaaggagggtgggggtgattcttctgcctcctcacccacagaggaagagcaggagcagggggagatcggtgcctgcagcgacgagggcactgctcaggaagggaaggccgcagccacccctgagagccaggaaccccaggccaagggggcagaggctagtgcagcctcagaagaagaggcagggccccaggctacagagccatccactccctcggggccggagagtggccctacaccagccagcgctgagcagaatgagtagctaggtaggggcaggtgggtgatctctaagctgcaaaaactgtgctgtccttgtgaggtcactgcctggacctggtgccctggctgccttcctgtgcccagaaaggaaggggctattgcctcctcccagccacgttccctttcctcctctccctcctgtggattctcccatcagccatctggttctcctcttaaggccagttgaagatggtcccttacagcttcccaagttaggttagtgatgtgaaatgctcctgtccctggccctacctccttccctgtccccacccctgcataaggcagttgttggttttcttccccaattcttttccaagtaggttttgtttaccctactccccaaatccctgagccagaagtggggtgcttatactcccaaaccttgagtgtccagccttcccctgttgtttttagtctcttgtgctgtgcctagtggcacctgggctggggaggacactgccccgtctaggtttttataaatgtcttactcaagttcaaacctccagcctgtgaatcaactgtgtctcttttttgacttggtaagcaagtattaggctttggggtggggggaggtctgtaatgtgaaacaacttcttgtctttttttctcccactgttgtaaataacttttaatggccaaaccccagatttgtactttttttttttttctaactgctaaaaccattctcttccacctggttttactgtaacatttgg

SEQ ID NO: 1547 - DNA, 1097 bp, Homo sapiens
  Genbank Accession No. X74039
agagaagacgtgcagggaccccgcgcacaggagctgccctcgcgacatgggtcacccgccgctgctgccgctgctgctgctgctccacacctgcgtcccagcctcttggggcctgcggtgcatgcagtgtaagaccaacggggattgccgtgtggaagagtgcgccctgggacaggacctctgcaggaccacgatcgtgcgcttgtgggaagaaggagaagagctggagctggtggagaaaagctgtacccactcagagaagaccaacaggaccctgagctatcggactggcttgaagatcaccagccttaccgaggttgtgtgtgggttagacttgtgcaaccagggcaactctggccgggctgtcacctattcccgaagccgttacctcgaatgcatttcctgtggctcatcagacatgagctgtgagaggggccggcaccagagcctgcagtgccgcagccctgaagaacagtgcctggatgtggtgacccactggatccaggaaggtgaagaagggcgtccaaaggatgaccgccacctccgtggctgtggctaccttcccggctgcccgggctccaatggtttccacaacaacgacaccttccacttcctgaaatgctgcaacaccaccaaatgcaacgagggcccaatcctggagcttgaaaatctgccgcagaatggccgccagtgttacagctgcaaggggaacagcacccatggatgctcctctgaagagactttcctcattgactgccgaggccccatgaatcaatgtctggtagccaccggcactcacgaacgctcactctggggaagctggttgccatgtaaaagtactactgccctgagaccaccatgctgtgaggaagcccaagctactcatgtataaatgccatgtggagatagagccccagatgtttcagccatctcagcccaggcaccagacaagtgggtgaagaagccaccttggacatgtagccccagcagatgtgatatagagaagaaacaggaaacttggctatattagtttcctagggctgcctgtgataaattattacaaactttataaaaaaaaaaaaaaaaaaaaaaaaaaa

SEQ ID NO: 1548 - DNA, 1766 bp, Homo sapiens
  Genbank Accession No. X74570
cggtcaggtccagcacttgggagctgactgtgctggaggtgacaggctttgcggggtccgcctgtgtgcaggagtcgcaaggtcgctgagcaggacccaaaggtggcccgaggcagccgggatgacagctctccccaggaatcctgctgcctgctgagaaacatggtcagcaagtcccgctggaagctcctggccatgttggctctggtcctggtcgtcatggtgtggtattccatctcccgggaagacagtttttattttcccatcccagagaagaaggagccgtgcctccagggtgaggcagagagcaaggcctctaagctctttggcaactactcccgggatcagcccatcttcctgcggcttgaggattatttctgggtcaagacgccatctgcttacgagctgccctatgggaccaaggggagtgaggatctgctcctccgggtgctagccatcaccagctcctccatccccaagaacatccagagcctcaggtgccgccgctgtgtggtcgtggggaacgggcaccggctgcggaacagctcactgggagatgccatcaacaagtacgatgtggtcatcagattgaacaatgccccagtggctggctatgagggtgacgtgggctccaagaccaccatgcgtctcttctaccctgaatctgcccacttcgaccccaaagtagaaaacaacccagacacactcctcgtcctggtagctttcaaggcaatggacttccactggattgagaccatcctgagtgataagaagcgggtgcgaaagggtttctggaaacagcctcccctcatctgggatgtcaatcctaaacagattcggattctcaaccccttcttcatggagattgcagctgacaaactgctgagcctgccaatgcaacagccacggaagattaagcagaagcccaccacgggcctgttggccatcacgctggccctccacctctgtgacttggtgcacattgccggctttggctacccagacgcctacaacaagaagcagaccattcactactatgagcagatcacgctcaagtccatggcggggtcaggccataatgtctcccaagaggccctggccattaagcggatgctggagatgggagctatcaagaacctcacgtccttctgacctgggcaagagctgtagcctgtcggttgcctactctgctgtctgggtgacccccatgcgtggctgtgggggtggctggtgccagtatgacccacttggactcaccccctcttggggagggagttctgggcctggccaggtctgagatgaggccatgcccctggctgctcttatggagccgagatccagtcagggtgggggcgctggagccgtgggagcccggccagggcagggggctcgtcgctgtggcaccccctctctgccagcaccaagagattatttaatgggctatttaattaaggggtaggaaggtgctgtgggctggtcccacacatccaggaaagaggccagtagagaattctgcccactttttataaaaacttacagcgatggccccaccaaggcctagacacggcactggcctcccaggagggcaggggcattgggaatgggtgggtgccctccagagaggggctgctacctcccagcaggcatgggaagagcactggtgtgggggttccaccgagaaggggacctcatctagaaaagaggttacaaacctaccattaaactatttttcctaaaacggaaaaaaaaaaaaaaaaaaaaaaaaa

SEQ ID NO: 1549 - DNA, 817 bp, Homo sapiens
  Genbank Accession No. X76029
agtcctgcgtccgggccccgaggcgcagcagggcaccaggtggagcaccagctacgcgtggcgcagcgcagcgtccctagcaccgagcctcccgcagccgccgagatgctgcgaacagagagctgccgccccaggtcgcccgccggacaggtggccgcggcgtccccgctcctgctgctgctgctgctgctcgcctggtgcgcgggcgcctgccgaggtgctccaatattacctcaaggattacagcctgaacaacagctacagttgtggaatgagatagatgatacttgttcgtcttttctgtccattgattctcagcctcaggcatccaacgcactggaggagctttgctttatgattatgggaatgctaccaaagcctcaggaacaagatgaaaaagataatactaaaaggttcttatttcattattcgaagacacagaagttgggcaagtcaaatgttgtgtcgtcagttgtgcatccgttgctgcagctcgttcctcacctgcatgagagaagaatgaagagattcagagtggacgaagaattccaaagtccctttgcaagtcaaagtcgaggatattttttattcaggccacggaatggaagaaggtcagcagggttcatttaaaatggatgccagctaattttccacagagcaatgctatggaatacaaaatgtactgacattttgttttcttctgaaaaaaatccttgctaaatgtactctgttgaaaatccctgtgttgtcaatgttctcagttgtaacaatgttgtaaatgttcaatttgttgaaaattaaaaaatctaaaaataaa

SEQ ID NO: 1550 - DNA, 220 bp, Homo sapiens
  Genbank Accession No. X76220
cccgcgcgggggccgccaggccactgggctccgcggagccagcgagaggtctgcgcggagtctgagcggcgctcgtcccgtcccaaggccgacgccagcacgccgtcatggcccccgcagcggcgacggggggcagcaccctgcccagtggcttctcggtcttcaccaccttgcccgacttgctcttcatctttgagtttgtgagtggctcctggccggg

SEQ ID NO: 1551 - DNA, 2055 bp, Homo sapiens
  Genbank Accession No. X76342
ctgagcatcagtcagaaaaagtctatgtttgcagaaatacagatccaagacaaagacaggatgggcactgctggaaaagttattaaatgcaaagcagctgtgctttgggagcagaagcaacccttctccattgaggaaatagaagttgccccaccaaagactaaagaagttcgcattaagattttggccacaggaatctgtcgcacagatgaccatgtgataaaaggaacaatggtgtccaagtttccagtgattgtgggacatgaggcaactgggattgtagagagcattggagaaggagtgactacagtgaaaccaggtgacaaagtcatccctctctttctgccacaatgtagagaatgcaatgcttgtcgcaacccagatggcaacctttgcattaggagcgatattactggtcgtggagtactggctgatggcaccaccagatttacatgcaagggcaaaccagtccaccacttcatgaacaccagtacatttaccgagtacacagtggtggatgaatcttctgttgctaagattgatgatgcagctcctcctgagaaagtctgtttaattggctgtgggttttccactggatatggcgctgctgttaaaactggcaaggtcaaacctggttccacttgcgtcgtctttggcctgggaggagttggcctgtcagtcatcatgggctgtaagtcagctggtgcatctaggatcattgggattgacctcaacaaagacaaatttgagaaggccatggctgtaggtgccactgagtgtatcagtcccaaggactctaccaaacccatcagtgaggtgctgtcagaaatgacaggcaacaacgtgggatacacctttgaagttattgggcatcttgaaaccatgattgatgccctggcatcctgccacatgaactatgggaccagcgtggttgtaggagttcctccatcagccaagatgctcacctatgacccgatgttgctcttcactggacgcacatggaagggatgtgtctttggaggtttgaaaagcagagatgatgtcccaaaactagtgactgagttcctggcaaagaaatttgacctggaccagttgataactcatgttttaccatttaaaaaaatcagtgaaggatttgagctgctcaattcaggacaaagcattcgaacggtcctgacgttttgagatccaaagtggcaggaggtctgtgttgtcatggtgaactggagtttctcttgtgagagttccctcatctgaaatcatgtatctgtctcacaaatacaagcataagtagaagatttgttgaagacatagaacccttataaagaattattaacctttataaacatttaaagtcttgtgagcacctgggaattagtataataacaatgttaatatttttgatttacattttgtaaggctataattgtatcttttaagaaaacatacacttggatttctatgttgaaatggagatttttaagagttttaaccagctgctgcagatatataactcaaaacagatatagcgtataaagatatagtaaatgcatctcctagagtaatattcacttaacacattgaaactattattttttagatttgaatataaatgtattttttaaacacttgttatgagttaacttggattacattttgaaatcagttcattccatgatgcatattactggattagattaagaaagacagaaaagattaagggacgggcacatttttcaacgattaagaatcatcattacataacttggtgaaactgaaaaagtatatcatatgggtacacaaggctatttgccagcatatattaatattttagaaaatattccttttgtaatactgaatataaacatagagctagagtcatattatcatacttatcataatgttcaatttgatacagtagaattgcaagtccctaagtccctattcactgtgcttagtagtgactccatttaataaaaagtgtttttagtttttaacaactacactgatgtatctatatatatctataacatgttaaaaattcttaagaaaatt

SEQ ID NO: 1552 - DNA, 3236 bp, Homo sapiens
  Genbank Accession No. X78817
cgtgggagcagtggggttcgacggcgcggccgcgaggccgccatggccgctcacgggaagctgcggcgggagcgggggctgcaggctgagtatgagacgcaagtcaaagagatgcgctggcagctgagcgagcagctgcgctgcctggagctgcagggcgagctgcggcgggagttgctgcaggagctggcagagttcatgcggcgccgcgctgaggtggagctggaatactcccggggcctggaaaagctggccgagcgcttctccagccgtggaggccgcctggggagcagccgggagcaccaaagcttccggaaggagccgtccctcctgtcgcccttgcactgctgggcggtgctgctgcagcacacgcggcagcagagccgggagagcgcggccctgagtgaggtgctggccgggcccctggcccagcgcctgagtcacattgcagaggacgtggggcgcctggtcaagaagagcagggatctggagcagcagctgcaggatgagctcctggaggtggtctcagagctccagacggccaagaagacgtaccaggcatatcacatggagagcgtgaatgccgaggccaagctccgggaggccgagcggcaggaggagaagcgggcaggccggagtgtccccaccaccaccgctggtgccactgaggcagggcccctccgcaagagctccctcaagaagggagggaggctggtggagaagcggcaggccaagttcatggagcacaaactcaagtgcacaaaggcgcgcaacgagtacctgcttagcctggctagtgtcaacgctgctgtcagtaactactacctgcatgacgtcttggacctcatggactgctgtgacacagggttccacctggccctggggcaggtgctccggagctacacggccgctgagagccgcacccaagcctcccaagtgcagggcctgggcagcctggaagaagctgtggaggccctggatcctccaggggacaaagccaaggttctcgaggtgcatgctaccgtcttctgtcccccgctgcgctttgactaccacccccatgatggggatgaggtggctgagatctgcgttgaaatggagctgcgggacgagattctgcccagagcccagaacatccagagccgcctggaccgacagaccattgagacagaggaggtgaacaagactctgaaggcgacactgcaggccctgctggaggtggtggcctcggatgacggggatgtgcttgattccttccagaccagcccctccaccgagtccctcaagtccaccagctcagacccaggcagccggcaggcgggccggaggcgcggccagcagcaggagaccgaaaccttctacctcacgaagctccaggagtatctgagtggacggagcatcctcgccaagctgcaggccaagcacgagaagctgcaggaggcccttcagcgaggtgacaaggaggagcaggaggtgtcttggacccagtacacacagagaaaattccagaagagccgccagccccgccccagctcccagtataaccagagactctttgggggagacatggagaagtttatccagagctcaggccagcctgtgcccctggtggtggagagctgcattcgcttcatcaacctcaatggcctgcagcatgaaggcatcttccgggtatcgggtgcccagctccgggtctcagagatccgtgatgccttcgagagaggggaggacccactggtggagggctgcactgcccatgacctggactcggtggccggggtgctgaagctctacttccggagcctggagcccccactcttccccccagacctgttcggcgagctgctggcttcttcggagctggaggacacagcggagagggtggagcacgtgagccgcctgctgtggcggctgcccgcgccggtgctggtggttctgcgctacctcttcaccttcctcaaccacctggcccagtacagcgatgagaacatgatggacccctacaacctggccgtgtgcttcgggcccacgctgctaccggtgcccgctgggcaggacccggtggcgctgcagggccgggtgaaccagctggtgcagacgctcatagtgcagcccgatcgggtcttcccgcccctgacctcgctgcctggccccgtctacgagaagtgcatggcaccgccttccgccagctgcctgggggacgcccagctggagagcctgggggcggacaatgatccggagctggaagccgagatgcccgcacaggaggatgacctggagggggtcgtggaggctgtggcctgctttgcctacacgggccgcacagcccaggagctgagcttccggcggggggacgtactgcggctgcacgagagggcctcgagcgactggtggcggggggagcacaacggcatgcggggcctcatcccccacaagtatatcacgctgcccgccgggacggagaagcaggtggtgggcgcagggctgcagactgcaggggagtctgggagcagtcccgagggcctcctggcatcggagctggtccaccggccagagccatgcacctcacctgaggccatgggaccctctggacacagacgacgctgcttggtcccagcctccccagagcaacacgtggaggtggataaggctgtggcacagaacatggactctgtgtttaaggagctcttgggaaagacctctgtccgccagggccttgggccagcatctaccacctctcccagtcctgggccccgaagcccaaaggccccgcccagcagccgcctgggcaggaacaaaggcttctcccggggccctggggccccagcctcaccctcagcttcccacccccagggcctagacacgacccccaagccacactgaggtgccgctgctggagatgcgtgcccccggcggctacccgctggaccggccactctccccagcccccttgcttctctccagccctgtccagcaagtgcagggtgcctgcacttcaccctgtgcagagaggtgggatggggccgtgcacacagggtatgcccgctccacatcctgcctgcccctcagccctggcccaggccccttgtggaggcagctgaggaaggatgctggggaaagccctcttctgcagctttgtggaaggctgatcagtggctgctgggtggcgggtacccttgctcagatgcctggcagggctgggtggcgattcataaagacctcgtgttgattccccg

SEQ ID NO: 1553 - DNA, 2840 bp, Homo sapiens
  Genbank Accession No. X79882
cctcgagatccattgtgctggaaaggttccccatctgaggcgtttgttgcagctacctgcacttctagattcatcttcttgtgagccctgggcttaggagtcaccatggcaactgaagagttcatcatccgcatccccccataccactatatccatgtgctggaccagaacagcaacgtgtcccgtgtggaggtcgggccaaagacctacatccggcaggacaatgagagggtactgtttgcccccatgcgcatggtgaccgtccccccacgtcactactgcacagtggccaaccctgtgtctcgggatgcccagggcttggtgctgtttgatgtcacagggcaagttcggcttcgccacgctgacctcgagatccggctggcccaggaccccttccccctgtacccaggggaggtgctggaaaaggacatcacacccctgcaggtggttctgcccaacactgccctccatctaaaggcgctgcttgattttgaggataaagatggagacaaggtggtggcaggagatgagtggcttttcgagggacctggcacgtacatcccccggaaggaagtggaggtcgtggagatcattcaggccaccatcatcaggcagaaccaggctctgcggctcagggcccgcaaggagtgctgggaccgggacggcaaggagagggtgacaggggaagaatggctggtcaccacagtaggggcgtacctcccagcggtgtttgaggaggttctggatttggtggacgccgtcatccttacggaaaagacagccctgcacctccgggctcggcggaacttccgggacttcaggggagtgtcccgccgcactggggaggagtggctggtaacagtgcaggacacagaggcccacgtgccagatgtccacgaggaggtgctgggggttgtgcccatcaccaccctgggcccccacaactactgcgtgattctcgaccctgtcggaccggatggcaagaatcagctggggcagaagcgcgtggtcaagggagagaagtcttttttcctccagccaggagagcagctggaacaaggcatccaggatgtgtatgtgctgtcggagcagcaggggctgctgctgagggccctgcagcccctggaggagggggaggatgaggagaaggtctcacaccaggctggggaccactggctcatccgcggacccctggagtatgtgccatctgccaaagtggaggtggtggaggagcgccaggccatccctctagacgagaacgagggcatctatgtgcaggatgtcaagaccggaaaggtgcgcgctgtgattggaagcacctacatgctgacccaggacgaagtcctgtgggagaaagagctgcctcccggggtggaggagctgctgaacaaggggcaggaccctctggcagacaggggtgagaaggacacagctaagagcctccagcccttggcgccccggaacaagacccgtgtggtcagctaccgcgtgccccacaacgctgcggtgcaggtgtacgactaccgagagaagcgagcccgcgtggtcttcgggcctgagctggtgtcgctgggtcctgaggagcagttcacagtgttgtccctctcagctgggcggcccaagcgtccccatgcccgccgtgcgctctgcctgctgctggggcctgacttcttcacagacgtcatcaccatcgaaacggcggatcatgccaggctgcaactgcagctggcctacaactggcactttgaggtgaatgaccggaaggacccccaagagacggccaagctcttttcagtgccagactttgtaggtgatgcctgcaaagccatcgcatcccgggtgcggggggccgtggcctctgtcactttcgatgacttccataagaactcagcccgcatcattcgcactgctgtctttggctttgagacctcggaagcgaagggccccgatggcatggccctgcccaggccccgggaccaggctgtcttcccccaaaacgggctggtggtcagcagtgtggacgtgcagtcagtggagcctgtggatcagaggacccgggacgccctgcaacgcagcgtccagctggccatcgagatcaccaccaactcccaggaagcggcggccaagcatgaggctcagagactggagcaggaagcccgcggccggcttgagcggcagaagatcctggaccagtcagaagccgagaaagctcgcaaggaacttttggagctggaggctctgagcatggccgtggagagcaccgggactgccaaggcggaggccgagtcccgtgcggaggcagcccggattgagggagaagggtccgtgctgcaggccaagctaaaagcacaggccttggccattgaaacggaggctgagctccagagggtccagaaggtccgagagctggaactggtctatgcccgggcccagctggagctggaggtgagcaaggctcagcagctggctgaggtggaggtgaagaagttcaagcagatgacagaggccataggccccagcaccatcagggaccttgctgtggctgggcctgagatgcaggtaaaactgctccagtccctgggcctgaaatcaaccctcatcaccgatggctccactcccatcaacctcttcaacacagcctttgggctgctggggatggggcccgagggtcagcccctgggcagaagggtgccagtggcccagccctggggaggggatatccccccagtctgctcaggcccctcaagctcctggagacaaccacgtggtgcctgtactgcgctaactcctgattaatacaatggaagtttctgggcaaaaaaaaaaaaaaaaagtttcca

SEQ ID NO: 1554 - DNA, 3201 bp, Homo sapiens
  Genbank Accession No. X80907
caactccctcccaccagctgacgaatggtggacccagtgacgagtggcccttgtaagggtcatggaataatttgaagcgaggcatgagcggcccctgtggtcgcctgtgactgctggagatagaggtcccagcaccccaagccaacccagcggaccctcccagccctgcttcaaccaatggggccagtggggctccaagcagccaacctaaccatccagaccccaccccactcacgcggccatggcgggccctgagggcttccagtaccgcgctctgtacccgttccgccgggagcggccggaggacctggagctgctgcccggcgacgtgctggtagtgagccgggcggccttgcaggcgctgggcgtggccgagggtggcgagcgctgcccacagagcgtgggctggatgcccggcctcaacgagcgcacacggcagcgaggtgacttccctggcacctatgtggagttcctggggcccgtggccctggcccggcccggccctcgcccacggggcccccgcccactgcccgccaggccccgtgatggggcccctgagccaggcctcacactccccgacttgcccgagcagttctccccacctgatgtggctccccctcttctggtgaagcttgtggaggccattgaaaggacagggctggacagcgaatctcactaccgcccggagctgcccgcaccgcgtacagactggtccctgagcgacgtggatcagtgggacacggcagccctggctgacggcattaagagcttcctgctggcactgcccgcgccgctcgtgacccccgaggcctcggccgaggcgcgccgggccctgcgggaggccgcggggcccgtggggccggcgctggagccaccgacgctgccgctgcaccgcgcgctcacgctgcgcttcctgctccagcacctgggccgcgtggcccgccgcgccccggccctgggtcccgcggtccgggccctgggcgccacctttgggccgctgctcctgcgcgcgccgccgccgccgtcctcgccgccgccagggggcgctcccgacgggagtgagcccagccctgacttcccggcgctgctggtggagaagctgcttcaggaacacttggaagagcaggaggttgcgcccccagcgctgccgcctaaaccccccaaggcaaagccggcccccacagtcctggccaatggagggagcccaccctccctgcaggatgctgagtggtactggggggacatttcaagggaggaggtgaacgagaaactccgggacactcccgatggcaccttcctagtccgagatgcttctagcaagatccagggcgagtacacgctgaccctcaggaaaggcgggaacaataagctgatcaaggtcttccaccgagatgggcactatggcttctcagagccactcaccttctgctccgttgtggacctcatcaatcactaccgccacgagtctctggcccagtacaatgccaagctggacacacggctcctctaccctgtgtccaaataccagcaggaccagattgtcaaggaggacagcgtggaggcagtgggcgcccagcttaaggtctatcaccagcagtaccaggacaagagccgcgagtatgaccagctttatgaagagtacacacggacctcccaggagctgcagatgaagcgtactgcaattgaggccttcaatgagactatcaagatctttgaagagcagggccagactcaagagaaatgcagcaaggaatacctggagcgcttccggcgtgagggcaacgagaaagagatgcaaaggatcctgctgaactccgagcggctcaagtcccgcattgccgagatccatgagagccgcacgaagctggagcagcagctgcgggcccaggcctcggacaacagagagatcgacaagcgcatgaacagcctcaagccggacctcatgcagctgcgcaagatccgagaccagtacctcgtgtggctcacccagaaaggcgcccggcagaagaaaatcaacgagtggctggggattaaaaatgagactgaggaccagtacgcactcatggaggacgaggacgatctcccgcaccacgaggaacgcacttggtacgtgggcaagatcaaccgcacgcaggcagaggagatgctgagcggcaagcgggatggcaccttcctcatccgcgagagcagccagcggggctgctacgcctgctccgtggtagtggacggcgacaccaagcactgcgtcatctaccgcacggccaccggcttcggcttcgcggagccctacaacctgtacgggtcgctgaaggagctggtgctgcactaccagcacgcctcgctggtgcagcacaacgacgcgctcactgtcaccctggcgcacccagtgcgcgccccgggccccggcccgccgcctgccgcccgctgagcaccgaggacccgccccaagcagagccgcccctgggcccgtctgcgccggaggctgcggcggcgggagccacggaccaagaccagccacatccaggggtcctcatttctccggctctggctcttgtttggggttctctcaccctctttctctttccttccctcccccattctccagatctccctctgtctccttttctctgtctttcttggcccctgtctctctccatgttgggggtcctaactcccccaccccatatctacgtgtcctccgggcattgccctctccatggctctggtcaccctgaccctctgccctgcccaccgcaggtcccccggggtcccggaagccccttctggctgcacctgccatgtttacagagggcccctgggctgcgcggccccagcctgggcaccctgatttttaagccatagacctggggtcagggcaggaaggaacttcactctgctgcttccgagaacctcggccgtgacattcggggccgggcgggacccgccccacagactccaacttcccctccaaaccccgaagtgaaacccgccaccgggttaccccacaagggggccgctgcgagaagttcacccacccccgaaaaaataattaaactcgcaggccaggcacggtggctcatgcctgtaatcccagcactttgggaggccaagacgggcggatcttttgaggtcgggagttggaggccagcctggccaaaatggcaaaaccccgcatctactaaaatacaaaaattagccggg

SEQ ID NO: 1555 - DNA, 1247 bp, Homo sapiens
  Genbank Accession No. X81006
ggcacgaggtaaaaagagactgtaaaagatagcaataatttttataatacatgttgaaataacattttgagaatattgagttaaataaaatatataattaaagttaattttactagtttctttctactttttaaatgtgactactagaaaatttaaaaatatataagtggctcacattcgtgactcagattacattcatcattcatactggacagtgctgggctaggcagtcaccacaggaaatcagaaagggcatctctcaagggttgcataccttcctggtccaataagaatatgagagtcaaatgcagcttctacttctcccaggcatttcaaattagtgccttgctgtgtgatagtgagttctttgctcaacccctctggactctcaccatttcatcccattctttattccccagaccaactccaggctgataggaaaaaagatgaaaacagattcttcaaaagcatgaataaaaatgacatgaagagctggggcttgttacagaaaaataatcataaaatgaacaaaacctcagagcccgggtcatcttctgcaggcggcagaactacatcggggccaccaaatcaccactcttcagccccatcccactccctgtttcgggcctcgtctgctgggaaagtcacttttccagtatgtctcctggcctcttatgatgagatttctggtcaaggagcgagctctcaggatacgaagacatttgacgttgcgctgtccgaggagctccatgcggcactgagtgagtggctgacagcgatccgggcttggttttgtgaggttccttcaagctaagccagctcagagaacacggggagcggtggtgctacacggacttcggagcatagagtggcgctgatggaaaaaggaagtccctgcagcagtccccgcactctttaagcagctgtttaccgaaggcaccagttcagccaggagtgaaatccggagaggagcaacgccagcctgggtcacagtccatcaaaccccatgagcccgaccactctcgctcttccttacattcccacgtcccccttctctcccaacccctcatatcagcaagggaaattaattaatgagatttgataaatcagtagatagaatgaggtccccattctgaaatatttagcagactggaaccaccacgcaagcctctgtagggggtggatggagacacttctaactttaataaactgcgactgaacgtgaaaaaaaaaaaaaaaaaaaaaaa

SEQ ID NO: 1556 - DNA, 1669 bp, Homo sapiens
  Genbank Accession No. X82153
gaaacaagcactggattccatatcccactgccaaaaccgcatggttcagattatcgctattgcagctttcatcataatacacacctttgctgccgaaacgaagccagacaacagatttccatcagcaggatgtgggggctcaaggttctgctgctacctgtggtgagctttgctctgtaccctgaggagatactggacacccactgggagctatggaagaagacccacaggaagcaatataacaacaaggtggatgaaatctctcggcgtttaatttgggaaaaaaacctgaagtatatttccatccataaccttgaggcttctcttggtgtccatacatatgaactggctatgaaccacctgggggacatgaccagtgaagaggtggttcagaagatgactggactcaaagtacccctgtctcattcccgcagtaatgacaccctttatatcccagaatgggaaggtagagccccagactctgtcgactatcgaaagaaaggatatgttactcctgtcaaaaatcagggtcagtgtggttcctgttgggcttttagctctgtgggtgccctggagggccaactcaagaagaaaactggcaaactcttaaatctgagtccccagaacctagtggattgtgtgtctgagaatgatggctgtggagggggctacatgaccaatgccttccaatatgtgcagaagaaccggggtattgactctgaagatgcctacccatatgtgggacaggaagagagttgtatgtacaacccaacaggcaaggcagctaaatgcagagggtacagagagatccccgaggggaatgagaaagccctgaagagggcagtggcccgagtgggacctgtctctgtggccattgatgcaagcctgacctccttccagttttacagcaaaggtgtgtattatgatgaaagctgcaatagcgataatctgaaccatgcggttttggcagtgggatatggaatccagaagggaaacaagcactggataattaaaaacagctggggagaaaactggggaaacaaaggatatatcctcatggctcgaaataagaacaacgcctgtggcattgccaacctggccagcttccccaagatgtgactccagccagccaaatccatcctgctcttccatttcttccacgatggtgcagtgtaacgatgcactttggaagggagttggtgtgctatttttgaagcagatgtggtgatactgagattgtctgttcagtttccccatttgtttgtgcttcaaatgatccttcctactttgcttctctccacccatgacctttttcactgtggccatcaggactttccctgacagctgtgtactcttaggctaagagatgtgactacagcctgcccctgactgtgttgtcccagggctgatgctgtacaggtacaggctggagattttcacataggttagattctcattcacgggactagttagctttaagcaccctagaggactagggtaatctgacttctcacttcctaagttcccttctatatcctcaaggtagaaatgtctatgttttctactccaattcataaatctattcataagtctttggtacaagtttacatgataaaaagaaatgtgatttgtcttcccttctttgcacttttgaaataaagtatttatc

SEQ ID NO: 1557 - DNA, 2058 bp, Homo sapiens
  Genbank Accession No. X83618
cggtttctgctgggtttctgaactgctgggtttctgcttgctcctctggagatgcagcgtctgttgactccagtgaagcgcattctgcaactgacaagagcggtgcaggaaacctccctcacacctgctcgcctgctcccagtagcccaccaaaggttttctacagcctctgctgtccccctggccaaaacagatacttggccaaaggacgtgggcatcctggccctggaggtctacttcccagcccaatatgtggaccaaactgacctggagaagtataacaatgtggaagcaggaaagtatacagtgggcttgggccagacccgtatgggcttctgctcagtccaagaggacatcaactccctgtgcctgacggtggtgcaacggctgatggagcgcatacagctcccatgggactctgtgggcaggctggaagtaggcactgagaccatcattgacaagtccaaagctgtcaaaacagtgctcatggaactcttccaggattcaggcaatactgatattgagggcatagataccaccaatgcctgctacggtggtactgcctccctcttcaatgctgccaactggatggagtccagttcctgggatggtcgttatgccatggtggtctgtggagacattgccgtctatcccagtggtaatgctcgtcccacaggtggggccggagctgtggctatgctgattggcccaaaggcccctctggccctggagcgagggctgaggggaacccatatggagaatgtgtatgacttctacaaaccaaatttggcctcggagtacccaatagtggatgggaagctttccatccagtgctacttgcgggccttggatcgatgttacacatcataccgtaaaaaaatccagaatcagtggaagcaagctggcagcgatcgacccttcacccttgacgatttacagtatatgatctttcatacacccttttgcaagatggtccagaagtctctggctcgcctgatgttcaatgacttcctgtcagccagcagtgacacacaaaccagcttatataaggggctggaggctttcggggggctaaagctggaagacacctacaccaacaaggacctggataaagcacttctaaaggcctctcaggacatgttcgacaagaaaaccaaggcttccctttacctctccactcacaatgggaacatgtacacctcatccctgtacgggtgcctggcctcgcttctgtcccaccactctgcccaagaactggctggctccaggattggtgccttctcttatggctctggtttagcagcaagtttcttttcatttcgagtatcccaggatgctgctccaggctctcccctggacaagttggtgtccagcacatcagacctgccaaaacgcctagcctcccgaaagtgtgtgtctcctgaggagttcacagaaataatgaaccaaagagagcaattctaccataaggtgaatttctccccacctggtgacacaaacagccttttcccaggtacttggtacctggagcgagtggacgagcagcatcgccgaaagtatgcccggcgtcccgtctaaaggtgttctgcagatccatggaaagcttcctgggaaacgtatgctagcagagcttctccccgtgaatcatatttttaagatcccactcttagctggtaaatgaatttgaatcgacatagtagccccataagcatcagccctgtagagtgaggagccatctctagcgggcccttcattcctctccatgctgcaatcactgtcctgggcttatggtgcctatggactaggggtcctttgtgaaagagcaagatggagcaatggagagaagacctcttcctgaatcactggactccagaaatgtgcatgcagatcagctgttgccttcaagatccagataaactttcctgtcatgtgttagaactttattattattaatattgttaaacttctgtgctgttcctgtgaatctccaaattttgtaccttgttctaagctaatatatagcaattaaaaagagagaaagagaaaaaaaaaaaaaaa

SEQ ID NO: 1558 - DNA, 1214 bp, Homo sapiens
  Genbank Accession No. X84716
  unsure (1)..(1214): n = a or c or g or t
tgccaaagtcatctgcctgctccccgggggagaggaccgccggcctcagctactagcccaccagcccaccagggagaaaagaagccatgagagncagcgcccgccaccctgtgtccacagccaccaccttcccgcttcccttagaaccctgccgcgtcctatctcatgacgctcatggaacctctttctttgatcttctttttcttttctccccctcttttttgttctaaagaaaagtcattttgatgcaaggtcctgcctgccatcagatccgaggtgcctcctgcagtgaccccttttcctggcatttctcttccacgcgacgaggtctgcctagtgagatctgcatgacctcacgttgctttccagagcccgggcctattttgccatctcagttttcctgggccctgcttcctgtgtaccactgaggggcagctgggccaggagctgtgcccagtgcctgcagccttcataagcacacacgtccattccctactaaggcccagacctcctggtatctgccccgggctccctcatcccacctccatccggagttgcccaagatgcatgtccagcataggcaggattgctcggtggtgagaaggttaggtccggctcagactgaataagaagagataaaatttgncttaaaacttacctggcagtggtttggttgaacggtctgaaacacctgtcccaccctcttgaccgaaatttcctggtgaaaaagagaagggaaaggtcttgagccagagttgngggaggagtatttcaggttcacttcagggctcccaaancgacaaagtcgttagggagagagccccagggtggggactgggaatttaaggagagctgggancggatcccttaggttcaggaagcttctgtgcaacctgcgaggatggcttgggccgaagggttgctctgcccgccgcgctagctgtgagctgagcaaagccctgggctcacagcaccccaaaagcctgtggcttcagtcctgcgtctgcaccacacattcaaaaggatcgttttgttttgtttttaaagaaaggtgagattggcttggttcttcatgagcacatttgatatagctctttttctgtttttccttgctcatttcgttttggggaagaaatctgtactgtattgggattgtaaagaacatctctgcactcagacagtttacagaaataaatgttttttttgtttttcag

SEQ ID NO: 1559 - DNA, 558 bp, Homo sapiens
  Genbank Accession No. X84721
  unsure (1)..(558): n = a or c or g or t
ccggaaagttcgctcaagtatgatgccaccacccgccagattgagatcccccttgnccaaagtcgccctntaaaacgactcacnataggganancgaattcgcggccgcgtcgaactgggccccgcgcgcgccctccgcgagggtggagncggcggctgtgtgcgcagggcccggcaccggactgggaccctggcgtccctccaggccttgcctcctgcgggaggacagtttggcttcacttctctgaccccagcctcggccgtaaagtgaaagagaccggaccagcttcagctttcggactctggttcttggatcgtgtcctctccccntcaccgccctcttcccccaatctgagccattgcaggcctctgcctgctgccccctctctcctcgggatcgggtccccagagccaccatctcctgagcctcccaccccgctgcctgggccctgtggttgctgggcctcccacctcaaggaggggaaggttgtacagcccgaacccgtggagcaatgccctgtctggcctccaaaaccaaaataaaactgggtcacttta

SEQ ID NO: 1560 - DNA, 2564 bp, Homo sapiens
  Genbank Accession No. X87159
tcgccgggtgtcccagtgtcaccaacactcggccgccgccgccagcttggcgcgcaccgccgcctccgccaccgccgacagcgcgcatcctccgtgtccccgctccgccgcccgagcaggtgccactatgcacgtgaagaagtacctgctgaagggcctgcatcggctgcagaagggccccggctacacgtacaaggagctgctggtgtggtactgcgacaacaccaacacccacggccccaagcgcatcatctgtgaggggcccaagaagaaagccatgtggttcctgctcaccctgctcttcgccgccctcgtctgctggcagtggggcatcttcatcaggacctacttgagctgggaggtcagcgtctccctctccgtaggcttcaagaccatggacttccccgccgtcaccatctgcaatgctagccccttcaagtattccaaaatcaagcatttgctgaaggacctggatgagctgatggaagctgtcctggagagaatcctggctcctgagctaagccatgccaatgccaccaggaacctgaacttctccatctggaaccacacacccctggtccttattgatgaacggaacccccaccaccccatggtccttgatctctttggagacaaccacaatggcttaacaagcagctcagcatcagaaaagatctgtaatgcccacgggtgcaaaatggccatgagactatgtagcctcaacaggacccagtgtaccttccggaacttcaccagtgctacccaggcattgacagagtggtacatcctgcaggccaccaacatctttgcacaggtgccacagcaggagctagtagagatgagctaccccggcgagcagatgatcctggcctgcctattcggagctgagccctgcaactaccggaacttcacgtccatcttctaccctcactatggcaactgttacatcttcaactggggcatgacagagaaggcacttccttcggccaaccctggaactgaattcggcctgaagttgatcctggacataggccaggaagactacgtccccttccttgcgtccacgggcggggtcaggctgatgcttcacgagcagaggtcataccccttcatcagagatgagggcatctacgccatgtcggggacagagacgtccatcggggtactcgtggataagcttcagcgcatgggggagccctacagcccgtgcaccgtgaatggttctgaggtccccgtccaaaacttctacagtgactacaacacgacctactccatccaggcctgtcttcgctcctgcttccaagaccacatgatccgtaactgcaactgtggccactacctgtacccactgccccgtggggagaaatactgcaacaaccgggacttcccagactgggcccattgctactcagatctacagatgagcgtggcgcagagagagacctgcattggcatgtgcaaggagtcctgcaatgacacccagtacaagatgaccatctccatggctgactggccttctgaggcctccgaggactggattttccacgtcttgtctcaggagcgggaccaaagcaccaatatcaccctgagcaggaagggaattgtcaagctcaacatctacttccaagaatttaactatcgcaccattgaagaatcagcagccaataacatcgtctggctgctctcgaatctgggtggccagtttggcttctggatggggggctctgtgctgtgcctcatcgagtttggggagatcatcatcgactttgtgtggatcaccatcatcaagctggtggccttggccaagagcctacggcagcggcgagcccaagccagctacgctggcccaccgcccaccgtggccgagctggtggaggcccacaccaactttggcttccagcctgacacggccccccgcagccccaacactgggccctaccccagtgagcaggccctgcccatcccaggcaccccgccccccaactatgactccctgcgtctgcagccgctggacgtcatcgagtctgacagtgagggtgatgccatctaaccctgcccctgtccaccccgggtgggtgaaactcactgagcagccaagactgttgcccgaggactcactgtatggtgccctctccaaagggtcgggagggtagctctccaggccagagcttgtgtccttcaacagagaggccagcggcaactggtccgttactggccaagggctctgaagaatcaacggtgctggtacaggatacaggaataaattgtatcttcacctggttcctaccctcgtccctacctgtcctgatcctggtcctgaagacccctcggaacaccctctcctggtggcaggccacttccctcccagtgccagtctccatccaccccagagaggaacaggcgggtgggccatgtggttttctccttcctggccttggctggcctctggggcaggggtggtggagagatggaagggcatcaggtgtagggaccctgccaagtggcacctgatttactctagaaaataaaagtagaaaatactgagaaaaaaaaaaaaaaaaaaa

SEQ ID NO: 1561 - DNA, 2890 bp, Homo sapiens
  Genbank Accession No. X87237
ggcgctggctggcaggtgtcgctaaccggacggtggtcgccagggcgagaggcgggagccggagaggtgaggcaggacccgggctccactgccgcctctccgagctcttgtgacgcggacctcagtgccaggatggctcggggcgagcggcggcgccgcgcagtgccggcagagggagtgcggacagccgagagggcggctcggggaggccccgggcgacgggacggccggggcggcgggccgcgtagcacggctggaggagtggctctggccgtcgtggtcctgtctttggccctgggtatgtcggggcgctgggtgctggcgtggtaccgtgcgcggcgggcggtcacgctgcactccgcgcctcctgtgttgcctgccgactcctccagccccgccgtggccccggacctcttctggggaacctaccgccctcacgtctacttcggcatgaagacccgcagcccgaaacccctcctcaccggactgatgtgggcgcagcagggcaccaccccggggactcctaagctcaggcacacgtgtgagcagggggacggtgtgggtccctatggctgggagttccacgacggcctctccttcgggcgccaacacatccaggatggggccttaaggctcaccactgagttcgtcaagaggcctgggggtcagcacggaggggactggagctggagagtgactgtagagcctcaggactcaggtacttctgccctccctttggtctccctgttcttctatgtggtgacagatggcaaggaagtcctactaccagaggttggggccaaggggcagttgaagtttatcagtgggcacaccagtcaacttggtaacttccgctttacacttttgccaccaaccagtccaggggatacagcccccaagtatggcagctacaatgtcttctggacctccaacccaggactgcccctgctgacagagatggtaaagagtcgcctaaatagctggtttcagcatcggcccccaggggcctcccctgaacgctacctcggcttgccaggatccctgaagtgggaggacagaggtccaagtgggcaagggcaggggcagttcttgatacagcaggtgaccctgaaaattccattttccatagagtttgtgtttgaatcaggcagtgcccaggcaggaggaaatcaagccctgccaagactggcaggcagtctactgacccaggccctggagagccatgctgaaggctttagagagcgctttgagaagaccttccagctgaaggagaagggcctgagctctggcgagcaggctttgggtcaggctgccctcagcggcctccttggtggaattggctacttctacggacaagggctggtattgccagacatcggggtggaagggtctgagcagaaggtggacccagccctctttccacccgtacctctttttacagcagtgccctcccggtcattcttcccacgaggcttcctttgggatgaaggctttcaccagctggtggttcagcggtgggatccctccctcacccgggaagcccttggccactggctggggctgctaaatgctgatggctggattgggagggagcagatactgggggatgaggcccgagcccgggtgcctccagaattcctagtacaacgagcagtccacgccaaccccccaaccctacttttgcctgtagcccatatgctagaggttggtgaccctgacgacttggctttcctccgaaaggccttgccccgcctgcatgcctggttttcctggctccatcagagccaggcaggcccactgccactatcttaccgctggcggggacgggaccctgccttaccaaccttactgaaccccaagaccctaccctctgggctggatgactacccccgggcttcacacccttcagtaaccgagcggcacctggacctgcgatgttgggtgggactgggtgcccgtgtgctgacgcggctggcagagcatctgggtgaggctgaggtagctgctgagctgggcccactggctgcctcactggaggcagcagagagcctggatgagctgcactgggccccagagctaggagtctttgcagactttgggaaccacacaaaagcagtacagctgaagcccaggccccctcaggggctcgttcgggtggtgggtcggccccaacctcaactgcagtatgtagatgctcttggctatgtcagtctttttcccttgctgctgcgactgctggaccccacctcatcccgccttgggcccctgctggacattctagccgacagccgccatctctggagcccctttggtttacgctcccttgcagcctccagctccttttatggccagcgcaattcagagcatgatcccccctactggcggggtgctgtgtggctcaatgtcaactacctggctttgggagcactccaccactatgggcatctggagggtcctcaccaggctcgggctgccaaactccacggtgagctccgtgccaacgtggtaggcaatgtatggcgccagtaccaggccacaggctttctttgggagcagtacagtgaccgcgatgggcgaggcatgtgccgccctttccacggctggaccagccttgtcttactggccatggctgaagactactgaagggagggagaggaggggagccaagacactcatgccactctggctctgaaggacaagggacaaaggcttctggcttttgcccccagccccttggataccagtaattcaaaccttcctcattcattctcaggtgtctccttgctgtcatcccacatagccctggggtgaatgtgaatccagagtctatttttctaaataaattggaaaaaacaaaaaaaaaaaaaaaaaaaaaaaaaaaaaaaaaaaa

SEQ ID NO: 1562 - DNA, 1070 bp, Homo sapiens
  Genbank Accession No. X93086
ggggtggcgcccggagctgcacggagagcgtgcccgtcagtgaccgaagaagagaccaagatgaatgcagagcccgagaggaagtttggcgtggtggtggttggtgttggccgagccggctccgtgcggatgagggacttgcggaatccacacccttcctcagcgttcctgaacctgattggcttcgtgtcgagaagggagctcgggagcattgatggagtccagcagatttctttggaggatgctctttccagccaagaggtggaggtcgcctatatctgcagtgagagctccagccatgaggactacatcaggcagttccttaatgctggcaagcacgtccttgtggaataccccatgacactgtcattggcggccgctcaggaactgtgggagctggctgagcagaaaggaaaagtcttgcacgaggagcatgttgaactcttgatggaggaattcgctttcctgaaaaaagaagtggtggggaaagacctgctgaaagggtcgctcctcttcacatctgacccgttggaagaagaccggtttggcttccctgcattcagcggcatctctcgactgacctggctggtctccctctttggggagctttctcttgtgtctgccactttggaagagcgaaaggaagatcagtatatgaaaatgacagtgtgtctggagacagagaagaaaagtccactgtcatggattgaagaaaaaggacctggtctaaaacgaaacagatatttaagcttccatttcaagtctgggtccttggagaatgtgccaaatgtaggagtgaataagaacatatttctgaaagatcaaaatatatttgtccagaaactcttgggccagttctctgagaaggaactggctgctgaaaagaaacgcatcctgcactgcctggggcttgcagaagaaatccagaaatattgctgttcaaggaagtaagaggaggaggtgatgtagcacttccaagatggcaccagcatttggttcttctcaagagttgaccattatctctattcttaaaattaaacatgttggggaaacaaaaaaaaaaaaaaaaa

SEQ ID NO: 1563 - DNA, 2138 bp, Homo sapiens
  Genbank Accession No. X94323
gatgaaacaaatacttcatcctgctctggaaaccactgcaatgacattattcccagtgctgttgttcctggttgctgggctgcttccatcttttccagcaaatgaagataaggatcccgcttttactgctttgttaaccacccaaacacaagtgcaaagggagattgtgaataagcacaatgaactgaggagagcagtatctccccctgccagaaacatgctgaagatggaatggaacaaagaggctgcagcaaatgcccaaaagtgggcaaaccagtgcaattacagacacagtaacccaaaggatcgaatgacaagtctaaaatgtggtgagaatctctacatgtcaagtgcccccagctcatggtcacaagcaatccaaagctggtttgatgagtacaatgattttgactttggtgtagggccaaagactcccaacgcagtggttggacattatacacaggttgtttggtactcttcatacctcgttggatgtggaaatgcctactgtcccaatcaaaaagttctaaaatactactatgtttgccaatattgtcctgctggtaattgggctaatagactatatgtcccttatgaacaaggagcaccttgtgccagttgcccagataactgtgacgatggactatgcaccaatggttgcaagtacgaagatctctatagtaactgtaaaagtttgaagctcacattaacctgtaaacatcagttggtcagggacagttgcaaggcctcctgcaattgttcaaacagcatttattaaatacgcattacacaccgagtagggctatgtagagaggagtcagattatctacttagatttggcatctacttagatttaacatatactagctgagaaattgtaggcatgtttgatacacatttgatttcaaatgtttttcttctggatctgctttttattttacaaaaatatttttcatacaaatggttaaaaagaaacaaaatctataacaacaactttggatttttatatataaactttgtgatttaaatttactgaatttaattagggtgaaaattttgaaagttgtattctcatatgactaagttcactaaaaccctggattgaaagtgaaaattatgttcctagaacaaaatgtacaaaaagaacaatataattttcacatgaacccttggctgtagttgcctttcctagctccactctaaggctaagcatcttcaaagacgttttcccatatgctgtcttaattcttttcactcattcacccttcttcccaatcatctggctggcatcctcacaattgagttgaagctgttcctcctaaaacaatcctgacttttattttgccaaaatcaatacaatcctttgaattttttatctgcataaattttacagtagaatatgatcaaaccttcatttttaaacctctcttctctttgacaaaacttccttaaaaaagaatacaagataatataggtaaataccctccactcaaggaggtagaactcagtcctctcccttgtgagtcttcactaaaatcagtgactcacttccaaagagtggagtatggaaagggaaacatagtaactttacaggggagaaaaatgacaaatgacgtcttcaccaagtgatcaaaattaacgtcaccagtgataagtcattcagatttgttctagataatctttctaaaaattcataatcccaatctaattatgagctaaaacatccagcaaactcaagttgaaggacattctacaaaatatccctggggtattttagagtattcctcaaaactgtaaaaatcatggaaaataagggaatcctgagaaacaatcacagaccacatgagactaaggagacatgtgagccaaatgcaatgtgcttcttggatcagatcctggaacagaaaaagatcagtaatgaaaaaactgatgaagtctgaatagaatctggagtatttttaacagtagtgttgatttcttaatcttgacaaatatagcagggtaatgtaagatgataacgttagagaaactgaaactgggtgagggctatctaggaattctctgtactatcttaccaaattttcggtaagtctaagaaagcaatgcaaaataaaaagtgtcttgaaaaaaaaaaaaaa

SEQ ID NO: 1564 - DNA, 2349 bp, Homo sapiens
  Genbank Accession No. X99656
gcggcgggcggcagcatgtcggtggcggggctgaagaagcagttctacaaggcgagccagctggtcagtgagaaggtcggaggggccgaggggaccaagctggatgatgacttcaaagagatggagaagaaggtggatgtcaccagcaaggcggtgacagaagtgctggccaggaccatcgagtacctgcagcccaacccagcctcgcgggctaagctgaccatgctcaacacggtgtccaagatccggggccaggtgaagaaccccggctacccgcagtcggaggggcttctgggcgagtgcatgatccgccacgggaaggagctgggcggcgagtccaactttggtgacgcattgctggatgccggcgagtccatgaagcgcctggcagaggtgaaggactccctggacatcgaggtcaagcagaacttcattgaccccctccagaacctgtgcgagaaagacctgaaggagatccagcaccacctgaagaaactggagggccgccgcctggactttgactacaagaagaagcggcagggcaagatccccgatgaggagctacgccaggcgctggagaagttcgaggagtccaaggaggtggcagaaaccagcatgcacaacctcctggagactgacatcgagcaggtgagtcagctctcggccctggtggatgcacagctggactaccaccggcaggccgtgcagatcctggacgagctggcggagaagctcaagcgcaggatgcgggaagcttcctcacgccctaagcgggagtataagcccaagccccgggagccctttgaccttggagagcctgagcagtccaacgggggcttcccctgcaccacagcccccaagatcgcagcttcatcgtctttccgatcttccgacaagcccatccggacccctagccggagcatgccgcccctggaccagccgagctgcaaggcgctgtacgacttcgagcccgagaacgacggggagctgggcttccatgagggcgacgtcatcacgctgaccaaccagatcgatgagaactggtacgagggcatgctggacggccagtcgggcttcttcccgctcagctacgtggaggtgcttgtgcccctgccgcagtgactcacccgtgtccccgccccgcccctccgtccacactggccggcaccccctgctgggtctcctgcattccacggagcccctgctgccagggcggtgtctgagcctgccggcgccacctgggccccggcccttgaggtactccctgagcaggaccccacacttgggtgggggggcttatctgggtgggtggggatgcctgtttacactagcgctgactcccaacggtgacggctcccttccccactccatggcgccagcctcctcccccgctccccaacttctcgcccagctggccgaggcggggcaacactaaggtgctcttagaaacactaatgttcctctggggcagcccccacctccgtcctgacccgacgggggcccggcccactgcctaccctcgagtcccgcagccttaacaggatgggatcgagggtccccatggggtggctcagagataggaccctggttttaaatccctcccagcctggtgctggtgatgggccctggccctactccagggccaatgcacccccgcctcacacacgcactccttctcctcaaggccagggcagagggcctcaccgcctcccgggcctgctgtcagcttgcagcccggggacagaggccagctgggatctgcctgaggacagagaacatggtctcctgcagggccctgcctcccaagccccgccctcagaaagccaagtaccttttcagctttttaactgcccccatcccaacccagggaggcctgtgtcactctggcacaagctgccaccaccagccacccacacccaccccagcacacctcacacgggaccacagccgcgctgccgagggccaagcacaaaggttccagtgagcgcatgtcccagccctggtggccaggctccccttgctgagccgctgccacttcaccctgtgggaagtggccccagccatctcctctagaccaaggcaggcagccccgacatctgcttcctctatcgcccaatgcaaaatcgatgaaatggggagttctctgggccaggccacattcacattcccctccctctgtggtccagtgaagctccggaccccaggctctgctctgccctgccctgcacccccctcgtcagaagtacatgaggggcgcagagatgagcacacagctttgggcacggtccagggcaaactgaaatgtacgcctgaattttgtaaacagaagtattaaatgtctctttctac

SEQ ID NO: 1565 - DNA, 2063 bp, Homo sapiens
  Genbank Accession No. X99977
tggcccatgctaccctcacctgacacctgcttcctacctctggtttctactttgcaggtgtgtatcaggtgtacacagaccaggtagaggtctgtggagagggctgcaggccaggctgcagggaaggggtgccaggcggggctagagcaacaagggcagaggctacactgaacctgggtcttaagggtcccccaggctggggctgggtggcctatgtgaaccccagaggcacagccaggacatgggggctcatcagaggggcagtctgagctcagcaggaaaggccttctctgtcagagctgtcccaggaccactggacatggctgaggaacagtgagttccccagtgttggaggtgtgcaagcagaggcctggccatcgtcctcagacagagctcccagatccagctccctgcccgtctgccatgttcctgccagctgcctccccactgggccctttaccacgttcctgactcacacggccggttctgccaccgcccagaagccggtgcccaagggcctggctataaatccttgatgtgaggctggctacctctcatcacttctgagcacggagcaatggcctctcgctgggctgtgcagctgctgctcgtggcagcctggagcatgggctgtggtgagtgggccgcaggctggtggggaccctgcctctgagcttgtctgcccacctcctagggggatggggctgttgggggtgctttgtggctgagagcctccttaggcctccatgaggctcaccctcctcattctcagtgagcctcctgggtcccagagcccagcttcaccctgggacaggggtcacggctccactctgcaggaagggagactgaggcttggtggagggatgcagcattcaagtctgtggctcagctcagttagagaaagctgccagagaggccccttgaagggctgcccggggccttgaaagatgtcagcgagactccttcagcccctgcctcctggttccaggatgaggccaccgaggtcaggtgatgaggttctgcccccatccctcacccaggtgaggccctcaagtgctacacctgcaaggagcccatgaccagtgcttcctgcaggaccattacccgctgcaagccagaggacacagcctgcatgaccacgctggtgacggtggaggcaggtgaggccaggccccacggcagccctgggtgcactggagtcagggccacctcccccaagtgcctccctcctttgctggtgctcctcccggcccaaaaggcagcaggtgggatgggcagaacaggctgccacaccttggcaggggtgccttccacgagggtggcacagccccctcagagacccagtcctggggcaccaggcgctggaggtgggtggggcttaatggccggggtaccctggggggctcaaaccccagctctgacacagacccactgggtggtgttgccacagcctctgggctcgggctcccatctcagcgcaggcacttcagaggtctgacaaggcctaataattcatgaacaggtcacagtcagaggagggctgggccctgggtggcttcacagatgtggactattgggaacagggatcacagggagggtgaggtcaggcgacggcggctgggagcagtgcagcagcaggcaggcgctgcaggggagtgagggttctgacactggcccaccctgcagagtaccccttcaaccagagccccgtggtgacccgctcctgctccagctcctgtgtggccaccgaccccgacagcatcggggccgcccacctgatcttctgctgcttccgagacctctgcaactcggaactctgaacccagggcggcagggcggaaggtgctcctcaggcacctcctctctgacggggcctggctccacctgtgatcacctccccctgcttcctgctgctgtggcacagctcactcatggggtctgaggggagagaagcacaccaggggcgccctctgccttccataccccacgcttataaaacataactaagccaagagtggacatgacttttgtccttcctgggcactgacaacctacagaactgg

SEQ ID NO: 1566 - DNA, 1900 bp, Homo sapiens
  Genbank Accession No. Y00630
acaactctcagaggagcattgcccgtcagacagcaactcagagaataaccagagaacaaccagattgaaacaatggaggatctttgtgtggcaaacacactctttgccctcaatttattcaagcatctggcaaaagcaagccccacccagaacctcttcctctccccatggagcatctcgtccaccatggccatggtctacatgggctccaggggcagcaccgaagaccagatggccaaggtgcttcagtttaatgaagtgggagccaatgcagttacccccatgactccagagaactttaccagctgtgggttcatgcagcagatccagaagggtagttatcctgatgcgattttgcaggcacaagctgcagataaaatccattcatccttccgctctctcagctctgcaatcaatgcatccacagggaattatttactggaaagtgtcaataagctgtttggtgagaagtctgcgagcttccgggaagaatatattcgactctgtcagaaatattactcctcagaaccccaggcagtagacttcctagaatgtgcagaagaagctagaaaaaagattaattcctgggtcaagactcaaaccaaaggcaaaatcccaaacttgttacctgaaggttctgtagatggggataccaggatggtcctggtgaatgctgtctacttcaaaggaaagtggaaaactccatttgagaagaaactaaatgggctttatcctttccgtgtaaactcggctcagcgcacacctgtacagatgatgtacttgcgtgaaaagctaaacattggatacatagaagacctaaaggctcagattctagaactcccatatgctggagatgttagcatgttcttgttgcttccagatgaaattgccgatgtgtccactggcttggagctgctggaaagtgaaataacctatgacaaactcaacaagtggaccagcaaagacaaaatggctgaagatgaagttgaggtatacataccccagttcaaattagaagagcattatgaactcagatccattctgagaagcatgggcatggaggacgccttcaacaagggacgggccaatttctcagggatgtcggagaggaatgacctgtttctttctgaagtgttccaccaagccatggtggatgtgaatgaggagggcactgaagcagccgctggcacaggaggtgttatgacagggagaactggacatggaggcccacagtttgtggcagatcatccttttctttttcttattatgcataagataaccaactgcattttatttttcggcagattttcctcaccctaaaactaagcgtgctgcttctgcaaaagatttttgtagatgagctgtgtgcctcagaattgctatttcaaattgccaaaaatttagagatgttttctacatatttctgctcttctgaacaacttctgctacccactaaataaaaacacagaaataattagacaattgtctattataacatgacaaccctattaatcatttggtcttctaaaatgggatcatgcccatttagattttccttactatcagtttatttttataacattaacttttactttgttatttattattttatataatggtgagtttttaaattattgctcactgcctatttaatgtagctaataaagttatagaagcagatgatctgttaatttcctatctaataaatgcctttaattgttctcataatgaagaataagtaggtaccctccatgcccttctgtaataaatatctggaaaaaacattaaacaataggcaaatatatgttatgtgcatttctagaaatacataacacatatatatgtctgtatcttatattcaattgcaagtatataataaataaacctgcttccaaacaac

SEQ ID NO: 1567 - DNA, 1292 bp, Homo sapiens
  Genbank Accession No. Y07867
cctcccgcctcctctaggccgccggccgcgaagcgctgagtcacggtgaggcgactggacccacactctcttaacctgccctccctgcactcgctcccggcggctcttcgcgtcacccccgccgctaaggctccaggtgccgctaccgcagcccctccatcctctacagctcagcatcagaacactctctttttagactccgatatggggtcctccaagaaagttactctctcagtgctcagccgggagcagtcggaaggggttggagcgagggtccggagaagcattggcagacccgagttaaaaaatctggatccgtttttactgtttgatgaatttaaaggaggtagaccaggaggatttcctgatcatccacatcgaggttttgaaacagtatcctacctcctggaagggggcagcatggcccatgaagacttctgtggacacactggtaaaatgaacccaggagatttgcagtggatgactgcgggccggggcattctgcacgctgagatgccttgctcagaggagccagcccatggcctacaactgtgggttaatttgaggagctcagagaagatggtggagcctcagtaccaggaactgaaaagtgaagaaatccctaaacccagtaaggatggtgtgacagttgctgtcatttctggagaagccctgggaataaagtccaaggtttacactcgcacaccaaccttatatttggacttcaaattggacccaggagccaaacattcccaacctatccctaaagggtggacaagcttcatttacacgatatctggagatgtgtatattgggcccgatgatgcacaacaaaaaatagaacctcatcacacagcagtgcttggagaaggtgacagtgtccaggtggagaacaaggatcccaagagaagccactttgtcttaattgctggggagccattaagagaaccagttatccaacatggtccatttgtgatgaacaccaatgaagagatttctcaagctattcttgatttcagaaacgcaaaaaatgggtttgaaagggccaaaacctggaaatcaaagattgggaactagtggaaagcggaagagcaggtcttgatgtgtcctagaattttgccatttctgagattgagccattgaaggcattccatttctaaagcttatttagccggtgcttctaaagaattccacactaacgtgataacatggtttttgtaacaataaatgtaggatatttcctggcacatgcaaataaacctaatcattgtttctttaaaaaaaaaaaaaaa

SEQ ID NO: 1568 - DNA, 2786 bp, Homo sapiens
  Genbank Accession No. Y07909
agcactctccagcctctcaccgcaaaattacacaccccagtacaccagcagaggaaacttataacctcgggaggcgggtccttcccctcagtgcggtcacatacttccagaagagcggaccagggctgctgccagcacctgccactcagagcgcctctgtcgctgggacccttcagaactctctttgctcacaagttaccaaaaaaaaaagagccaacatgttggtattgctggctggtatctttgtggtccacatcgctactgttattatgctatttgttagcaccattgccaatgtctggttggtttccaatacggtagatgcatcagtaggtctttggaaaaactgtaccaacattagctgcagtgacagcctgtcatatgccagtgaagatgccctcaagacagtgcaggccttcatgattctctctatcatcttctgtgtcattgccctcctggtcttcgtgttccagctcttcaccatggagaagggaaaccggttcttcctctcaggggccaccacactggtgtgctggctgtgcattcttgtgggggtgtccatctacactagtcattatgcgaatcgtgatggaacgcagtatcaccacggctattcctacatcctgggctggatctgcttctgcttcagcttcatcatcggcgttctctatctggtcctgagaaagaaataaggccggacgagttcatggggatctggggggtggggaggaggaagccgttgaatctgggagggaagtggaggttgctgtacaggaaaaaccgagataggggaggggggagggggaagcaaaggggggaggtcaaatcccaaaccattactgaggggattctctactgccaagcccctgccctggggagaaagtagttggctagtactttgatgctcccttgatggggtccagagagcctccctgcagccaccagacttggcctccagctgttcttagtgacacacactgtctggggccccatcagctgccacaacaccagccccacttctgggtcatgcactgaggtccacagacctactgcactgagttaaaatagcggtacaagttctggcaagagcagatactgtctttgtgctgaatacgctaagcctggaagccatcctgcccttctgacccaaagcaaaacatcacattccagtctgaagtgcctactggggggctttggcctgtgagccattgtccctctttggaacagatatttagctctgtggaattcagtgacaaaatgggaggaggaaagagagtttgtaaggtcatgctggtgggttagctaaaccaagaaggagaccttttcacaatggaaaacctgggggatggtcagagcccagtcgagacctcacacacggctgtccctcatggagacctcatgccatggtctttgctaggcctcttgctgaaagccaaggcagctcttctggagtttctctaaagtcactagtgaacaattcggtggtaaaagtaccacacaaactatgggatccaaggggcagtcttgcaacagtgccatgttagggttatgtttttaggattcccctcaatgcagtcagtgtttcttttaagtatacaacaggagagagatggacatggctcattgtagcacaatcctattactcttcctctaacatttttgaggaagttttgtctaattatcaatattgaggatcagggctcctaggctcagtggtagctctggcttagacaccacctggagtgatcacctcttggggaccctgcctatcccacttcacaggtgaggcatggcaattctggaagctgattaaaacacacataaaccaaaaccaaacaacaggcccttgggtgaaaggtgctatataattgtgaagtattaagcctaccgtatttcagccatgataagaacagagtgcctgcattcccaggaaaatacgaaaatcccatgagataaataaaaatataggtgatgggcagatcttttctttaaaataaaaaagcaaaaactcttgtggtacctagtcagatggtagacgagctgtctgctgccgcaggagcacctctatacaggacttagaagtagtatgttattcctggttaagcaggcattgctttgccctggagcagctattttaagccatctcagattctgtctaaaggggttttttgggaagacgttttctttatcgccctgagaagatctaccccagggagaatctgagacatcttgcctacttttctttattagctttctcctcatccatttcttttatacctttcctttttggggagttgttatgccatgatttttggtatttatgtaaaaggattattactaattctatttctctatgtttattctagttaaggaaatgttgagggcaagccaccaaattacctaggctgaggttagagagattggccagcaaaaactgtgggaagatgaactttgtcattatgatttcattatcacatgattatagaaggctgtcttagtgcaaaaaacatacttacatttcagacatatccaaagggaatactcacattttgttaagaagttgaactatgactggagtaaaccatgtattcccttatcttttactttttttctgtgacatttatgtctcatgtaatttgcattactctggtggattgttctagtactgtattgggcttcttcgttaatagattatttcatatactataattgtaaatattttgatacaaatgtttataactctagggatataaaaacagattctgattcccttcaaaaaaaaaaaa

SEQ ID NO: 1569 - DNA, 1635 bp, Homo sapiens
  Genbank Accession No. Y08374
aaaggaagagaaagggagagagggagagaagagggagagagcagagagacctcaccgagagagctgcaaaaccagcctggaaaaattagagtattacctaacattagtgaaaaataaaggtactttcttgagaagcccttggacccattctgcctcctggagttctgaacttttcactcactgcctattaattaatgttaagcctgcaaagaatggagttgtcctggatatttggccaaaaaaaaaatgtatccacaaacagggacgtaatcaggcagggagcctcgttaagaagttttgttcttgtcctaggagtgatgagagatcactgaaggatttagagaggggctgtatcatcaggcttgggttccaaagcctcactgagagagttggggagctgactgatgtcagatgctcgtgcagccgccccgtagggcctgtatttcctccatggtgcctcactgcagcaccgagcttgcaaaagatcctctctctttatgggaatttcaaaacagaagcaaaatagcaccggggcttaaagcattcttgggaatttccctgtctttccctctaaataatcagcatgtaaattgcaaaaaaaaaaaaaaaaaaaaaagacacgggcccaaaagggagcgctcagtttcaggctctttgctttccttcctcccgaggctctctggcccttacccagcctgaaaacaaaaagtgtgagggggagggtaggaaggtagttcaagcagggcaatgctgagcctgggaagaaaacaacagccttgtttagggcactgtggcttacgtaactaaattgtgcccagtttccacctggccaggggcctggagtgaatgctgaagatgcaaaggtagaggctgccagaaaagccaggaaattgctggcaagaaaggccagtggtggggtgcaggagtgggaggaaggctgggaaatgcggctgagtcacatctccagaagccccccatcatcaccctagtggctcttctgctggcaggcgcctcatgaagacctgacccaaagttttcaaaactctgcggtttctcaaccctcctctggtaatccatagtactcccccgcctccacttgccagcctcgtgattccttcatggacacatagctcagttcccataaaagggctggtttgccgcgtgggggagtggagtgggacaggtatataaaggaagtacagggcctggggaagaggccctgtctaggtagctggcaccaggagccgtgggcaagggaagaggccacaccctgccctgctctgctgcagccagaatgggtgtgaaggcgtctcaaacaggtatctgggctagccaaggttaatccatcagagttgtgggttttcaggcccagacagcccgcagagccatctgcctgctgggtgagggactaagggagtgggcagagggggaggagaagcagagccaggggagggactgaggctgcaaccaggaggtgggggtgggggagtgggtctcagttgcttgggggagggagcagggcggaagggcaggatgcacttgcaggggtctcatcctggatttctcttcaggctttgtggtcctggtgctgctccagtgctgtgagtaatccctccacctccacttttaagtcca

SEQ ID NO: 1570 - DNA, 827 bp, Homo sapiens
  Genbank Accession No. Y09216
gtgatccttggggccaggtatggcatgcccattgatatgtggagcctgggctgcattttagcagagctcctgacgggttaccccctcttgcctggggaagatgaaggggaccagctggcctgtatgattgaactgttgggcatgccctcacagaaactgctggatgcatccaaacgagccaaaaattttgtgagctccaagggttatccccgttactgcactgtcacgactctctcagatggctctgtggtcctaaacggaggccgttcccggagggggaaactgaggggcccaccggagagcagagagtgggggaacgcgctgaaggggtgtgatgatccccttttccttgacttcttaaaacagtgtttagagtgggatcctgcagtgcgcatgaccccaggccaggctttgcggcacccctggctgaggaggcggttgccaaagcctcccaccggggagaaaacgtcagtgaaaaggataactgagagcaccggtgctatcacatctatatccaagttacctccaccttctagctcagcttccaaactgaggactaatttggcgcagatgacagatgccaatgggaatattcagcagaggacagtgttgccaaaacttgttagctgagctcacgtcccctgatgctggtaacctgaaagatacgacattgctgagccttactgggttgaaaaggagtagctcagacctgtttttatttgctcaataactctactcatttgtatcttttcagcacttaattttaatgtaagaaagttgttcattttgtttttataaaatacatgaggacaatgaaaaaaaaaaaa

SEQ ID NO: 1571 - DNA, 3614 bp, Homo sapiens
  Genbank Accession No. Y09538
gctacaagatgaccactgaggattacaagaagctgtgagtatgcaacgccaggcaccctacaatatcaggcgcagctctacatcaggggacaccgaggaggaggaggaggaggaggtggtgccattctcctcagatgaacagaaacggaggtcagaggctgcaagcggtgttctgaggaggacagctccccgggagcactcctacgtcctgtcagcggccaagaagagcactggcagtcctacccaggagacacaggcaccgtttatcgcgaagagggtggaggtggtggaagaggacgggccttctgagaagagccaggacccacctgctctggcaagatccactcctggctcaaacagctcaagaggtgaggaaattgtccgcctgcagatcctgacacccagggcaggactccgcctggtggccccagacgtggaaggcatgagctccagtgccacttcagtctctgctgtccctgctgataggaagagcaacagcacagcagcccaggaggatgcaaaggcagacccaaagggggccttggctgattgtgaggggaaggatgtacccaccagggtcggagaggcctggcaggagaggcctggagctccaagaggtggccaaggagacccagctgtacccgctcagcaacctgcagatcccagcaccccagagcggcagagcagccccagcggatctgagcaacttgtcagacgagagagttgtggcagtagcgtgttgactgattttgaggggaaggatgtggccaccaaggtcggagaggcctggcaggacaggcctagagccccaagaggtggccaaggagacccagctgtacccactcagcaacctgcagatcccagtaccccagaacagcagaacagccccagcggatctgagcaattcgtcagacgagagagctgcaccagcagggtgaggagcccctcgagctgcatggtcactgttactgtcactgccacatctgagcagcctcacatttatattccagcccccgcaagtgaattggactccagctctaccaccaaagggattctcttcgtgaaggagtacgtgaatgctagtgaagtgtcttctgggaagccagtatctgcacgctatagcaacgtcagcagcattgaggactcattcgccatggagaagaagcctccatgtggcagcactccatactctgagaggacaactggagggatctgtacttactgcaaccgtgagatccgagactgtccaaagattaccctagaacatcttggtatctgctgccatgaatattgctttaagtgtgggatttgcagtaaaccgatgggcgatctcctggatcagatcttcattcaccgtgacaccattcactgtgggaaatgctatgagaagctcttctagcgaccccccaccgccaggctgatcagaagctgatgactcgtggacaaatttggctgtccccagttttgccccaagttgctgtctccccttccctcacctcctccctccctgtttgatttcttcatgcttttgcccttctcaagttgaagttgcatacatccaatatcgtatcttaatgatgctatgataattgcttgtgtgtgtagcttcttgtagcttagaaagcgctttatgcccatgatgtcatttcaggctcaaccaaagaggatcaaacaggaattccatcttggcttccctaagacagattggctttctaatgagtttaagtgggcagaagtgtagggttcagtgtgtcctgactcccttgaggcttataatgggccaagttgaagactgttgatgatccctggtgggtaaattgcagacatcaaatgctagggattggcataggctagtgtttagcttgtctatttgccatatctatttttttaaatttccatacacttgtaaaagtagttagttgcttttgattgagttatatagcagtttttcatttggtcttccactcaccgttcactatatttgagtgttcccttacaggtatgttggcatgtgttggaaaatttacacaattaggtttaaattcagtaggatgtgattttgggggtggactgatcaaagtgatatctgtgtctgttggaatcttgatagctgattaatttgccctcaattctgctccctgaacttcacacataaatcttcccaagtgggttttagggtgtatagatcccagcaggattaaggaagtggaaaagcagctaacatttcttgaggctctaccacatagcaggcactgtcacagagtaatggcattaatccccataataatcctgtgaaggtgatattctcatcccatcttagacatgaggatattggaactcagagaggtggctattgcattgcgcagaacgctacagagcccatgctcttcccagagcagcacccacaaaagcaagcattgattttgtgctcagtgtgtgccaagcactgtgcagagggtacacagttcctgccaggttaacaccctcccttcaggcctcccaaaggcataggcttgcaaagagcagaaggtgtgaaatcacactcttcctctgggcatcctggatccctgaattatccccccccccatgaagtacttcaagggccaagctgcccctttccctcctctccgcccatgaaaatgcctccaaactgagatgctttcagctgagaacagatttgactcacagacattaccaaagaggagcttgtgaatccaggaaaagctccagggggctagctgatctgagcagagagctttcagtgacccattttcctgtctagactctgccttaagctagtggcaactgctggggccccaggtacttgggacatggaaactcgttggatggctgggcagatgtaagcctgtccatgcagtcagccgatcctctgctcaggttcagctggactctgccatctgtgggcccagcatcactctgtaagttccttgaaaggaagaacaaccttagagtatttctgatacaaaatgagggcctctgctcttgatttaattataaaatgtctacgtctttctccagtttctgagccctatgcacattggcttgtgggcttgttcttcctgccaaatgatcagagagggaacattccatttatttgtagtggatttcctctggagggcatgtacccacactaaataccaactgctcttcctcagctgtagtccccaacatcagacttggcacgtggtggacactaacacacaggcactcaatgaatgagtgaaggaaataaaagtcaccccccgttggtgagaaggtgcctatccccctgagtcctcagtgcaggaccagtggatgaaaggcaaggtaaagaggcccaagataggctggcttcccccgttcaaggtatagtctgcctttaagggagttttagaaccaacatgcaagacattgaaagaaatcttgcaagagccattattgacttagatccaaaacagcctctctcatgtctaaaaaggcacagaattttgcagatctgaggaagagggatgcattacctttttgcttcttttcaattgcttagtgtttctaatcatacttaatccacactaatgtgcgcaattataataaatgctaaaatatcaaaaaaaaaa

SEQ ID NO: 1572 - DNA, 10634 bp, Homo sapiens
  Genbank Accession No. Y09788
cgtgtccactgtgtcctcctcagtcctcaccaccctgagacccactggcttccccagctcccacttctctactccctgcttctgcagggcatttggacagtttttctcgcccggtgagtgcatgtggataacactgctgtaccctttccccacatgctatgccaacctgggtctgcctgtcctgggagccagtggctttctccctgctggtcatgtttgttccccactggcctcacttggcccctcccggccacactgggtccccactggccacactgggtctcctctggccacaatccgtccgcactggccacaatcagtccccactggccacacttggtccccactggccacaatgcgtcccccttggccacattcggtctcccctggacacaatccatccccactggccacactgggtctcctctggccacaatccgtccgcactggccacaatcactccccactggccacactcggtccccactggccacaatccatccccactggccacactcggtccccactggtcacaatccgtccccactggccacactcggtccccactggccacaatccatccccactggccacactcggtccccactggtcacaatccgtccccagtggccacacttggtccccactggccacactcagcctctgccctctccactcccttccctggaaccgctgctccctcctgcgctgacctctgcctttgctctcccagaactctggcttacccatctctgggagtggcttatctttctatggtgttgttcttcacaggggaagtcatctacaataagaccgaccgagccggctgccatttctacgcagtgtgcaatcagcactgtgacattgaccgcttccagggcgcctgtcccacctccccaccgccagtgtcctccgccccgctgtcctcgccctcccctgcccctggctgtgacaatgccatccctctccggcaggtggccccgcctgccctccacctcccgtgctgcgtgcacacggtctgggttggctggagcacagccacagtccagcccccgaggcccgtctcagtgaccccgccgccagtatctccagttggaggaggcacacaggcctaggggccaggctagcatgggggccgccctcctcaggcaggctcttgtggccacccggggctttggggcccctaggggtgggatgagccgtggatggggtcccgtgagctggtccaggtgaggacgtgcatgttccctgccccaggtgaatgagacctggaccctggagaactgcacggtggccaggtgcgtgggtgacaaccgtgtcgtcctgctggacccaaagcctgtggccaacgtcacctgcgtgaacaagcacctgcccatcaaagtgtcggacccgagccagccctgtgacttccactatgagtgcgagtgtgagtgcgtcggtggccgcgggattacccgggggcaggtggagcagagtgcaccgtcggctaggctggcagaatggggcatggtggggcacagtggggtgcagtggggaatggtggggcatggtggggcatggtggggtgcagtggggcatggtggggcatggtggggtgtggtggtggtgtttgggagatcgctggcatcccttcaggaaaccatcatgcaccatgctgtcttgggcccttcagtggtgcacgtcgtgagagctgttagtatgcaggctccgtgtccacagggctgaaaatcctgacacagcccaagggagaggccagcagaggctggtttcctgagcttctctgcacatcagcctgtgtggtttgaaagggaccctgcccaggggcttctggggccaggagaagctcaggatggaagcgggacccagaggagcttttgtctcctgggtcctaacagccgcttccatcaccgtgcgggacccaccgctaagaggtcacggcgttctcactcctccccatgtccttggccccaggggctgctgttccaaaccgccacaagctggggagcttatacaacagaaacccactctccgtcctggagctggaagtctgagatccaggcgggcaggggatagactccctgctgagggtctggggaggtccttcctgcctctcccagcctttggggactccaggtgtcctttggctatggctgcatccctccgatctctgcctctgcctctctgccctccccctctctgtgtctgtgtctcttctggtctcccggtaaggacactggttcattggattgaggggcccacccagctagtccacgatgatgtcatttcaagatgcttcccttaatcccatctggcaaagacactttctcccggaaagccagcatgcggaggttctgggatagccatagattttgggggaccccattctacacactggacccatttttatagacgaggcagctgaggcccaggggcttcagtggctccccaaggccgcagtcacagtggtgacgctggctgccatgacgcctggggagcgagggcaggaggacggagcctgccagcccgtccatctctgtcccgcaggcatctgcagcatgtggggcggctcccactattccacctttgacggcacctcttacaccttccggggcaactgcacctatgtcctcatgagagagatccatgcacgctttgggaatctcagcctctacctggacaaccactactgcacggcctctgccactgccgctgccgcccgctgcccccgcgccctcagcatccactacaagtccatggatatcgtcctcactgtcaccatggtgcatgggaaggaggagggcctggtgagtccaggctgcgggtggcacagtgttggcccagtcccaaccgcacctgggcaggccgactgcaggccggggtgacccaggtgccgcagcgatggcccagtgcccaagacagctcccaggggcagggaaggcctgtggagccgcctaagccgagcgcaccctgtggcctaaatgcagccacctggagactccaggcccccaggaagatctgggctttggggtgggggatacacaggggggtctctgcacatggaggcagagcccaaagagaagccctgctccccgagcccacctggcactgcctcccagctcagggttcccctggattcccccagatcctgtttgaccaaattccggtgagcagcggtttcagcaagaacggcgtgcttgtgtctgtgctggggaccaccaccatgcgtgtggacattcctgccctgggcgtgacggtcaccttcaatggccaagtcttccaggcccggctgccctacagcctcttccacaacaacaccgagggccagtgcggtgagtgggcggcgggtcctgccccggccagggctgctgctgggcctgacaacccagtgagcataggggaagcctggggaggggaatgagtgggggaggggggtgggggctgtgaaaggctccccagattccagccccgcggtgacgccccactcccaggcacctgcaccaacaaccagagggacgactgtctccagcgggacggaaccactgccgccagttgcaaggacatggccaagacgtggctggtccccgacagcagaaaggatggctgctgggccccgactggcacaccccccactgccagccccgcagccccggtgtctagcacacccacccccaccccatgcccaccacagccgctctgtgatctgatgctgagccagtgagtcctccctcgggggttgcaggccctgggcgcccccgcccgcccgcatgcacgcacgcacgcagctccctggggctgggggccctccgtcctgatcgctttgccccacagggtctttgctgagtgccacaaccttgtgcccccgggcccattcttcaacgcctgcatcagcgaccactgcaggggccgcctcgaggtgccctgccagagcctggaggcttacgcagagctctgccgcgcccggggagtgtgcagtgactggcgaggtgcaactggtggcctgtgcggtgagtgggggcggccccgggccccccagacccctcggcctctctgagtgtcctgtgcggtgagtgggggcggccccgggccccccagacccctcggcctctctgagtgtcctgtgcggtgagtgggggcggccccgggccccccagacccctcggcctctctgagtgtcctgtgcggtgagtgggggcggccccgggccccccagacccctcggcctctctgagtgtcctgtgcggtgagtgggggcggccccgggccccccagacccctcggcctctctgagtgtcctgtgcggtgagtgggggcggccccgggccccccagacccctcggcctctctgagtgtcctgtgcggtgagtgggggcggccccgggccccccagacccctcggcctctctgagtgtcctgtgcggtgagtgggggcggccccgggccccccagactcctcggcctctctgagtgtcctgtgcggtgattgggggcggccctgggcccccccaaccccttggcttgtctgacacctctctgtgcccacagacctcacctgcccacccaccaaagtgtacaagccatgcggccccatacagcctgccacctgcaactctaggtaagtacagggatggctggtgccttccctgccacccaggcctgcctgaccggtctgggggagcaggaggaggccagagggtgtcccactgtgggccacagatctggggtgcccgagcccaggactccttggaaaacatcccctgctgctcccagatgccttagagacagagtcaggcagggggcgcatccctggccacgcctggccccgcatccccacctggccccgccaccgagccccacccatccccgcccatacttagccccgcccacccccaccccagccccacccgtgcccgcccccagccccgcccaccctgagccccgcactccacccattcatctccttccctgctccccactgcccatcctggggactcacgtggatgacagtggaggcctcctggatctctaggtctcagggcctctcttgtcatcctgcaggaaccagagcccacagctggaggggatggcggagggctgcttctgccctgaggaccagatcctcttcaacgcacacatgggcatctgcgtgcaggcctgccgtaagctccgccacctgtgggcatacgaccctgggcccgacccaagcacacacagggtgggaggagccgcccaggaccatgatgtgctctcccctctccccagctgacccccgtgacctgttctgccccaccagagcatgggatggccccagagtggccctgaaccctgcagagcccccacggtcccctgaagcccacagggaggctctgtccttgagtgatcctgtgatggtccctcccctgagccctgcctcccaccaccatggacgaggcttccatgcactgacagctgggctcacggtgccctggcctgagctccagccacatctgacaccccaaaagttctccagggccttccatcccggggggaagcaggctccaggcctgagagcacctcccatgcagaggcccctccgcctgcaaactcagcaccctccgtgatgccatgctgttttctttccagcctgcgtgggacccgatgggtttcctaaatttgtgagtggctccacccccacctgccctaccccaccctctcgcgagctgagggagggagggaaggagcatccccatcccacagggcagctgtggggagcccgagtgtgacgtggacgtgccagtggctggtgtgcgcttcctgccccatcactctgggccactcgggtaccagcccgagggagggggtggctggacagatgcccagggttgacctgtgtctgtccaggagccctcagggacccccttgatccattccagcccggggagcggtgggtcagcaactgccagtcctgcgtgtgtgacgagggttcagtgtcggtgcagtgcaagcccctgccctgtgacgcccagggtcagcccccgccgtgcaaccgtcccggcttcgtaaccgtgaccaggccccgggcgaggaacccctgctgccccgagacggtgtgcggtaagacgctgcagagcagaggtgcccggcatagggtgaggggggacagagccggtgcccaccaggggcctgtgggttgggcacaggagagcagaggagagccactgtgtcctggcgtgaccgcggcaggaccactcggcagagatggcctccaggtgcttcattctcctcctaacgatgaggctggtgacctctggcctgcccaggagtggcccagggacgtggggaagcagcggggaggtggccaagcaaaggggcctggagggagccccaggggctgtgaagcggtcaggtcctcggggaaaagcacgcctgcgacttactctgggaacaagtggtcgggaggaggagtgagcagcgcccagacagtggcctccatcctcccgcagtgtgcaacacaaccacctgcccccagagcctgcctgtgtgcccgccagggcaggagtccatctgcacccaggaggagggcgactgctgtcccaccttccgctgcagtgagcggggctggggccgggctcctgggtggcctcttgctgggggtgggggggtgcaggatggtgggggcgctggagcacatgctccccaccacttgtcgagggcttagctccctttccttccaggacctcagctgtgttcgtacaatggcaccttctacggggtaagggcacagcagtgggtgggtgtggccctggggcctgaacatgtgtgtgggatgccccggggctctctgagccccactccttgtcttgacattcctgccctgagggccgatccgcacaggggccctggacacgtcagagctgggacatgcttgggactcaggggcaccttacgtcgacagccatgagctccacaactgctgcctctgagaggtcccttcaggggctcccagcaacagcctggggggcagcacacactggcctgggggtccccgcctgcccgcccagattcctacccgcccggattcctgcctgccagattcctgcccatggggtctctgcccacccagattcctgcccacatggggtctctgcctgcccagattccctgcccacctgtggtccctgtgtgcatcagctccctgcctgcctgggtccatgctcagccaggggtgcatctatgctccatctgaggaaggaacaactccctgcaggccccattgggtcatggggaggggtcctggccctgttgccccaccagtgccctcagtgccaccctcccaccccttgcaggttggtgcaaccttcccaggcgcccttccctgccacatgtgtacctgcctctctggggacacccaggacccaacggtgcaatgtcaggaggatgcctgcaacaatactacctgtccccaggtgagacccaaggcacctgcccccaggtgagcccccgaggcacctgcccccaagtgagacccgaggcacctgccccaggtgagacctgagtcacccgcccccaggtgagcccccgaggcacctgcccccaggtgagtcctgaggcacttgccccaagtgagacccgaggcacctgccccaggtgagacccgaggcacctgccccaggcaggtgccccaggtgagacctgagtgacctgccccgtgagccaccaaggcacctgccccaagtgagaccgaggcacctgccccaggtgagcccacagctgctgggcagcccagccctgagtcacttatcctgggctccctggggttctctagctcagccattgctggggtcttgtttgttttccaaagggagggtatgaagtaggaggataactgagggggtctgggggtgggacaggacctgcaggctgctggggacaggggctgaggtcaggttccaggaaggcaggggtaggcagagagaaggtgctggaaactggggtgaggctgagccgggataactgagtgggggcaacttcttcgggtataggcccaggcagggacagggctaaggggtcctggaccactggggtgtagacaggagggcaggctgggccggggcatgtgctggaggagagggttaggcctgacgcccctcatgtccccacagggctttgagtacaagagagtggccgggcagtgctgtggggagtgcgtccagaccgcctgcctcacgcccgatggccagccagtccaggtaacagcagaggcatgtgggggcaggtctcagctccctccctggagaccctcacccccaacggggctctgcacaagaggtaatccctactcagcttccacactcacccttgcatttcagctgaatgaaacctgggtcaacagccatgtggacaactgcaccgtgtacctctgtgaggctgagggtggagtccatttgctgaccccacagcctgcatcctgcccagatgtgtccagctgcagggtgtgtgctggaggccctgcccctgcctgggagtccttgtccatcagggaggcccaacccctgtctgggatgcctgcacagcagggaggccccacccctgctggggaggccccacccctgcctgggaagccccacccctgcctgggaggccccgcccctgcccgggaggccatgcccctgcccgggtgggcccctccccaggaggccgcacccaccagggaggccccgcccacagccctgccccctgtctttggcccccaccaggggagcctcaggaaaaccggctgctgctactcctgtgaggagggtaagtggaagccaccttcccacaccagccctccagctccagcccgtcgccacccatccattcctgcccagacatctgcactaggcagcagtgggatgcccgcgtccagactccaccctcggtcctggagggccatgggaggggtggtcccatggggagggtcggcccagcaagtccaggccctcagagtgagggtccagtggggctccacatctgcctttcctcctcccagactcctgtcaagtccgcatcaacacgaccatcctgtggcaccagggctgcgagaccgaggtcaacatcaccttctgcgagggctcctgccccggagcgtccaagtgagtgggctcctggcctgtgccaagagcacctgcgtgtggtgggtccgccctggcccgtcagctggctggcagcctgctctgggtcaggagggcctacgcccagctccaggaaggagggaaggggctccccagcagggctccccctctccacgtccattggcagaaagccttggggccgctctcctagccaggccagggcccggctgagccgagccacatggcacagctccccgctgcaacccaggtccaggtgtccccctgggagggtgggtggaacccagagccttctgtgaagccccccatggcttgccactgtggttggctgtcagcaggaggggccagaagggttgacccttagctagaagaggcaggaggaagggtcaagggctgcttagggtcagcaggattggaggagctggttcagacaggggaagtgcaggccacagaatacagagccgggagccaagggaccctggggcccagagctgccccatcctgagaaggtgaagcctcacgtgcccacagagcaggccactgtggacagaagggggcggccgtctggccaggaccccagaggcccatgtgtcaccatggctgggcagagaaacggcggggccaaggtggctgatgtgagggccaccctgcgtccacaggtactcagcagaggcccaggccatgcagcaccagtgcacctgctgccaggagaggcgggtccacgaggagacggtgcccttgcactgtcctaacggctcagccatcctgcacacctacacccacgtggatgagtgtggctgcacgcccttctgtgtccctgcgcccatggctcccccacacacccgtggcttcccggcccaggaggccactgctgtctgagaacgttctgcctccatccccatgctctgtccacctggagccaggatgtgcattgtctgatcatgaaaaccttgggcctcctctgcggagccccccggcctgtgtgtggcaccccgcgctccgtgctcctgctgcccaccccgtgggtgaaaccggccccagaagggtgaggggccagcaggaccctttcgggagggcgccactcaggagtcctaccctgggagagcctgtggcccaccttggccttgcccctccctgatgtcactgggacgccctggaacaaactaagcatgtgcgggcctatgtgtccctgccacggccggacgcccgcgcagcacggattccagctggccacgtccggccgctggggcagacaggctggtccaggcaaggccagctgctgccaggaagctgcgacaggcaagcggccgcctgtccatgcctgctgcagggtaactcagggctgaggtcgcaacggccaggtcagagaggggtcagcatcccaaagccccctctgctcaacccagcccagttttgcaaataaaccctgagcattgagtacgtttcctgtcctgacgtcttttcttcctaccgtctttcccaggctgtccaggtcctctgtgggctgcttcctggggcctgcag

SEQ ID NO: 1573 - DNA, 3186 bp, Homo sapiens
  Genbank Accession No. Y12642
  unsure (1)..(3186): n = a or c or g or t
ggatccccggcatctgagacgtggggctcagcaagggagagatgccgggaggaagggccagagggtctgtctcaagcccaggcctgactggccccagtacccacggtgctcccaaaagcctcagcccagcccaggaccaccctcctcggaaccggccctgccctgccctgggcctgttgttgtctgttcatcagccacgttggcagcggcggcaggaggctgggcccagggctgacctccatctgtgccccggctcccactcaccttcagcctagccagggcaggggcaaagcaagtctgtgggcccctccacaccactcaggtgggtgctgcccagcacaggcgaacggcaaaacgtgctgggctgaacagtggatgggggccccaaagaggttgggttcttgcgcgaggcggtgggttgttcagagacccgttcttccagggaaagaaattccttcctgtgagtataaagagggtgaaggcggggactggcttccaactcaacgggcggcagaccaagaacctgctttgaggccctgggtgctggggcccagccccaaagagttcacgattttggggagactggagccgggacacctagagcaatagttacaaagtggccgggatggcgctgcccccaacgtagcaggaggggcctggagagtgggggaaggaatcccacggggagggcttctggggccctggagggcgggaggcagggctggtggagaccaggagggctcagtctctccctgcacaacgcagggtggagttgctgcctccacagcccgggccttctgcccacagggctccccaggcaacttcgagggccgggtcctcacagtcctcactctgtccagtgctcacctcactgctgccccagctgccctccctgcctcggagtggcctctgcctctgcctctgcctcacacaccccatcagcccacagccaccccgagcccttgcagctcaaggaccttctgcatccccggcagcaaccctgagcccagagccaggagagtaggaccagcacctgcccttcctacctcccctgccctggacacccacgggcacccacagggcaccgggcacaggctgcaactctattgagggaactatggggggaatgcagggacaaagacacaggatggtgatggatggtggggggtggggggcggggggtagcgggtggcaggtcagagacaaagtgacccaggaacggacggcagcgagagaacaagacccacagagacagagaagtgaaagtgggagagatggaggcacagcagcaggaacagcagggccaggaggccactgggccccgttgcggagggcagacctctgcctggcggggggcagcaggggcagcgcccagcgacagccaggctggtgggcgtgggccaggcagggtggggcaggtgcccgtcctgggctgacgcttgcacagagccctgcagaatgccgctggctggcggactgcccacccccgcccagcccgtgcctataaggccttggcaatgcaggggcccgcactgctcccagacgacatcagagatgaggacagcattgctgctccttgcaaccctggctgtggctacagggccaggtgaggggctgggccaaggggacgggcgggtgggcggwtctggcctgtgtggtcaccaaatactaggagcctggagctgacgacatctaggcacagagaaccccgacactgtgggtgctagactcttcaaatttaaaacaacatggagcccgaatcttaacgagtgtcagatttacaatgtttcagaatctgaggatcttagaactgactcctggagtcacggaccctgagagagtggagcagggggttgtcttgagatgcttctcactgggagagcggccatctagtccctgccaccagcccctcccggtccccaggtctcccccagcacagcccaggacagcccaaaggccaccaagcccttcctgtcataggctcagagcagccaagctggctgcccccggggccttagctccgtcaggccctcagaaacatagccatctcctccagggacatcccctggggtggggacaaganccagtgtcctcttgncagtcgcagagctccctgagaccttggaggaaaggcttgcaacacaccctagacaggggcagggcaggacacctcttccaagccggcccaggctggaatacatgtcccctgaggctgcactcagggcacatgccctgccaggacccagagcccgggtttgggggcctagggcaagggcagcagggcctctgtccaggaggggtctctgcaggtgggggagcaggccctgctaagtcaccaggaggcctctgttgggcccgctgagccggactccctccccgccagcccttaccctgcgctgccacgtgtgcaccagctccagcaactgcaagcattctgtggtctgcccggccagctctcgcttctgcaagaccacgaacacaggtgggtagcatctgtccaggtgtccctggggctggggacatccctggctgttgtgggtgttggctggaaggttgtggggaggtggggggcagaggtggctgcctggcctgaccacactcacctgtgcccagtggagcctctgagggggaatctggtgaagaaggactgtgcggagtcgtgcacacccagctacaccctgcaaggccaggtcagcagcggcaccagctccacccagtgctgccaggaggacctgtgcaatgagaagctgcacaacgctgcacccacccgcaccgccctcgcccacagtgccctcagcctggggctggccctgagcctcctggccgtcatcttagcccccagcctgtgaccttccccccagggaaggcccctcatgcctttccttccctttctctggggattccacacctctcttccccagccggcaacgggggtgccaggagccccaggctgagggcttccccgaaagtctgggaccaggtccaggtgggcatggaatgctgatgacttggagcaggccccacagaccccacagaggatgaagccaccccacagaggatgcagcccccagctgcatggaaggtggaggacagaagccctgtggatccccggatttcacactccttctgttttgttgccgtttattttgtactcaaatctctacatggagataaatgatttaaacc

SEQ ID NO: 1574 - DNA, 803 bp, Homo sapiens
  Genbank Accession No. Y13710
ccggcacgagaggagttgtgagtttccaagccccagctcactctgaccacttctctgcctgcccagcatcatgaagggccttgcagctgccctccttgtcctcgtctgcaccatggccctctgctcctgtgcacaagttggtaccaacaaagagctctgctgcctcgtctatacctcctggcagattccacaaaagttcatagttgactattctgaaaccagcccccagtgccccaagccaggtgtcatcctcctaaccaagagaggccggcagatctgtgctgaccccaataagaagtgggtccagaaatacatcagcgacctgaagctgaatgcctgaggggcctggaagctgcgagggcccagtgaacttggtgggcccaggagggaacaggagcctgagccagggcaatggccctgccaccctggaggccacctcttctaagagtcccatctgctatgcccagccacattaactaactttaatcttagtttatgcatcatatttcattttgaaattgatttctattgttgagctgcattatgaaattagtattttctctgacatctcatgacattgtctttatcatcctttcccctttcccttcaactcttcgtacattcaatgcatggatcaatcagtgtgattagctttctcagcagacattgtgccatatgtatcaaatgacaaatctttattgaatggttttgctcagcaccaccttttaatatattggcagtacttattatataaaaggtaaaccagcattctcactgtgaaaaaaaaaaaaaaaaaaaaaaaa

SEQ ID NO: 1575 - DNA, 18534 bp, Homo sapiens
  Genbank Accession No. Y15724
cctgtaatcctagctactcgggaggctgagggaggagaatcgcttgaacccaggaggcggagcttgcagtgagccgagatcacggcckkctgcactccagcctgggtgacagagcgagactctgtctcaaaaaaaaaaaaaaaaaaaagaatttcaagatggcggttggagagcattaaaccaagtgggaggccgggcatggtggtgcgttcccatggtcccagccactcaggaggcagaggcaagaggagcacttgagtccaggagttggaatccagcctgggcaacatagcgagacccccatctctaaaaacagccacaacaaaaatcaagcagacggtccttctgacaactggtgacctgcgcaggttgcatgcccatgaagccagctctgaatggggataataaaatcctcctccagggttactgtgagggttaaatgggagtaacttgtgaaacaagcttagcatatggtgaatgttcaagtcagtggctctaatcacagatatttccctacacagcttagaggcccctcccctggggaggcctgaaggaaatcagggtgctggggcatgaccctgactaccgctccatggtcctttcagccatggctctcccttttaatctcttctccataccagcttctatgggggacttttctagcaggcaaacctggccccatctctccattgcttaaaacccttcagtacaaaacccaggacataacatagacaatcgaggttctcagtgtcctagccctgtctctctaatctgccctcctggtccttgcactcctgctccttacgatccagccacactaagggatcaaatcactatccctgacatatggctgagatttctcaccttcaactcaggctgttgttttctgcgggcagcaccctcttctccatgtgtctgaatatttccagaaaagctgggtgtggtggcttacacctgtaatcccagcactttgggaggctgaggcagctggatgagtagagaaggactgaaaataaaaggaactgtgggttgccttatcttcaccatgcctggccaacacggtgaaaccccatctgtactaaaaatacaaaaattagtgagaccagcctggccaacatggtgaaaccccgtctctactaaaaatacaaaaattagctgggcatggtggcaggtgcctgtaatcccaactacttgggaggctgaggcaggagaatcacttgaaccccgaaggcagaggttgcagtgaaccaagattgtgccactgcactccagcctgggcgacagagcaagactcagtctcaaaaaaaaataaaaaataaaaataataaataaataaataataattccagggaagacctctgtttcctcatgcccacccgggccccctcaggtgaggcgggtagatatacttctgctagataggtggtatgttctgccaccttctgtctggtggaggaggtggcaaaagccgtgtctaggtgccaggcatggagttcttggttcctggcagctgggaggtggagaatgtggacctgccctttggacagcctgcctgtgaccatgtcgccctggccaccagctgtgtgtctgtccaggtacaaaaagagagcatggcgggagggacgtgagcccggggcaggcagctggagtgtgaaatgactgcatgtgattctgtgggagctgggggggcaccagaagttgtgacaggggcagccgagcaggcgggcatgctgacaggtgtgtgagcctgccaggtgagggccccggttgctggcaactgtttgtcctgccatggcggtttgaaggtagggtggggtgggctggagaaatggaacataggcctggctgccagagcaaacagtcaggccttctggcctaccttctagcaaataccaactcacagctgagggtgcggtggagcgggagaggctggggttaaggtccctagggccagcagagaagaagtcagacctcaagatgtgtgtgtagggtggagcaggggtttcccaggggcttgaacgcctagggctcccgatctctgggaaatagggctctagcggggagctgtgaggctctgtccccagtcaagtcctggctaacatttttcctggcaacttagggatacagttgggattttgtggactatagcagtgggggagaaaggaatagggtggaaatatctggggatatcagacttgagatataaaatgtcaggctgagcgggatgcagtggcttatacctgtaatcccaacattttgggaggccgaagtgggtcgatcgcttgagtccaggagtttcagaccagcctgagcaacattgggaaaccctgtctctacaaaaaaaaaaaaaaaaaaaaaaaaaaaaaaaaaaaaaaaaaaacctgggcgtggtggctcacgcctataatcccagctacttgggaggctgaggtgggaggatcgcctgagcccgggaggcagaggttgcagtgagccgcgatcatgccactgcactccagcctagatgacagagccagatcctgtctcaaaaaaataataatggggctgggcacggtggctcatgcctgtaataccagcactttgggaggctgaggtgggtggatcacctgaggtcaggagttcaagaccagcctggccaacatggcgaaaccctgtctctacaaaaaaaaaaaaaaaatacaaaaatagctggatgtggtggcgggcgcctgtaatcccagctactcgggatgctaaggcaggagaatctcttggacctgagaggtggaggttgcagtgagttgagatgtcgcctcgccactgcactccgcctgggcgacagagtgacactacgactcaaagaaattaaaaaaaaaaaaaggaaaataataataataataataataataataaaatcaataaataaaataccaggccggaggagccacaaccagaaaaccagcattcctctagctccacagcaccaggctgagacgcagctgatatcagggaatccatctggatcacccatcaaaagccccaaagcacctttcggtccagccagtcctcagggagtgtctttgctcagggaggcaccgagaggcggagaggaggaggggcccagtcctgtcccaggaggaagagcacagaatctgggggtgtgcatgatctggataggggtcagcagctccagaccaggctggaagttgaggctctcaggagcgggtgaggggctgtgttgttggggcagggcgcactgcagctatctgggaaagcttcctggctgcagaggcacagaaggggtttggggtttgaacagccagctgtgcgggctcaatcctggcatctctgaccctgtgcagccttggtggatggcagagactgaggctctagaaggcagagcccagctcgtggtgggaggcagataagggctggggtgaggctgtctgggtctctcaagctggagggagcggcaatcaggctgttctcttagctcctccttttggcggggcgagtggtttctgccttcctgcgacttcctcctctgacccgctgccacttctcctggccctcctggggcgggtggagctcgggagcgctgaggcggaggctcatccatctctcccctccctgggccagggtcagtcccctgggagccctgggcagagacccccccaccccaccctctcgggcccctctggggagccccacctttgctccctggttacatttcctgctggggtgacggtgtgagtctagggtaacgagcctggttttctgaactttcttatgcaccggctctttgttaaaggttctggttatgtgaggaataacccctcgccggtgggcattggaaaagaataaagaaagcagaaacaccaaatgaggagaacatccagcactttcctctagagaagacccgcttattcagaggctttcgggttccctctggagtcacttcgcagaattcgagctgggaagcaggacgccccgggcccaggagagcccagaggaggcgacgcgcagcccagagccgggtgctccgcagaccgccccagctctcggccagatcccacccctagcagctccgcggaccgggaccgaggacccccgggccacgcgcccccggctcccgacaggcccagcacgcccccgcgggcggtctcagtttcccctctgcagaatgggcgggggacccaggcggtcgccccgggcgcggagggcggccggaaggggtgtgatggggggcgggccccgcgccgccccgccccggggagggagtcccgggcgcagcatcctggcgcgggccggggccgccgccgccactgccgtcgggtaaggtcccagcacggacatggcctcgcgcggcgcccgcccgggcccgagtcccccgcgccccgctttgtagccccccggcggagaggcggcctcgacggtgcggaccggcgcagacggccgggcgggcggcatggaggcggcgcatctgctcccggccgccgacgtgctgcgccacttctcggtgacagccgagggcggcctgagcccggcgcaggtgaccggcgcgcgggagcgctacggccccaacggtgagcgcgcgggccgggccgggccggggagcgggggccgcgcgcgccgcagtctcagtttcccctcctgcctccccacccggctctgggcgggcaggaagcgagggctccggaaacctcttcggatgctcctggggcacccggcggggctgcgcggccaccttcgccggcgccggggctgggggctgggggctgggagcgggttccagctggggagaccggacgcctggcaccctctgcgcggtcctcccggacttcccacctccactccggccccgtccaccctggaagcgttattccaccccatcctggaccgtattccaccccaacgcgcggcgctcccgctggcatcctgcaggtgcagcgcagacaccggcgggcgagggacggccggagactcaggctcggcctcccagctggcccagggtctcccctgagggctccagaaaacgcccaggaaggtgccgcttatcagctagcagccttggggcccccacccccaccccaggtcttcctctttctgcaacccgaagcggatgtggctggcggagtcggtgggggctttgaactggctgaggcgggagacccaccttcctggggtggcggagtcaaggcctcagggaactgccagggaggcctttcccatctctggggagggagggaggcttcactatcatttcatcctcacctccttcaaaggagtgtgggattcttgctcttgccaaaaggcacattgagtgccaccgggtactgtccagatgtggcctggcaccttggaggtcccatgagggtggaaaatacagaggtgccctccccacatcccttccaggcaggacctgccaccccctagctgatgcccgcagcatcgggcagagtgtgagggatcccaggagaaataccctcaccatctacagagggcagcctgggtctgcatcctttggggacttggagccttgcccttttggggttcccagccagccagaggggaaggtattctagccctgggatcctactactcagggctagcttgaaaattaggaagaagtgtcagaaaaggacttttgggttttgtattggtttatgaaaaccacctcttatataaatattatctttctggagcagaaatcctttttcaaaaaaattagttgctatatttagttgagctgtgggaggaactggggagataaatattatttaatatcccccattagtgacttggcagggaggttgtgctttgctgcaggagactgggcagcatgggctgcctctgaccctggggtgggctgggggcgagggccggcgcaggcaggtctgcggtcccactgcctcttttgtgctgctatagcctccagcttgggaatcctgattcctgagggaaactggagacgcagcccttggcctgtccctggaatcacacaaatactgcttctgtacgaccctagccaaggtctgtcttcattctgatatcatgtcttcattggtccagcggaggaggaactgactgggagggagggagccccagccttccccacctgttatttggttagatgagatccttggggtgccctggccagcgcacacctgtgtgaactgatggggaaggctgtgggcttggcgtggtgtgtaggtccacagagggtggatgtgtgttggggtgtgatgggaaaagttggggagggatattgctgggctcccctggatcctctgggcattgatagtattaataataaaagctgatgttcactgagcacttactatgtgcccaggttctagtctcagcatttttcatctattatctcatttcttccccaaaacaactccataagggaaggactgttgtcatccccattttatacagcaggaaacggaggcacccagaggttaaaccacttgcccgaggtcacatagtaggtggtggagctggcactggttacctgctcctctctgggcctcagtttccccatctgtacaagacagtcacaagttctgcaggatgcagaaccctggtgtgggcgtctgtgctaggagtttgggtcagccggcagcagctttttcagctttgcctccagccttcttgggtccctagagggctcttctctcagatcactgattggggctgggggcattccagggctctagaagtctttaggtgagcagaggggagccagctgttccttcctgcctcaggcttgccatggcttgaggaggaggtgcagatgtccctagcacagctgctggggtggagctgatgaggctttgaaccctagccctgccccttcatagctgtgcaatgctggaccagcctgtttgcctctctgtgcctcggtttcttcaccataagcgaggctgccatagaacccatctcccagggttgtttgtgagtctttagtgaggtcacagacaccaagtcatccttccttgtcgcagaagaggctggggcgggctcctggccacaagctgggtggcagggtgggtcaggcctgtgggcagaagggacaccccagagacatgtgttctccccaccccaggagtctgtgcacctgcaaggtcgttattgttggaaaccacaaggaagtcatttgcttaagtcctgaagcttgcaaattctgccaggggagggaggcagcggctgggcatcccacccccaccttcccaccctcctccctcactgcacacagacacttcagagctggggagcctcggcagcgcagtcagtgagcacgctagccagggaccccctccactcacacataaaaccccatctgccgtaacccccaacagggagtgagtggggaggctcctggccccagcacctcctgtgagcccacctttgcaggtgccagaggtacccagagttcagcttccttggggggcttttacttgtacatcttttttatttttgaataaaaatgtgcacagtgcaacattcaaggggttcaaaaggtatacagtaaattctccgccccgtccccagccacccattcccagtcctcccaatatcttgtgtcttcttcccaagacagtccgtgcatatacacatctggagctgtgatcttgtgatcttttcccacacggaagcaggaggaggataagtgctctttgtccctgctttgaccttgacagtcattcttggagccggtgccaggaggagcacggtggggcttcctagtggctgcatggcatttcggcgtgcggcttttctctgacttctggtggacgcttgtgttgttggcagcctctgctatgacacgcagtattgcagagtatccttgttgccacatcatgtcacgcgcttgtgaatatcactgaaggacgcattcctgggggtggaactgtggggtctaagtgggtgtatattttcagtgtcgtcagctgtcactaaacttctctgtgcagttgtgccgactgaacggctggttctctgctgcctcgccagcacagggtgggatcagacggtctgatctgtgccagtcaggtggaagagtcctctcgtaggtttgcttggcatctttctgtttaaagtcacattgggtgtcttttcatatgttaaggagccaccaaatgggctgcccatctcctctgctggactggagccaaggcaagagacctggctgtgttgggcatgtcctttctgtagctaaagtccctggagaccccagtgacctgagagtcgggcagatcccaggaggtcttctggggtggtctctgttcaagggagctggcaggccgggcagaagcctgccttcccgggccacacgcggcccatgtgcagtgagcgccttggccccagggctgccaggtgggatgagtggtccagatttagactcctgccagcggcgtcttggctctggccttatttgctgccctcaaataagttccaggccatagctggtgctgaaactcgggcaacccatatgcgtagcccacggaaaccaggccaagaggaacggagtgtgtcaggaagagggggccatctgagtggccctgcttgctgggtggcattgggcagacttggccctccctggacctgctgctcctcaggatagcagggatgggaccctgggatcccctaagggccttgcgggatctgagagggtgtggtttgcccacagccctttggaagctcaacgtctttcatgcttcaccctagttttcactcccactggcccctgctgggcagctgaagccccccaggagcagcatcaggcctgcccagctgggccccctcaccctcttacaccctaaggcagggcctgtattttcccatagcacagtcggacgaagagatgttgagcaaacccttcatctccagctccggataagccaggggtgctgcaggccccgctgcagagcggagagctacttccaaggccccgcagtgctcccgcagagcaaggtcaggtgtccactctaggtgaccccggagacacaggcagggccaggtgggctgggcgggtcttgcccagccagggcctcttcctgactctgcaagtgacgatttaattgctctgtaaatttacctttgaggaagacctgggtgagtgcttgcctctcccggctggaactgacatttagaagctgaaataccagtttccaatgaaggaaggagtagaggggggatgaggggagcaggtggtgtggagcctgggggcagcccaggggcatcgcttaccccccttctccctggctctggactgtgggctcagggccctggcctgcaccacggagcaactgagtaaacaatgactgtaaggactcagcataaacacagggatgactcagccccgccccaccctggaagtgttccagtgtggtggggggaccctaatactgacaactggtcagagaagggcacagcgatgaggtaggggaggggctttcagagaaggcttcctggaaagggggtttatatgaggagataggatgctgctgtgcacagaaggaatggcacaagcaaaatgttggaggaggaaggccgggcgcggtggctagcaccttggcatctcagcaccttgggaggccgaggtgggtggatcacttgagatcaggagttcgaaaccagcctggccaacatggtgaaacctcatctttactaaaaaataaaaataaaaaattagccaggcatggtggcaggcgcctgtaatcccagctatttgggaggctgaggcaggagaatcgcttgaacccaggaggcagaggttgcagtgaaccaagattgcaccaccgcactccagcctgggcaacagaatgagactccatctgaaaaaaaacaatatatatatatgtgtgtgtgtgtgtgtgtatatatatatatatatatatttatatatgtgtgtgtgtatatatatgtgtgtatatatatatgtgtgtatatatatgtgtatatatatgtgtgtgtatatatatgtgtgtctatatatatgtgtatatatatgtgtatatatatatatatatgaatgaggaggagaaggttttgcaaaacgggattatcaacacatcacgcttgaccccataattgtgtacaattatgatttgtcaattacaaatacactaaaaagcaggggtggcaatcctgaggcttggctaacagagggacagatgtgcattcgggatacagacatgatcctagaagggcaggtggggacagatccaggaaggccctgaagcccgtgctaaagttggtctttattctgtaggccaaggacagccactgaagctctgtgaacaggacagaggcagggtcagtcatccatcacatatgtttactgagcacctgctatgctccaggactgctctgggtgctggaagcctgcgcttaacgaagtcctgctgccctagagcttatattctagcaagtgattctggctggagcgtgttcactgtgtgctacgcattccaagtgctttatgcatgccgttcaatcttccggcatccctgtgaggtacttacatttatcaccctctttttgcagatggagaaacagacacaggggattaggtaactgcctgtggccacagaagtaccgtgagatagagcaggatttgaacttgagccctctggaccagattccttgctctaagccacgaagcttctctgatcacctccctcttttcccaggactgcaggctgactcccaggcctgcacgctgggcctccgtgaacacaggccctctcagtctggcaacatgagccaggcaggggtcaccgtggcggaggctcagattagaatagtggccagccccactgtggctctcagagagagcggcacctcctggtcctgtctctgccccctgcagcccagcggatggcactgagagtgggcagagccagggcactctctcatttaacagataggacatctggcactgccagaggcccaaggccgccatttcaaggggaactatctcagcctccaacacgcagcctgggagagagcaaggaaggaggcagcatcttccaggaatgcctggggtaggggatctcccagccctgggctccctccatcaccctggggctcattcatgcgaggggagaattgggtccttcagggttgcatttagaagcagatcaggcctgagcaggcagagcctcgtaaacccctaaagcaccatcagtgaggccagcagggccttttggacaggaggatttgggctgtgggctctctacagaggggcacgccgactgaagggatggggacatccagcccaacggtcaggacatgggacaccaagggttttcagatgagcttgggtgagcggtaaagagagtggaggagggaaggcaggacagcctaagagttagcatcggaggcccacagcagggggtcgagaaccagactgcctgagctcaaaacccttccctgtctcccccgctgtgtgacggtgaactagtcactcaacctctctgttgtgtactctgtaaaatgggcataacaatggcatcctccttcccagcttgtttgcggatcatgagaataaggcacgcaaggagttagcagggtgtctggcgcacaccaccagctgctgctgctatgacctccgctaagcacctcacgtgctcggtccccagcgtcttcccatttgttctctggtgataatgcggtaaggcacctggtacattgcttggcaggtgcttggtaaatgtgactcttaacagtaatgatgatgatgatcaccacagcaggccttcaaagtgggtgtggtaccccacctcccaaatgaggctcaaggccccacaaggagctggctgtgtgggcaggaccagagctgtgctcagcggcaggtcaggcctccccaggtgggcggggtgagaggggagctttgcggaggaagccaggtcacagcggagggggtatcagtcaggttcagcttggatactgcagcaatcgcctccaaatctctcttggcaccttaaaggaccagaggctcatttctcactcctgctgagtgctggcagcaggctggtccccgggtgctctgtgccttcctcattctgtgacccaggtcgatggagcagacaccatctcacaggctgctggctgctgtaggagagagtgtcaaagagctccagccgcttggctatttacatttaaatgcatgaaaattaaagtaaaattgcaaattagtcacagtccaggggctcgccagctgcatgtggctagtggctgcggtcctggccagcacagacggaggatacttctgctctcacagaacattctactggacagtgacctcctagaaagtcccccaccaaaagtcaatgctccaacctggcacgaatacacatccttcttctcaaaactcacacggggccgggaagtgccctcctactatgtgcccacaaggtgggggagaaccagaaatatttggggaacaacataatgagcaccaaagactggatcctgggtcagggtgggtcagagagcagaaggggagatgatccaggtagacaggtagagaaaggtgaactgagccgggcgcggtggctcacacttctaatcccagcactttgggaggccgaagtgggtggatcacctgaggtcaggagttcgagaccagcctggccaacatggtgaaaccccgcctctactgaaaatacaaaattagctgggcgtggtggcaggcaccggtaattccagctacccgggaggctgaggcaggagaatcgcttgaacctgggaggcggaggttgcagtaagccaagatcccgccactgcgctccagcctgggcgagagagcaagactccatctcaaaaaaaaaaaataaaataaaataaaataagagaaaggagaacttgagagaccagccggggcaggcaggaggcatcatggggacctttgtggggaagtccaggactggagctggcacgtgtaccccatgacacgcttcccaaccccaggcctcgcccctgcccagaataaagaaaggtgagggttacaggcatcccccgggaagagcccagcacaagcccacccatgcgcaccatgaggttagtgctgtcctgattcgaggctggggcatggctggggagacctcgaaagcacactgctccattggagaattggcccagaaaccagtcctggccctccccccgcctttcctgttcgcctcagctaaatagatcagaaggaaaaagtctgtttgattttaatctcgacgcaggacactggagattacattttccacggaaaatgtcagccactgccgaaaataggactttggagaaaatgctagaaagtgtatttttaggctatatatttccctcctggattcctacagtccagtgggctgcttgatactccccagggttcagctgccaggtgcagaccccaaagcttccaaacaggtggtccggggagagggctcccgtagaaaaaaaaatgcctgtaggccaaaaacaggtggaccaatgcaaggacctgtttccagtgtcaggaagaaggaggtggaagagagccagccatggccggggcctcagattccgcatggctaacgagcttcggggagatgccacagatgtccggagactgtcctttgagtggcaagagacaagaggaggcagggctcagttagactgccgcctgggaagggggagcttctccaagcccaccctgcagagcctgctcccgcccctctcatccccacacagacccactcactcactgtgtggccttgcccaagccacaccgccaccctgatcctccgtgcccgggtctgtgaagcagggcaggaactccctgccacctgcctgccctttaggctgtaggaatgattcaaccacttcaggggcccgaggcacctctgcctgatacaaaaggtgcttcgggaaatgttggagataaaaatcagcacctaggcctgggcggtggctcacgcctgtaatcccagcactttgggaggccgaggcgggcagatcacaaggtcaggagttcgagaccaccctggccaacatagtgaaaccccatttctactaaaaatacaaaaatcagccgggcgtggtgccgcgtgcctgtaatcccagctactcaggaggctaaggcaggagaatcgcttgaacccgggaggtggaggttgcagtgagccaagattgcgccactgcactctggcctgggcgacagagcgagactctcttaaaaaaaaaaaaaaaaaaatcagcacctcaattgaggtgggtgctgttagagtttggaaacagtgttcttcaccatgttgtgtggggggcgactgggtatgtggggcggggctggggggtcttcactgagctcgatggagtgcagggcctgggggggactgcaccatgggagggatcctcactgcggggtgctggctgctggggtcctgtccaggggagccctgctgtgcggtggggcccagcaggccggcccagctgcagaccttgtccagctggtcccaggggagcagggatgttagaggcagggtgagcggaaggcgcctgagctggtgttctccatttgagggaggggctgccttgctgtgggggtggcagagactcaacaggactctgcggccatctgaggaagggctatgcagggagccgtgagaacagcccactctccgtgtgacctgggtgggggaagtgtctgttttctaggcctcagtttcccttctgtgaagtggggcagggaggggctggactggaggggctggaaggaccctcttggctccgtactcatcccacgatgagccaagtcaccctagatcttcctcaatctgagtcgggggagggtagaggggtggaagcatttgggctcaaaccatttatcctgtggcctcagagagccctggggatacatccagtccgtggtgggggtctgggcgggcacggtggggaggcactgccagactcccccgaggcccctgcgtgacccactcctctcttgtctcctcatggctcccgtggctgcctggatcctgcagagctcccgagtgaggaaggtgaggctggcaccgggatggacctctaggccgcgggcagcatccctgggtcgttctctgtctggtcatgacttccttctccccgctgagtgaggccttgctgagctccccaggatcacccacctgagcctctcagcgacctgggttctccctcttctgagtgcagggagggaatgggccgggaggtctcccgggccatcccagctctgagtgggcagggtcagtggtgggggcccagcctcacacatgacccccgttcccagggaagtccctgtgggagctggtgctggaacagtttgaggacctcctggtgcgcatcctgctgctggctgcccttgtctcctttgtaagtagggccctgccagccatcctgtggtagtcggtagccctggagggagagccaggctgggcagtgctccgaggtcctggagcctgggcctgtcctccacaccctgggcctgcgccctggccttccctggccctgccctgctcagacttcagcttcccttgcctgaaccctcatggcccctacattgggtccccggctcccacctgacccctccaatccatcttatcctctggctctcagcgagctccccaactcacatctgccccccgccccgccctgctgtaccctagggtttctctgcctcagcactactgatagtttagaccagatcattctttgtcggggtgggggtgggggctttccactgtaggatgttcagcagcatacctggactctacccacaagatgccagtagcacctcccggggatgaccatcaaaaatgtctttagacagctgggcctgacagctcatgattgaaatcccagcactgtgggaggccaaggcaataaaatcgcttgagcccaggagtttgagaccagcatgggcaacatagggagaccctgtctctacaaaaaatacaaaaacattagccgagtgcggtggtgcaggcctatagtcccagccactctggaggctgaggcaggagaattgcttgggcccaggaggatggagctgcagtgagccgtgatcacaccactgcattccagcctgggcaacaaagcaagaccctgtctcaaaaaaattaaaaatgtcttcggacattgccaaatgcccctggggggcaccttgtccctggctgagtgctgctgccggagccccttccgtggatcccagtgtcccccacatggattttggggtctgaacctcttgcagcctcctcttggctgccgcatctccttgctgttcctccattcccactgatgctcccctggctaatgggctttggatgcgtgcatcagaatcacctgggcttggctgggcgcagtggcgcatgcctgtaatcctagcactttggcaggccgaggcgggtgagctcaggagttcagcctgggcaacgtggtaaaaccccgtctctactaaaatacgaaaaattagccaggcgtggtggtgcacgcctgtaatcccatctacccgggaggctgaggcatgagaattgcttgaacctgggaggcaaaggttgcagtgagccaagatccagccaccgcactccagcctgggcgacagagcaagactctgtctcaaaagaatccgtaggcttgccgacacacaggtgactgggccccaccccagaatttacgactcaggaggtctgggagggaccccaagatcaacatttcttacaagtacccagctgctgctgctgctggtctggggaccacactgagatgctctgctccaggcagacagtaaggcctcggtgggcagccatccaactgccccacagccttgaaggttggcctgggtggggtggtcactcctgtggggtggcaccctgtgccaaggccttctcggaggagtggccctctccaagccaagagctccccagtgctatctccccaaagcagggaagcaagcaggagatccggggtgccaaggaaaaggagagcagatctcggcccgcagcagggcctgagctggccagctgtgatcctgcaggtcctggcctggttcgaggagggcgaggagaccacgaccgccttcgtggagcccctggtcatcatgctgatcctcgtggccaacgccattgtgggcgtgtggcaggtgggaggcactgggggtgggaccgggcggggggcggtctcccagccactaggagtgccctccacctggtgctggcgtcctgcagactctcctgcttccacctcctacccaggccccagaggagtcactccaagggggtggtctgcggggggcagcagggacagactcctgccggccttctattctgcaggaacgcaacgccgagagtgccatcgaggccctgaaggagtatgagcctgagatgggcaaggtgatccgctcggaccgcaagggcgtgcagaggatccgtgcccgggacatcgtcccaggggacattgtagaagtggcaggtatgccggggcctcctccttttattttattttattttatttatttatttattttatttatttatttatttattttttgagatggagtcgtgctctgttgcccagactggagtgcagtggcgcaatctcggctcactgcaacctcctgcctcccgggttcaagcaatcctcctgtctcaggcttctgtaggggcctcctccttttattatgtgggcctgggagccccatccctctctgtgcctccgtcattccggccgtatatacagagggggtggctgtcggatccctccaaagccctttggccaaaaccctgttggacagatgagactgtgggccagaggggcaggggtcaccagagcgatcacagctcaggcacccgacgcccagccccagccttgggttctgggaacccttctggcttttcccagctggtggtgcccaaagccaccctcagccaagccattctccccgcacagtgggggacaaagtgcctgctgacctccgcctcatcgagatcaagtccaccacgctgcgagtggaccagtccatcctgacgggtgaggccccccccaggaggccgggacctagtgggccaggactaagggatgggcgtgtcttcatgtggggcttctcatctctgattccctgaccaggtgaatctgtgtccgtgaccaagcacacagaggccatcccagaccccagagctgtgaaccaggacaagaagaacatgctgttttctgtaagtcaaatgtctggggcctttgcccagacaatgataaaaataacaacattaggattatgatcacgcctgtaatcccagcactttgggaggctgaggtgggtggatcacctgaggtcaggagttcgagaccagcctggccaacatggtgaaacccgtctctactaaaaatacaaaaagattagctgggggtggtggcgtgtgcctgtaatcccagcaacttgggaggctgaggcaggagagtcacttgagcccgggaggcggaggttgcagtgagccaagatcgtgccactgcactccagcctgggtgacgagagcaaaactctgtctcaaa

SEQ ID NO: 1576 - DNA, 4849 bp, Homo sapiens
  Genbank Accession No. Y16961
cgttgatatcaaagacagttgaaggaaatgaattttgaaacttcacggtgtgccaccctacagtactgccctgacccttacatccagcgtttcgtagaaaccccagctcatttctcttggaaagaaagttattaccgatccaccatgtcccagagcacacagacaaatgaattcctcagtccagaggttttccagcatatctgggattttctggaacagcctatatgttcagttcagcccattgacttgaactttgtggatgaaccatcagaagatggtgcgacaaacaagattgagattagcatggactgtatccgcatgcaggactcggacctgagtgaccccatgtggccacagtacacgaacctggggctcctgaacagcatggaccagcagattcagaacggctcctcgtccaccagtccctataacacagaccacgcgcagaacagcgtcacggcgccctcgccctacgcacagcccagctccaccttcgatgctctctctccatcacccgccatcccctccaacaccgactacccaggcccgcacagtttcgacgtgtccttccagcagtcgagcaccgccaagtcggccacctggacgtattccactgaactgaagaaactctactgccaaattgcaaagacatgccccatccagatcaaggtgatgaccccacctcctcagggagctgttatccgcgccatgcctgtctacaaaaaagctgagcacgtcacggaggtggtgaagcggtgccccaaccatgagctgagccgtgaattcaacgagggacagattgcccctcctagtcatttgattcgagtagaggggaacagccatgcccagtatgtagaagatcccatcacaggaagacagagtgtgctggtaccttatgagccaccccaggttggcactgaattcacgacagtcttgtacaatttcatgtgtaacagcagttgtgttggagggatgaaccgccgtccaattttaatcattgttactctggaaaccagagatgggcaagtcctgggccgacgctgctttgaggcccggatctgtgcttgcccaggaagagacaggaaggcggatgaagatagcatcagaaagcagcaagtttcggacagtacaaagaacggtgatggtacgaagcgcccgtttcgtcagaacacacatggtatccagatgacatccatcaagaaacgaagatccccagatgatgaactgttatacttaccagtgaggggccgtgagacttatgaaatgctgttgaagatcaaagagtccctggaactcatgcagtaccttcctcagcacacaattgaaacgtacaggcaacagcaacagcagcagcaccagcacttacttcagaaacagacctcaatacagtctccatcttcatatggtaacagctccccacctctgaacaaaatgaacagcatgaacaagctgccttctgtgagccagcttatcaaccctcagcagcgcaacgccctcactcctacaaccattcctgatggcatgggagccaacattcccatgatgggcacccacatgccaatggctggagacatgaatggactcagccccacccaggcactccctcccccactctccatgccatccacctcccagtgcacacccccacctccgtatcccacagattgcagcattgtcagtttcttagcgaggttgggctgttcatcatgtctggactatttcacgacccaggggctgaccaccatctatcagattgagcattactccatggatgatctggcaagtctgaaaatccctgagcaatttcgacatgcgatctggaagggcatcctggaccaccggcagctccacgaattctcctccccttctcatctcctgcggaccccaagcagtgcctctacagtcagtgtgggctccagtgagacccggggtgagcgtgttattgatgctgtgcgattcaccctccgccagaccatctctttcccaccccgagatgagtggaatgacttcaactttgacatggatgctcgccgcaataagcaacagcgcatcaaagaggagggggagtgagcctcaccatgtgagctcttcctatccctctcctaactgccagcyccctaaaagcactcctgcttaatcttcaaagccttctccctagctcctccccttcctcttgtctgatttcttaggggaaggagaagtaagaggctacctcttacctaacatctgacctggcatctaattctgattctggctttaagccttcaaaactatagcttgcagaactgtagctgccatggctaggtagaagtgagcaaaaaagagttgggtgtctccttaagctgcagagatttctcattgacttttataaagcatgttcacccttatagtctaagactatatatataaatgtataaatatacagtatagatttttgggtggggggcattgagtattgtttaaaatgtaatttaaatgaaagaaaattgagttgcacttattgaccattttttaatttacttgttttggatggcttgtctatactccttcccttaaggggtatcatgtatggtgataggtatctagagcttaatgctacatgtgagtgacgatgatgtacagattctttcagttctttggattctaaatacatgccacatcaaacctttgagtagatccatttccattgcttattatgtaggtaagactgtagatatgtattcttttctcagtgttggtatattttatattactgacatttcttctagtgatgatggttcacgttggggtgatttaatccagttataagaagaagttcatgtccaaacgtcctctttagtttttggttgggaatgaggaaaattcttaaaaggcccatagcagccagttcaaaaacacccgacgtcatgtatttgagcatatcagtaacccccttaaatttaataccagataccttatcttacaatattgattgggaaaacatttgctgccattacagaggtattaaaactaaatttcactactagattgactaactcaaatacacatttgctactgttgtaagaattctgattgatttgattgggatgaatgccatctatctagttctaacagtgaagttttactgtctattaatattcagggtaaataggaatcattcagaaatgttgagtctgtactaaacagtaagatatctcaatgaaccataaattcaactttgtaaaaatcttttgaagcatagataatattgtttggtaaatgtttcttttgtttggtaaatgtttcttttaaagaccctcctattctataaaactctgcatgtagaggcttgtttacctttctctctctaaggtttacaataggagtggtgatttgaaaaatataaaattatgagattggttttcctgtggcataaattgcatcactgtatcattttcttttttaaccggtaagagtttcagtttgttggaaagtaactgtgagaacccagtttcccgtccatctcccttagggactacccatagacatgaaaggtccccacagagcaagagataagtctttcatggctgctgttgcttaaaccacttaaacgaagagttcccttgaaactttgggaaaacatgttaatgacaatattccagatctttcagaaatataacacatttttttgcatgcatgcaaatgagctctgaaatcttcccatgcattctggtcaagggctgtcattgcacataagcttccattttaattttaaagtgcaaaagggccagcgtggctctaaaaggtaatgtgtggattgcctctgaaaagtgtgtatatattttgtgtgaaattgcatactttgtattttgattattttttttttcttcttgggatagtgggatttccagaaccacacttgaaacctttttttatcgtttttgtattttcatgaaaataccatttagtaagaataccacatcaaataagaaataatgctacaattttaagaggggagggaagggaaagtttttttttattatttttttaaaattttgtatgttaaagagaatgagtccttgatttcaaagttttgttgtacttaaatggtaataagcactgtaaacttctgcaacaagcatgcagctttgcaaacccattaaggggaagaatgaaagctgttccttggtcctagtaagaagacaaactgcttcccttactttgctgagggtttgaataaacctaggacttccgagctatgtcagtactattcaggtaacactagggccttggaaattcctgtactgtgtctcatggatttggcactagccaaagcgaggcacccttactggcttacctcctcatggcagcctactctccttgagtgtatgagtagccagggtaaggggtaaaaggatagtaagcatagaaaccactagaaagtgggcttaatggagttcttgtggcctcagctcaatgcagttagctgaagaattgaaaagtttttgtttggagacgtttataaacagaaatggaaagcagagttttcattaaatccttttaccttttttttttcttggtaatcccctaaaataacagtatgtgggatattgaatgttaaagggatattttttttctattatttttataattgtacaaaattaagcaaatgttaaaagttttatatgctttattaatgttttcaaaaggtattatacatgtgatacattttttaagcttcagttgcttgtcttctggtactttctgttatgggcttttggggagccagaagccaatctacaatctctttttgtttgccaggacatgcaataaaatttaaaaaataaataaaaactaattaagaaataaa

SEQ ID NO: 1577 - DNA, 1158 bp, Homo sapiens
  Genbank Accession No. Y18207
cacgaggccgcgggggcaaggcctggagctgtggttcgaatttgtgcaggcagcgggtgctggcttttagggtccgccgcctctctgcctaatgagctgcaccagaatgatccaggttttagatccacgtcctttgacaagttcggtcatgcccgtggatgtggccatgaggctttgcttggcacattcaccacctgtgaagagtttcctgggcccgtacgatgaatttcaacgacgacattttgtgaataaattaaagcccctgaaatcatgtctcaatataaaacacaaagccaaatcacagaatgactggaagtgctcacacaaccaagccaagaagcgcgttgtgtttgctgactccaagggcctctctctcactgcgatccatgtcttctccgacctcccagaagaaccagcgtgggatctgcagtttgatctcttggaccttaatgatatctcctctgccttaaaacaccacgaggagaaaaacttgattttagatttccctcaaccttcaaccgattacttaagtttccggagccactttcagaagaactttgtctgtctggagaactgctcattgcaagagcgaacagtgacagggactgttaaagtcaaaaatgtgagttttgagaagaaagttcagatccgtatcactttcgattcttggaaaaactacactgacgtagactgtgtctatatgaaaaatgtgtatggtggcacagatagtgataccttctcatttgccattgacttaccccctgtcattccaactgagcagaaaattgagttctgcatttcttaccatgctaatgggcaagtcttttgggacaacaatgatggtcagaattatagaattgttcatgttcaatggaagcctgatggggtgcagacacagatggcaccccaggactgtgcattccaccagacgtctcctaagacagagttagagtcaacaatctttggcagtccgaggctggctagtgggctcttcccagagtggcagagctgggggagaatggagaacttggcctcttatcgatgaattaagcaacaatgtaactggtcttgacttgtcatattcccccatgcaatcctaggtctgtattgctcaattttaggaagcctttgctactccatcagtaggtttagatttga

SEQ ID NO: 1578 - DNA, 4163 bp, Homo sapiens
  Genbank Accession No. Z24680
ttgatttggtatagtgggaacatttgctttggagacagatgaactggattctgatcgtgaccctgctattttctccttgtgtgactttggagccatgagaccccagatcctgctgctcctggccctgctgaccctaggcctggctgcacaacaccaagacaaagtgccctgtaagatggtggacaagaaggtctcgtgccaggttctgggcctgctccaggtcccctcggtgctcccgccagacactgagacccttgatctatctgggaaccagctgcggagtatcctggcctcacccctgggcttctacacggcacttcgtcacctggacctgagcaccaatgagatcagcttcctccagccaggagccttccaggccctgacccacctggagcacctcagcctggctcacaaccggctggcgatggccactgcgctgagtgctggtggcctgggccccctgccacgcgtgacctccctggacctgtctgggaacagcctgtacagcggcctgctggagcggctgctgggggaggcacccagcctgcataccctctcactggcggagaacagtctgactcgcctcacccgccacaccttccgggacatgcctgcgctggagcagcttgacctgcatagcaacgtgctgatggacatcgaggatggcgccttcgagggcctgccccgcctgacccatctcaacctctccaggaattccctcacctgcatctccgacttcagcctccagcagctgcgggtgctagacctgagctgcaacagcatcgaggcctttcagacggcctcccagccccaggctgagttccagctcacctggcttgacctgcgggagaacaaactgctccatttccccgacctggccgcgctcccgagactcatctacctgaacttgtccaacaacctcatccggctccccacagggccaccccaggacagcaagggcatccacgcaccttccgagggctggtcagccctgcccctctcagcccccagcgggaatgccagcggccgccccctttcccagctcttgaatctggatttgagctacaatgagattgagctcatccccgacagctttcttgagcacctgacctccctgtgcttcctgaacctcagcagaaactgcttgcggacctttgaggcccggcgcttaggctccctgccctgcctgatgctccttgacttaagccacaatgccctggagacactggaactgggcgccagagccctggggtctctgcggacgctgctcctacagggcaatgccctgcgggacctgcccccatacacctttgccaatctggccagcctgcagcggctcaacctgcaggggaaccgagtcagcccctgtggggggccagatgagcctggcccctccggctgtgtggccttctccggcatcacctccctccgcagcctgagcctggtggataatgagatagagctgctcagggcaggggccttcctccacaccccactgactgagctggacctttcttccaatcctgggctggaggtggccacgggggccttgggaggcctggaggcctccttggaggtcctggcactgcagggcaacgggctgatggtcctgcaggtggacctgccctgcttcatctgcctcaagcggctcaatcttgccgagaaccgcctgagccaccttcccgcctggacacaggctgtgtcactggaggtgctggacctgcgaaacaacagcttcagcctcctgccaggcagtgccatgggtggcctggagaccagcctccggcgcctctacctgcaggggaatccactcagctgctgcggcaatggctggctggcagcccagctgcaccagggccgtgtggacgtggacgccacccaggacctgatctgccgcttcagctcccaggaggaggtgtccctgagccacgtgcgtcccgaggactgtgagaaggggggactgaagaacatcaacctcatcatcatcctcaccttcatactggtctctgccatcctcctcaccacgctggccgcctgctgctgcgtccgccggcagaagtttaaccaacagtataaagcctaaagaagccgggagacactctaggtcagtgggggagcctgaggtacagagaagagtgaggactgactcaaggtcacacagtgatccggatcccagaactctggtctccaaattacagcccaggacacctttctctgccgcctgctgcatcagtgggtgacccccttcccgggctgcactttgggtccagctgtggaagccagaagttgggcggtttcagggacagccgagaataatgttgacctgtcagatcaacaaatcttcactgagcatgtattttgtgccacaccctgctctgggcactgggaatgctgggaaatgagatacattcccgccctcaagaatctcccagtctggtaggagagagtgctgcagagccacgtggccgccacgcagtgtgcttagggcctgaggtgtgaaagcccagggctccagagctcggcaggccccgctggtttggtgcggtgagtcctgccccggctgtgcagggtgagggagggccaagccaggaggatttgtctgagacatttccaagcagactgtttgtcacgtcttctgagaatgactttcagtctctctgaaaatgaaaagcttaggaccggaagagagaattggagctgtacgagtgtgtctcggatctggtattgttaggtgggccacggcggctccagcagggtctggttaaggggtccagcccagcactggaccattccgtctcctgctctggacttgccctctcccttcctggcactctcatgttgcataccctgaccccagtgctgctctaagcaccgtccctgcccagccccacttctccatcgcagccccaccttggctgctgagccaggagctaaaaccttagatatctggttctgttttgcacccagcttggcagatgtggatttgaatccaagccttgtgtctgcccctatgtgacagctctatattttatccccgttttataaaagaggaaactgaagttctgaaaatctccttccagggccccagctaactaatgccataggtgagattcaaaccttcatccttctgtctccagggcctgatctttaccactgcaggggctgcaggccgttaagtggacaggaagtggccccacatagcccgagcagggtctggaagcatcctgtgctgtgcacacctgctctctcctctctcccaggcaggcagctgcaggcgctctcctccttctctgcctgtttccctcctcccttcctttccaccctggtgtgggttctcctgttctctctgtgctcttgcattctctcattcccttttcctctatggagcagagcctggagtttgagactatggaatccaacctccccattgcacagatggggaaactgaggcttaggaagagaatgaaacttgtggagagcttatacagaacctctgggggaaaaaagagcccttatttgtggggtgagattgggggttggaccagagtgatgtcctctctcagctatcacatcacaagataatgctggctccaaacttcctttctgtgcctcatcatgcaaggatcttttttccctcttacaaaaacaggtaaaaagcctcacccagatgacccccatccctcataccatggagtcatgagctgtctgggaagaatggacgtgctgggaccaactcaagaccttgttttgctgtcttcatcatcttacctgtgcttggcccacagtctggctcatgatgtgggctcagtaatgtgcgagaaagtgaaaatgccactctctccaccccattttacagaggagaacaccaaggcccagaggaagttaagggagagtcaatgggcagagccagggctaggccctggtggtgtgtggagcacccaggcagacccagtcctggttgggatcacacccacgggtgctactgcacgtaacactcctccttaggcctggaggccaaggtgtgggtccccacgcctgatctttgaaaacactacacagggctgctgtcacttcccagggcccaggcctcagcccaggcctcgggaccaactctttgtataacctacctgaatgtattaaaaactaattttggaaaaaaaaaa

SEQ ID NO: 1579 - DNA, 2680 bp, Homo sapiens
  Genbank Accession No. Z34974
ggggtggtgcagggcaggggtggtatatcctgtctgacggagggcgggcctcgccagtgccagagagggacgaaccagggtggaagcgccaggagcagctgcagggagccctcacgcggacctcgcactctatggccgtagggagccgctgagagcgagaagagcacgctcctgcccgcccgctgcaccgcacctcgcctcgcctctctgctctcctaggccccggccgcgcgccacccgcctcccgccaccatgaaccactcgccgctcaagaccgccttggcgtacgaatgcttccaggaccaggacaactccacgttggctttgccgtcggaccaaaagatgaaaacaggcacgtctggcaggcagcgcgtgcaggagcaggtgatgatgaccgtcaagcggcagaagtccaagtcttcccagtcgtccaccctgagccactccaatcgaggttccatgtatgatggcttggctgacaattacaactatgggaccaccagcaggagcagctactactccaagttccaggcagggaatggctcatggggatatccgatctacaatggaaccctcaagcgggagcctgacaacaggcgcttcagctcctacagccagatggagaactggagccggcactacccccggggcagctgtaacaccaccggcgcaggcagcgacatctgcttcatgcagaaaatcaaggcgagccgcagtgagcccgacctctactgtgacccacggggcaccctgcgcaagggcacgctgggcagcaagggccagaagaccacccagaaccgctacagcttttacagcacctgcagtggtcagaaggccataaagaagtgccctgtgcgcccgccctcttgtgcctccaagcaggaccctgtgtatatcccgcccatctcctgcaacaaggacctgtcctttggccactctagggccagctccaagatctgcagtgaggacatcgagtgcagtgggctgaccatccccaaggctgtgcagtacctgagctcccaggatgagaagtaccaggccattggggcctattacatccagcatacctgcttccaggatgaatctgccaagcaacaggtctatcagctgggaggcatctgcaagctggtggacctcctccgcagccccaaccagaacgtccagcaggccgcggcaggggccctgcgcaacctggtgttcaggagcaccaccaacaagctggagacccggaggcagaatgggatccgcgaggcagtcagcctcctgaggagaaccgggaacgccgagatccagaagcagctgactgggctgctctggaacctgtcttccactgacgagctgaaggaggaactcattgccgacgccctgcctgttctggccgaccgcgtcatcattcccttctctggctggtgcgatggcaatagcaacatgtcccgggaagtggtggaccctgaggtcttcttcaatgccacaggctgcttgaggaacctgagctcggccgatgcaggccgccagaccatgcgtaactactcagggctcattgattccctcatggcctatgtccagaactgtgtagcggccagccgctgtgacgacaagtctgtggaaaactgcatgtgtgttctgcacaacctctcctaccgcctggacgccgaggtgcccacccgctaccgccagctggagtataacgcccgcaacgcctacaccgagaagtcctccactggctgcttcagcaacaagagcgacaagatgatgaacaacaactatgactgccccctgcctgaggaagagaccaaccccaagggcagcggctggttgtaccattcagatgccatccgcacctacctgaacctcatgggcaagagcaagaaagatgctaccctggaggcctgtgctggtgccctgcagaacctgacagccagcaaggggctgatgtccagtggcatgagccagttgattgggctgaaggaaaagggcctgccacaaattgcccgcctcctgcaatctggcaactctgatgtggtgcggtccggagcctccctcctgagcaacatgtcccgccaccctctgctgcacagagtgatggggaaccaggtgttcccggaggtgaccaggctcctcaccagccacactggcaataccagcaactccgaagacatcttgtcctcggcctgctacactgtgaggaacctgatggcctcgcagccacaactggccaagcagtacttctccagcagcatgctcaacaacatcatcaacctgtgccgaagcagtgcctcacccaaggccgcagaagctgcccggcttctcctgtctgacatgtggtccagcaaggaactgcagggtgtcctcagacagcaaggtttcgataggaacatgctgggaaccttagctggggccaacagcctcaggaacttcacctcccgattctaagaagagactgtccaagcaagttaggcttgcaggaagatatgacccagctgagaagccctcaggcctcgctggatggggttttctgtccatcctgtgcagtatttgggaaagttcacaagaaactgagaagaaacctaaaaactgtggatagtggaaagatttttagattttttttttccttggggaaactggcaggcaatgggggttagggaggttggggcggggggggctttcttgagttaaaggg

SEQ ID NO: 1580 - DNA, 7000 bp, Homo sapiens
  Genbank Accession No. Z37976
aagaactgatccccccggtaatgagggggctgagctgtccctccgaggagggggcctggtgtggataaaagagacgaaaaagccgggggaggtttccaaaaataaaaccgtccgggtccccttcagacggctgcaggcacagggaggaggcgcgaaggtgcagcagccgtgcgagcccagctggagtaggagcgcggactcgaggctcggggcgcgcagccctcgttccgccgagagccgggcccccagtcggccgcttcagggccccctagactcagagaagctggccgccgggcggggccgggagaacagcccgcgggcgtccagcgtgccgaccacaaagctcttcgcggtgcccgcgcgcaccactctccagccgccccgcgccatgaggccgcggaccaaagcccgcagcccggggcgcgccctgcggaacccctggagaggcttcctgccgctcaccctggctctcttcgtgggcgcgggtcatgcccaaagggaccccgtagggagatacgagccggctggtggagacgcgaatcgactgcggcgccctgggggcagctacccggcagcggctgcagccaaggtgtacagtctgttccgggagcaggacgcgcctgtcgcgggcttgcagcccgtggagcgggcccagccgggctgggggagccccaggaggcccaccgaggcggaggccaggaggccgtcccgcgcgcagcagtcgcggcgtgtccagccacctgcgcagacccggagaagcactcccctgggccagcagcaaccagcaccccggacccgggccgcgccggctctcccacgcctggggaccccacagcggtctggggctgcgcccccaaccccgccgcgagggcggctcacggggaggaacgtctgcgggggacagtgctgcccaggatggacaacagcaaacagcaccaaccactgtatcaaacccgtttgcgagccgccgtgccagaaccggggctcctgcagccgcccgcagctctgtgtctgccgctctggtttccgtggagcccgctgcgaggaggtcattcccgatgaggaatttgacccccagaactccaggctggcacctcgacgctgggccgagcgttcacccaacctgcgcaggagcagtgcggctggagagggcaccttggccagagcacagccgccagcaccacagtcgccgcccgcaccacagtcgccaccagctgggaccctgagtggcctcagccagacccacccttcccagcagcacgtggggttgtcccgcactgtccgacttcacccgactgccacggccagtagccagctctcttccaacgccctgcccccgggaccaggccttgagcagagagatggcacccaacaggcggtacctctggagcacccctcatccccctgggggctgaacctcacggagaaaatcaagaagatcaagatcgtcttcactcccaccatctgcaagcagacctgtgcccgtggacactgtgccaacagctgtgagaggggcgacaccaccaccctgtacagccagggcggccatgggcacgatcccaagtctggcttccgcatctatttctgccagatcccctgcctgaacggaggccgctgcatcggcagggacgaatgctggtgccccgccaactccaccgggaagttctgccacctgcctatcccgcagccggacagggagcctccagggagggggtcccgccccagggccttgctggaagccccactgaagcagtccactttcacactgccgctctccaaccagctggcctccgtgaacccctccctggtgaaggtgcacattcaccacccacccgaggcctcagtgcagatccaccaggtggcccaggtgcggggcggggtggaggaggccctagtggagaacagcgtggagaccagacccccgccctggctgcctgccagccctggccacagcctctgggacagcaacaacatccctgctcggtctggagagccccctcggccactgcccccagcagcacccaggcctcgaggactgctgggccggtgttacctgaacactgtgaacggacagtgtgccaaccctctgctggagctgactacccaggaggactgctgtggcagtgtgggagccttctggggggtgactttgtgtgccccatgcccacccagaccagcctccccggtgattgagaatggccagctggagtgtcctcaggggtacaagagactgaacctcactcactgccaagatatcaacgagtgcttgaccctgggcctgtgcaaggacgcggagtgtgtgaataccaggggcagctacctgtgcacatgcagacctggcctcatgctggatccatcgcggagccgctgtgtgtcggacaaggcaatctccatgctgcagggactgtgctaccggtcgctggggcccggcacctgcaccctgcctttggcccagcggatcaccaagcagatatgctgctgcagccgcgtgggcaaagcatggggcagcgagtgtgagaaatgccctctgcctggcacagaggccttcagagagatctgccctgccggccacggctacacctacgcgagctccgacatccgcctgtccatgaggaaagccgaggaggaggaactggcaaggcccccaagggagcaagggcagaggagcagcggggcactgcccgggccagcagagaggcagcccctccgggtcgtcacggacacctggcttgaggccgggaccatccctgacaagggtgactctcaggctggccaggtcacgaccagtgtcacccatgcacctgcctgggtcacagggaatgccacaaccccaccaatgcctgaacaggggattgcagagatacaggaagaacaagtgaccccctccaccgatgtgctggtgaccctgagcaccccaggcattgacagatgcgctgctggagccaccaacgtctgtggccctggaacctgcgtgaacctccccgatggatacagatgtgtctgcagccctggctaccagctgcaccccagccaggcctactgcacagatgacaacgagtgtctgagggacccctgtcaaggaaaagggcgctgcatcaaccgcgtggggtcctactcctgcttctgctaccctggctacactctggccacctcaggggcgacacaggagtgtcaagatatcaatgagtgtgagcagccaggggtgtgcagcggggggcagtgcaccaacaccgagggctcgtaccactgcgagtgtgatcagggctacatcatggtcaggaaaggacactgccaagatatcaacgaatgccgtcaccccggtacctgccctgatgggagatgcgtcaattcccctggctcctacacttgtctggcctgtgaggagggctaccggggccagagtgggagctgtgtagatgtgaatgagtgtctgactcccggggtctgtgcccatggaaagtgcaccaacctagaaggctccttcagatgctcttgtgagcagggctatgaggtcacctcagatgagaagggctgccaagatgtggatgagtgtgccagccgggcctcatgccccacaggcctctgcctcaacacggagggctccttcgcctgctctgcctgtgagaacgggtactgggtgaatgaagacggcactgcctgtgaagacctagatgagtgtgccttcccgggagtctgcccctccggagtctgcaccaacacggctggctccttctcctgcaaggactgcgatgggggctaccggcccagccccctgggtgactcctgtgaagatgtggatgaatgtgaagacccccagagcagctgcctgggaggcgagtgcaagaacactgtgggctcctaccagtgcctctgtccccagggcttccagctggccaatggcaccgtgtgtgaggatgtgaatgagtgcatgggggaggagcactgcgcaccccacggcgagtgcctcaacagccacgggtctttcttctgtctgtgcgcgcctggcttcgtcagcgcagaggggggcaccagctgccaggatgtggacgagtgtgccaccacagacccgtgtgtgggagggcactgtgtcaacaccgagggctccttcaactgtctatgtgagactggcttccagccctccccagagagtggagagtgtgtggatattgacgagtgtgaggactatggagacccggtgtgtggcacctggaagtgtgaaaacagccctggctcctaccgctgtgttctgggctgccagcctggcttccacatggccccgaacggagactgcattgacatagacgagtgcgccaacgacaccatgtgtggcagccacggcttctgtgacaacactgatggctccttccgctgcctctgtgaccagggcttcgagatctctccctcaggctgggactgtgtggatgtgaacgagtgtgagcttatgctggcggtatgtggggccgcgctctgtgagaacgtggagggctccttcctgtgcctctgtgccagtgacctggaggagtacgatgcccaggaggggcactgccgcccacggggggctggaggtcagagtatgtctgaggccccaacgggggaccatgccccggcccccacccgcatggactgctactccgggcagaagggccatgcgccctgctccagtgtcctgggccggaacaccacacaggctgaatgctgctgcacccagggcgctacgtggggagatgcctgtgacctctgcccgtctgaggactcagctgaattcagcgagatctgccctagtggaaaaggctacattcctgtggaaggagcctggacgtttggacagaccatgtacacagatgcggatgagtgtgtgatattcgggcctggtctctgcccgaacggccggtgcctcaacaccgtgcctggttatgtctgcctgtgcaatcccggcttccactacgatgcttcccacaagaagtgtgaggatcacgatgagtgccaggacctggcctgtgagaatggcgagtgcgtcaacacggagggctccttccactgcttctgcagccccccgctcaccctggacctcagccagcagcgctgcatgaacagcaccagcagcacggaggacctccctgaccacgacatccacatggacatctgctggaaaaaagtcaccaatgatgtgtgcagcgaacccctgcgtgggcaccgcaccacctacacggaatgctgctgccaggacggcaaggcctggagccagcagtgtgctctgtgtcccccgaggagctctgaggtctatgctcagctgtgcaacgtggctcgcattgaggcagagcgggaggccggggtccacttccggccaggctatgagtatggccccgggcccgatgacctgcactacagcatctatggcccagatggggcccccttctacaactacctgggccccgaggacaccgtccctgagcctgccttccccaacacagccggtcactcagcggaccgcacacccatccttgagtctcctttgcagccctcagaactccagccccactacgtggccagccatccagagcccccagccggcttcgaagggcttcaggcggaggagtgcggcatcctgaacggctgtgagaatggccgctgtgtgcgcgtgcgggagggctacacctgtgactgttttgagggcttccagctggatgcggcccacatggcctgcgtagatgtgaatgagtgtgatgacttgaacgggcctgctgtgctctgtgtccatggttactgcgagaacacagagggctcctaccgctgccactgctccccgggatatgtggctgaggcagggcccccccactgcactgccaaggagtagcagtcaggggtcagtgtggcaactacctggaaatggcctccagtcacaggcaggggcctgaggatgatttcctagctgggaagacaccgtgacatcaggccagaggtttccaatcagccttgcctgctttcatctctcccagcttagcctctggctgtaagcttcggtcattgcctccatgcccttgcttggctcaagcaccaccaatcgctttaatgcttcagccaccgcatgaggccctgtccaccacctttcctggccttgctatgggatgcttaccaaaggatggccctcatccaccctcccaagctgtgcgagcatgcaaggccccatggctcacactgcagacacccctttccagccacaatccaccatcatcctgacgatcccacaactgggacagaggctacatctgccctagggaggtccttcagaatctgtggagcaagaaaggatttggggaagcttggggactgactccagagccccctcctaagaaccatcaccaccactcagccaatctgttctgggccctgattttgccacacctccatcctgtagcccattctctgaccccaaggagtggcagaagatcccttcactcagagaagcaaggctgatattagcttgttgaatgtaagagacacaaatgaagaagaacaaagagcctgagaaagcagcaagaggacatgatgaaaaatacgtggagttgatgagaaaggggagccaaggctttatacgtctaaagaaaatattcagtagctgaatccgcccagtgatagcctgtgggcaccacaggaagggctgccatgggatacagtacccatctacaaagacctctattacataaacactgcttcttacaggaaacaaacctcttctgggatctccttttgtgaaaaccagtttgatgtgctaaaagtaaaaagtctattttccagtgtggtcttgttcagaagcagccagatttccaatgttgtttttcccctccactcagaaacccctgccctttcccttcagaaaacgatggcaggcattcctctgagtttacaagcagagactcactccaacccaaactagctgggagttcagaaccatggtggaataaagaaatgtgcatctgctcgtgccgctcgtgccgaattc

SEQ ID NO: 1581 - DNA, 317 bp, Homo sapiens
  Genbank Accession No. Z41019
  unsure (1)..(317): n = a or c or g or t
ctccaagtgtgcaaaccccttattcagaatccataggcaatttattttccagtcaggacaagtttgaatggaaatttaattgggcccaggacagccataaattctatttactttttttttaaaccattaaatggaaaggcttctgttacaagtacttttcagaaaggcttaaagaatgtccagatagcatttncctatagtgtattttaagagcagaaacaggggtagacataaattatgtattaagctaaaacaaagcacaaaataataacacaaacatacttttgcacatcctcctttttcctggttagacttca

SEQ ID NO: 1582 - DNA, 251 bp, Homo sapiens
  Genbank Accession No. Z41561
  unsure (1)..(251): n = a or c or g or t
caaacaggtcatttgttttnattttatggatacaccaaaattttataatgagttgtgtttctatttnggctttatcttccagaaacttagaaccaaatatgcagtcctcttctagcaactgtatgagagcaggtggtaagcttctatttnatngcccttgttttccctngactccaaatcttctttcatccttttgtaggtatatnggtaggatactcaaattctctgtnacggtcctctttcagagtgtg

SEQ ID NO: 1583 - DNA, 1412 bp, Homo sapiens
  Genbank Accession No. Z50194
ctccttgggcgatcgcctgggtagaggagaggagtttccggggctcgggtccgggtcgccttccaggggaacgagcgcggaagcaagtgggcggcgagaggcggagcaagagacgctggagggcgtggacgcagcgggctttggaaaggccccaagttaatgaggcgtgcgccggctgccgagcgcctcttggagctgggctttcccccgcggtgcgggcgccaggagccgccttttccgctgggtgtcactcgggggtggggaagatggcccattcaaaagcgccgcgagggggcccggccagtgcccttcagtgagcgctcgcaagaggacggcagaggcccggcagctcggagctccgggaccttgtggcgcatcaggacgcggctgtccctctgccgggacccagagccgccgccgccgctctgcctcctgcgtgttagcctcctctgcgcgctccgggcaggcggccgtgggagccgctggggcgaggacggcgcgaggctgctgctgctgcccccggcccgcgcggctggaaacggagaggccgagccaagcggcggcccctcttatgctgggaggatgctggagagtagcggctgcaaagcgctgaaggagggcgtgctggagaagcgcagcgacgggttgttgcagctctggaagaaaaagtgttgcatcctcaccgaggaagggctgctgcttatcccgcccaagcagctgcaacaccagcagcagcagcaacagcagcagcagcagcagcaacaacagcccgggcaggggccggccgagccgtcccaacccagtggccccgctgtcgccagcctcgagccgccggtcaagctcaaggaactgcacttctccaacatgaagaccgtggactgtgtggagcgcaagggcaagtacatgtacttcactgtggtgatggcagagggcaaggagatcgactttcggtgcccgcaagaccagggctggaacgccgagatcacgctgcagatggtgcagtacaagaatcgtcaggccatcctggcggtcaaatccacgcggcagaagcagcagcacctggtccagcagcagcccccctcgcagccgcagccgcagccgcagctccagccccaaccccagcctcagcctcagccgcaaccccagccccaatcacaaccccagcctcagccccaacccaagcctcagccccagcagctccacccgtatccgcatccacatccacatccacactctcatcctcactcgcacccacaccctcacccgcacccgcatccgcaccaaataccgcacccacacccacagccgcactcgcagccgcacgggcaccggcttctccgcagcacctccaactctgcctgaaaggggcagctcccgggcaagacaaggttttgaggacttgaggaagtggg

SEQ ID NO: 1584 - DNA, 36296 bp, Homo sapiens
  Genbank Accession No. Z82180
gatcacacattcacaatgtcagaaatgtccccaacaacagacacttggcaatttggaattaataaacccagcttcagagaatccctgtttcccagtcactgtttctcaactttcctacactgccaccaagtatgagccagcgtctatccctctcacattcctcaccccattaatagactccctgtttttcttgtatctcgttaatttctggtatgtttcctaggacctgaaaacataaccaactgtctttcatcttaaaaaaaaaaactcccccttccctcaccccaatcaagtatccaccttaggcttccataccatctctttctcctctttctaatcaagcttttccaaaaagctgtcttcatattcccatttcctattcactcctctctctatttattatgacctggctttagaatggtcttccgccagcatcacagaggagctccacatcacataaccagatggattcacccctgccttgacctctcagacacaacaccagcaccatggccactcctagagccttaaaagtctctccatttttatgcctcccaccacactctgctttctccttcccgctctgactttcccttctctgttcccctcctggcctcccgagcacctcagccaggcccttaggcaccagtgtcctcaggggtctccagggctcctcttctcatcccggtctacgtgctctgctttcaagtttgcaggctctctcaggttttacctaaaggttttcctaagtaagtgttcttcccccaaacctaagagctatgaattcaatgacctatagaacctctttccttgtatgttccagagacgagatacctcaagctccacgtgccagaatgtgactctttggccaccccccagccccctatcccctactcccagtgactttgtctcttgtaagaggccttgccctaggccactggttctgctaaggccagagaaatgcccacacacatggttgcttatgggaaggggtcatctgagccaaaaatggggaatagaggcagctgcatgccttgagccacacttgcagaatctgcctgtccaggcctctcttgttctcagtggtgacctgtctgcctcctgttcctgggtcttcctctttctgtgactgagacaccctcccccactgcccggctggaggctcagctccatcctcagctccaggaccagccctgacccggggaaggaggggttcacagggtcacagttgtgcctatacttccttgaacctctgtcctcatccctgggcccacccttgcttctgagagctgggccaccctgtgtggcctctgacaactgagttcctgccttcttccccatgctggagtttgttctacaaagctcagattggagaccttgttgttcttgattacaacttacttctctgtttccctacctctacagatgtggtttctagacagttttcaattatattgatgagtaaaaaatttttaaaaacagaaagaaaaatacaactttatttttaaataaaaaagaaaatatcatttactatcaacatcattttctactttaaaaaaaagacattttattttattttattttattttattttactttattttattttttgttttttgagacagagtctcactctgttgcccaggctggagtgcagtggcatgatctcagctcaccacaacctccccctcccaggttcaagcaattctcgtgcctcagcatcccgagtagctgggattacaggtgtgtgccaccacgcgcagctaatttttgtatttttagtagagatagggtttcaccatgttggccaggctggtaaaaagggacattttaatacaaacgaagtaatcaaagaattctgatctcagcgcgcaggatggcccttttcaaacagaggcagctggccattttccttgccttcattttccagggttttctcctcccatgaatgggcagtgaaagcttcatcctggaccaatcctgctccacgatggctttggggacctgccttgccccagtgttttgtctgcaggcctggcaactttgaccatgagaggcagactccctctgactggaggctgacaagtggaaactattgggattattcccagtggccttacatgggggcggctcagcttggtgaattctcaggcatgatccaaatctgcctcccaggcccagaacatcattctctgggatcccggggctgcctgggctctaggaagccattctctgctgctcctggtgtgcccctagggctggctgaggttgggaaggcctcccctcgctggaacagaggacaaagtgattcatcttgatccccgtgaaatggttgtgcaaccccaagagcctgagattcatcaaagaacgtgtctctttatttcctgttcattacattgccaggcacaatccagacaagacatcccagcactgcttccagacctctgcttgaaggtgggattcttcaatctcctggacattcttagagtctggctttacaccacgtctcctttgcacgatggcaacaccagcagtatctgcccatgtgcaagagagcctctgcaacagcccaatggagaaatggaggagtttccaggcccacgtgacactgaatcacaattgtcttttaccgcttgggatgatgatgccatcacttttctctaatttttttttttttttttgaggcagcctcactgtcacccaggctggagtgtagtggcgtgatcttggcttactgaaacctccacctcccgggttcaagtgattctcctgcctcagcctcctgagtagctgggattatgcctactatatctccagcctacaggtgtgcgccaccacgcccagctaatttttatattttcagtagagacagggtttcaccaagttggccaggctggtcttgaactcctggcctcaagtgatccgcctgccttggcctcccaaagtgcttggattacaggcgtgagccactgtgctcggccactttcctctgatttttaagtgaagtatatacatacatacatacacagcaggcaagtggaattccaagcacagagggcttttcagcataattctgagaaggcaactttgagcaaataacttgcagacattatacaattctttcttgttaaagtcaaggcaagcttttctgggaaggggcatgaagaccttgacatagtctgcttagttttatttatttatttatttatttatttatttagagacggaatctcgttctgtcacccaggctggagtgcagtagcgcgatctcagctcactgcaacctccgcctccccggttccaggttcaaggaattctccagcctcagcctcccgagtagctgggattacaggccatagtctgctttaaaaataataataataataataaaagacaacagtgaagaagaaagaaagaatgattccctcttcgcacaagaagaaagttctgatgcttttggtatcatggggtcttaggttcaatgtgtagtgagagctaactaagacaatttttatttgttcctctgaacacttctgtattcctatgactacgtcatgcttttccagttgctataacttatggagtgttttgatatttggcatcctcactcattagtcttccttttcaacattttattggacacgattacgctattattcctccaaattattgttagaatcaatttatcaagtcataaaaatgtcctcttagaatttttattggaattgcgctaaatttaattcttaatttgggaagatctgacagttttgacaactttgtaatactggctcttttgatccaataattatggatttccacttattttgggaattttacttcagcaaattttaaaagctttttcctaggttcttattagattcatctccaggattttaagatttcagtgccagcctaccttctctctctctctcttccaccttcctcccacctctctctctttctttcttttcttttccttccttccttcttcccctcctcctactcctcttcttccttccttcctttctttctttttttttctttctttctttctctttccttctttttccttccttcctttttcttgcttgcttgcttgctttcttcattttcctcttttgtggccaatatcttcccaacctatcttattgcaaatgattattattagtgcaaagaaaagctacggatgtttgtgtaatgagtttatacccagctccttctcgaagtcttgttcgttgaataattcttatttaaatcttacatgctttctagacatacaagcctatcttcttcaaattatgagctttgtctcttatttttaatagttattttacatattattcctattcaatcacaattgccagaaagttcaaaactatgttgacaaattcctggtgttgcacacacctgtcttcagagagattgcatagagaatgccaaatgcttcaccattcgagagacttagcatcgcttcctgaaaagtcatcttgatcctactaaaaaaatattctactcatgacagcaggcattcacctctcaagggtctatgtccagggaaatgtttctgcctccatctccaagtggccatgtgaggcgttttaataaaatgagcctccgactaagaccacaccagaaggctcctgtggttgggcaccagtggcaggtgacagagagctccaaccaaaatgcccttaaagttctcctcagcttggtttgacttcagatggcttctcattgagtctaggccctgacctcccttattttagagcatcttctttagaaaatttgtcattgaaaatgatttctctgtccctttgagatgttggtaaatcttttcaaaagcctcttgctggccaggcacagtggctcacacctgtaattccagtacttcgggaggccgaggcgggtggatcacctgaggtcaggagtttgagatcagcctggccaacatggtgaaaccccgtctctactaaaaacacaaaaattagccgggcatagtggtacatgtctgtaatcccagctactcaggaggctgaagcaggagaattgcttgaacccaggaggtgaggcagagattagccgtgagccaagattgcaccactgcactccagcctgggcaacagagcaagactccgcctcaaattaaaaaaaaaaaaaaaaaagaagaagttcaaggctacagtaagctgtgatcacaccactgctctccagcctgagtaacacagcaaatccctgtcactaaaaaataaaaagggaaaaagaaaaataaataaaaagaattgttttacacttagatttcaagatttaaaaagctgtcaaataccatatattcaaaaattctggtatcgtaaaaagagaacagtagagatctcttaatgctgcaattatccactgaggtttcacagtttatgaatatcatgcttttttgtagaaatctgctaagcttactgttgaatcatttatgtacactgactaatttttgagccatcatcaattttcatgaattatgtaatttagcctcagcaatgtatcacatgcatttgaaataattaaacttttcaaagagacttaatacatgcaacaatgagtaaattaacgcttttattaacatcagcagagttcttttttttttttttttttctgggagacaggagtttaagttcaggtaaagcgacactcttggctttgaggcttttctctagctttaaactctagcctgcaactgtttctgattagcagctaggtgaccttcgttgtacaaagaggcatcatcctcttgatcttgggttttctttctaaagggccttgtgtgttttcatcccacattttaagatataatagctgcattgaacgaattgggggatattccttccatctttatctttccattggtattatttaaataacatgaggattatctgttacttaaaaagtaatctgccttgtaagaacttaacatcttaaatgagcttaaaaacaaaagagcttgcctgttaaactgtctaggcctgatgcatttataagtgattattaaatacacttctccactttttctataattattctattctttagtattttaccatttaaaaggagacttcttgctttctgaaaacactctttctttttctacatgtctgctggcattcacctctcaaggttctgtgtcccaggcaaatgccactccaagatgccaggcctgtctctgccttcagtcaacttccacgtgggtttccaaagcttagtattaaattgggtatcaggttaaaataaacatcagaaacattctcatcttttttctttctcactagcatttctacttccttttgttttgtttgtttgtttgtttgtttgtttaagaaatagggtattgctctgtcacccaggctggagtacaaaagcatgatcatggctcactgcagccttgacctcccgggctcgagcaatcctcccatctcagcctcctgggtagttgatactacaggtacacgtcaccaagcctgactatttatttgttttttggggggttttctttgttgtagagacagagtctcactatgttgcctaggttggtcttgaactcctgggttcaagcgatctgcctaccttggcctcccaaagtgctggattacaggcgtgagccaacgtgctcagcctctatttcccgttgaactggttttggtaagatattttacaggctaactgtgtatttcatctagcagccagcaagcgtttgcacatcgttataaattatgtcttgttataaacttgttctaacaacaattcactctgagcaggcattccgcatgctcattacataatatttttgtctctgtgcagctgcacatctgcaccgtagtgtagctccctgtccccgggtgaccgattggaactaggtttctccatccccaataggcctcactgtgtctcatcacaccaaagtatttttaaaaaggcttaatgaagacagcatcctctgtatcatcccccgggaaggctgagcaggttgcgcaccataaatacacttcaacgttcctatctgcctaagccttgaatcccctcctctatgatatagcaaggtaaatgcctgcatcctgactgcatttaatggaccacgggccctgggttggggttgcagcacccagtgagctatgagagcagcccccagctgctccgtctgacagattgaagccaggctctccagccagcgcttccagcttcatcagttctgtttgttcaacgttatgttccttctgccctggtctcgcagcctgaaattcattccttcacgtattcctcaggattctgacattataaattggcaaaggtcttgcaattgtttgaatgcctcctcccagatcagctttggtcgtcattacccgagggtctgccaggatgttatggttctgaaaataataaaaggtgggagtaaaatcaacagtcccttcagggcagcagcctcaggtgagttaattaaagtcttgaggcaaaagaagattgatctccagtagggaaaagagctgctattgatgactagggagatgaagtctggggttcaaggtattcagatttatcaaaatctgcccaaatttccacttctaattcttagagtctctctccttcccaattaatcccttgttacagaagagatctagcaaggtcatgaattaaatttgtattttattttacttggagtttggtttttagaaatcctggccctgcctgtaatcccagcactttgggagatcacggtgagaggatcacttgagcctaggagctcaagaccagcctgggcaacacagggagaccctcatctctacaaaaaatttttcagattagccaggtttggtggtgcgcacctggagatcccagccacttgggaagctgagatggaaggatcgtttgagcctgggaggtaaaggctgcagtgagctgtgatcacgccactatactccaaaaaaaaagagagagagactgagagagagagatagagaaaagaaatcttggccctgtgaccataagaaataaggagttctttcagagtaatctaataattctctggtggtctatctctgccttcagctggaaatttacagtcctaaatttgtctctttatttttcctccactttttccagtatggtcagaaaaatcccgccggttctacaagaagaatctaatataagaatcttatattgcaatagctacttgatgtcccaaggccttgcttgccataggcagttgaccccaggcaattacagatgctaatttaggtaactgatttgtcaaagcatgtcatgaacggctagtgtctcactttctactggcaatgaagtcactgtggccttcaaatctaaaaagatgaaaagaacaattccagattcctatattcaaatatttggtctccaaaaaccccttttaaaaccaaaacaactgtggaaagagcatgcagagcaaaagccagagaagccgccagtgggtgggagaagctgccactaatgggcaaggatggctttcaagagctcccaagggaggggctgggcatctcacttgccccacacttggctactggcaccttcagaagacagtgtcctctccttctctcctgtcttctagatctttctctagagcctctcactggggaacaaagctagaaccacacaaggggcttctgggaagtctctgccatccagaggaaaccttcaaagggaatggtggtgacaggggattgacacggacaatcctgtatatcgagatggtttctcttatagctgttctgctttgaagactccaacagacctacaccctctgaatgctaacagtagtcttaaaagtgtcatggaaggccgggcacggtggctcacgcctgtaatcccagcactttgggaggccgaggctggtagatcacctgaggtcaggagttcgagaccagcctggccaacatgttgaacccccgtctctactaagactacaaaaaattagccgggggtggtggcaggtggctgtaatctcaggtactcaggaggctgaggcagaagaatcgcttgaacctgggaggtggaggttgcagcgagccgagatcgtgccactgcactccagcctggcaacagagcaagactctgtctcaaaaaaaaaaagtgtcatggaaggactttggctcttccccacaatggccacttggaccctggactagggcagacagcaacgaaaaccgaagaaggaatggaaagaggataaaaaataatatatttttatttttattttatttatttatgtatttatttttgagatgaagtcttgctatgtcacctaggctggagtgcagtggcgggatctcggctcactgcaacctctgcctccagggttcaagcgattctcctacctcagcctctcgagcagctgagattacaggcatctgccaccacacgtggctaatttttttttttttttttttgagatggagtctggctctgttgcccaggctggagtgcagtggcgtgatctcggctcactgcaagctctgcctcccgggttcacgccattctcctgcctcagcctcccaagtagctgggactacaggcacccaccaccacacctggctaattttttgtacttttagtagagacggagtttcaccttgttagccaggatggtcttgatctcctgacctcgtgacccacccacctcagcctcccaaagtgctgggattacaggcgtgagccactgcgcccggccaacacctggctaattttttttgtatttttagtagagactgggtttcaccatattggtcaggctggtctcaaactcctgacctcaaatgatccgctgaaatgatctaccatttgggtctcccaaatgtgctgggattacaggtgtgagccaccgtgcctggccaaaagtaatatattttttaaaacctggcaggaggaatttgcctatctgagatatagactataagggctgacggtgcctgtgaggagaacgaagatgcccttttgctctggaggactgtattttcagagctgtcaaatagcgtgttccctctgtttgtttctctctctctgaatccccttcccaaggttgcaagcataatcaaggccctccagagcaaaggtgctcgatttcactaataaagcaatgcaaaatgaaacaactgtgtgatcctattagacctctcatatcactgaaaataaagcaagtgacagcaaaagtccatgagaagaggaggaaacgggcatgctcactctcactcatgacagtgcaaattcgtgtgtttctggaaggcaatttgttaacttacacgataacattttaactaaacatgccctattactctcagaaacctagcccacggaaatactgaaactgcctttgcagaatggctcacacccgtgatcccagcactttgggaggcggaggcaggcggatcacgaggtcaggagttgaagaccagcctggccaagatggtgaaaccccgtctctactgaaaatacaaaaattagccgggcgtggtggcaggcgcctgtaatcccagctactcgggaggctgaggcagagaattgcttgaacctgggaggcggaggttccagtgaaccgagatggcaccattgcactccagcctgggcagcaagagtgaaacaccatctcaaaataaataaataaataaataaatacaaaaattagctgggcgtggtggtgcatgcctgtagtcccagctactggagaggctgaggcgggagaatcgcttgaacctgtgagacggaggttgcagtgagcccagatcacgccactgcactctagcctggtgacagagcaagactccatctaaaaaaaataataaataataataataataataataattacaagtaatgaattagagaaaactaatgtgactgactccgtcttgcttctaacctcacaggctaaattgcttttttgcttattttagtgcagagttcaagaaactatgagaggaatttagtttatagctaaacttacaggcaaggaaaactgattccccccaccactcctctccttgtccaaagactgaagctgcattcataagacaagggtagaattaaggtagaggcttgaactttgctaaggaataggcagaattaaacaatgactgcccagtgcttagcttgtttttctataatttgcttactgtccagagtcacttaactgggggttaagtggcaagatttataattcccccaactactcctatagatgacatcactattgtgaaatctaaaaaaactggtctttgagatatttttcagatttagcattttgataaaccaacagataccactttgttctgagactgcccacccccaccacaacccaccccaactcccaggaactgattcagctgcgtgaaggcagatttatttatttatttatttattgagacggagtcttctccacccgggctggagtgcagtggtacaatctcagctcactgcaacctctgccccctaggttcaagggattctcctgcctcagcctcctgagtagctgggattacaggcacgcaccaccacacctagctaatttttgtattttcagtagagacggggtttctctatgttggccacgctggtctcgaactcctgacctcaagtgatccgcccacctcagcctccaaagtgctgggattacaggcatgagccatcgtgcccggccagatttagatgcccctgtgatttcatctccagtcaatcaacggttccagttccccaaccccctgcccaccaaagtacccttaaaaaaaaccctagcctctgaattctcagggaaatgggtttgaaaaatttctccctgttccccttgcttggcaggccctgtgattattaaactctttctaggtggcaacacctcccgttctcattggtttcttctagggcagcgggcaagaagaatccattgagctgtgacgattctgacatgagcatgaaaagatgtgtccaaggatgctccgtgggtgtggtttgtaatagtcccaaggtggaaatatctgaagctcccatcagtgggcatctggttagtgtagcaatatgataagggggactttcaagactccaaattcagataaagagtcatcaaagagcccacatctgcagagaaccataaacagtgggggtcagatgccctctcagggttctgcaaccccacatcctcactaacacactctggccctcctctgggccagggagacctgggctagagagagagggaagaagtgtcagagaggtgagtgcttggccaggtaagaaaaactgtggcttttccttcccccttaccgtgaagaaggagctggggtgagctcctctgccccaagccaggtgaggatatctcccagaggagcaatggtagagcctggcggtcttcactaaggggagactcacattttgttccccagtgagaacaacccatcgtgcctgccggaccttgctgtgctctctgccttctgatagggaggagagggttggagggagaccacgggggatggaggctagtggggctgccacacttccaccccatgacgccacaggatgaaggagcttccaaaatgcacgtggaccccaaggaagggagtgaggcgtgagtggccacgcagagcccatccaagggggcagacaactgggtgagaacaccccagcaggccaaggctgtggggtgtgccctagaggagggcaggacccgaggcagtatggggagctgctgagccagtgcatctccctcacgggggcgctgtgcagtgtaggtgcccctatgggacacgcacacctcctccaagagcggcccccgcagcggagcagagctggccagaggagcactaagtaagccaggctgacagaggtgctggaaaagaggtccaagggggagctggaactgttacaggcattcaaaccagagtgactccattttgaacaggggctgggctactgggctgcgttcccaggaagtcaggcattgttagccacgggatgaaatagaaaaaaaaaagttagccaggtctggtggcgcacacctgtagtccccggaaggatcgcttgagcccaggagttcgaggcagcattgagctaagatctcgccattgcactcggcctgggtgaccgagtgagaccctgactctaaaataagtaaataaaaagaaccaaaaagtatctaattatggatgatttttactttcgtttagacgctattctctataataaaaaatgttgcatttgtaatcagaaaattaaaaaagaaagaaagaaagaaagaaagaaaactgttaaaactgaattggtagaagaatgggttagtgagacaatccctcgcagaatcttgtgctttgggaaatctccgtgccgtttgtagaaggattgcaccagtgacgcggtgacacccatctcctcccagccccgcctccttccttccggtccgctgctgaggcttggctcggcttgtgctgccacctacaggtcagcgacagacattacttcaaccccccttccgcaggggcagccgctcccagctgcagttttcccttttcattttaagcccttggatttcagagttgaggatggagatgtgtgggaacttccaatgtgaagtcaagataggggagagggcaagacagaatgagatagagaacacctgtgtgtgcatctgtacatgcagggcccagtgcaaaatgaagatgtgggggccccttgttcaaaaattattaagaatctcaatattgtaacagtagggcattaaatcaagtgcagcgccctctgagaatgagccgtctgggactgcacaggttataggctgcatgcccatgaagccgactggcaaccttgtatttggacttaagttagcaatgctttcgtatgctgtgcctaggtgtgtatgtgtacaaatatgtatatttgtgtgtgtgcatcatgtttgcgtgcacctgcttgtacaaacgtgcttagatgtctggtttttgtttcgttttgttttgttttctacacggagttttgctttttcacccaggctggagtgcagtggttcaatttcaatttgggctcagtgcaacctccacccctgggttcaagcgattctcttgcctcagcctcccgagtagctgggattacaggcacccgccaccatgcccagctaatttttgtatttttagtagagatggggtttcactatgttggccaggctggtctccaatccctgacctcaggcaatccacccacctcggcctcccaaagtgctaggattacaggtgtgagccaccacgcccggccttagatgtctgtgtgtaagttcatgtacagtgtgtttgtgtgtgtgtgtgtgtgtgtgcatatatgcatgtgagacagcaggtttctctgttccagggaaggacaggggcctcaggtttctcactccaaggctgctgaagaatagcaagaggggccgggcgcagtggctcatgcctgtaaacccgaggcaggcagatcatagggtcaggagatcgagaccatcctggccaacatggtgaagtcccctctctattaaaaatacaaaatttagccagatgtggtggcgggtgcctgtactcccagctactcgggaggctgaggcagaagaatcgcttgaacccaagaggtggaggttgcagtgagccgagatcatgccattgcactccagcctggtgaaagaacaagactttgtctcaaaaaagaaaaaaaaaaaaaaaaagactagcaagagggtgtcttcctataagaggagttgtcaggtcccacccactgaactgcagggctcttggcacagaaaaactctctcctaacctcagcactaagggaagaccaaactctagctggctcctaacagcatcaggacgtgtcccttggatgactccagcaccaccatcctctccccattaaaatgtcacctgaggctgggtgcggtggctcctgcctataatcccaacactttgggaggctcaggagggaggatcacttgagcccaagaatttgagaccagcctgagcaacatagcaagaccccatctgtaccttaaaaaaaaaaatggccctcacacctgtaatcccagcactttgggaggctgaggcaggcggatcacctgaggtcaggagttagagaccagcttgcccaacatggtgaaaccctgtctctactaaaaatacaaaaaattagacaggcgtggtggtggttgcctgtaatcccagctattcaggaggctgaggcaggagaatcacttgaacctgggaggcggaggttgcagtgagccaagatcgtgccactgcactccagcttgggtgacaagagcgaaactctgtctgaaaaaaaaaaaaaggccaggcatggtggcatgcacttgcagtcccaactactcaggaggctgaggtgtgaggatcacttgagcccaggagttggaggctgcagtgagctatgattgcacaactactccagcctgggtgagggaatgagaccttgtctctaaaaaaataaatacatgaataaataaatagataaataatgctgcttgagaaagctcaacattacctggagaattgactgtttttgttctagccaatgcctgacaataggtccctgtatttggccgttaattcataagaaaaaaggtttcattggctcacagttctgcagaccatacaggaaggagcatgctggcatctgcttctagggaagcctcagggaatctttttttttttttttttttttttgaggtggagtcttgctctgtcgctaggctggagtgcagtggtaggatctcggctcactgcaacctctgcccccaggttcaagcgattcccctgcctcagcctcccgagatgctgggactgcaggcacgtgccaccacgcctggctaatttttttgtattttagttgagacagggtttcaccatgctggccaggatggtctcgatctccggacctcgtgatccacctgcctcggcctcccaaagtgctgggattacagtcatgagccagctgcctcagggaactttaactcatggcagaaggcgaagcgggagcaggcatgtctgtcacatgatgaaaacaggagcgagagagtgaggggggaggggccacacagttacccaatcagatcccacaagtactcactcctactgcgggaacagcaccgagccacgaaggacccaccccatgacccaaacgcctcccaccaggccccacttccaacattggggatcacattttaacatgagatttgggaggcaacaaacacatacccaaattataccagccctggcctctctttcttagaaaattaacctaagaacagcttacgatgatgaatccctccctggtccctttgagatatgtgtgcatcttctacagcgcaggagcggcctgaaagttgttcctttgaaatggaatcctcaggaaggacagggcctctgtctccctgtctctgggtgaactgaatcccagctgagatcattgccagcttgcagacatagacacaactggcgggatggctccgaccctgcccagccctcatcgctgttcacttgagtgcctgctgtcttcccagctcccacgttctttctttcaaacgtctgcccagccacctctgcagaagctggaacagagctcagctctttcccctgctgaaccaaatctgcctccacttccactgcctgcactcatgtcggttgtgtttccctttgacacccactctgccacctggaccattcagggtgctccccctgactcctgccgccagcgcccacactggcctcctatgacagggacacacgctactgccaccgccgctggagcagagcctgccccaaggctgcgagtgccaaggaggtgcagccctcccctgccatgggggcagccctaccccaacgccccgatagctctgaggttctacagattctacatgcttcctagagttcctggggggagttaagttccaggggtaatttccgtcatcgtgtactttttttttctttctttctttctttctttttttttttttttttttttttttgagatggagtctctctctgtctcccaggctagagcgcagtggcatgatctcagctcactgcaacctctgcctcccaagttcaagcgattctcctacctcagcctcccgagtagctgggattgcaggcgcccaccaccgcgcctggctaatttttgaatttttagtagagacagagtttcaccatgttggccaagctggtcacgaactcttgacctcaggtgatctgcccgcctcggcctcccaaagtgctgggattacaggtgtgagccgccctacccggccagttgtgtacatttgattggcttccttctttctctctcttccccactcccctccctgcatctcctcatgagggttcccaagtaaacccttgcatgggaatccttgttccggggtctgcttttagggaacccaaactctgaggctcttccccagccatgtggcttggtccccagggactgttctggaggggctttggtttttattctcagctgggcaatgtgtaatatgcttatctgccccctgcaggcaaagcccggcccagactccaccctagggtctaatttctgtccctacagatatccttcatctcccttctcagctttcctgcggctaaactgaaacggtttctcctttgtcctttctttgtttctgatcatttctgggtggctgaggtatgtgggaaatatactaaggctaaatcacacttatccagcccctcttccacgccaggtactatggcaggcgcttcatcccaggagcccctagaccctcacaaccgccccataaggtagattctctgactatccccagtttacaaatgaggaaactgaggctcagaggaggcctcttgcccagggtctcacagctgtttggcagctgagctggcatccagagctgagtcctggttctggccaccctgcattgaattagccagggcagcaaggtcactgagagggtgccccaaaggaagccgaaacacctgagctcaattctgtgtcttcctctcacatgctttgggaccttgacagttcactttattgtccatgcaggcctcagtttccccatttgttaaacagggaggtgcagataggggtctctaaagacctcccagcctttttcctcttgttcttcctcagggagggagcacagtgttataaagacttcaagtctacagtccaagaagccctgcttggactgtggacctcaagtcagcctgtaattatctcgggttaatttatttgaagaagttgcctggcttttccccaaatcctaccaaatgcatctgcagcttttccttctccttcacccagctttaaaatatctctcccgcttcataattaggaagaatttaatgactagcagcaaatatgaaaatctccatgtaaactgcctcctctggacttttgtttgtttgtttgtttgtttgagactgagtcttgctctatcacccaagctggagtgcagtggtgtgatctcggctccctgcaacctccgcctcctgggttcaagtgattctcgtgcctcagcctctcaagtagctgggattacaggcacccgccaccacacccagctaatttttgtatttttagtagagtcggggtttcattatattggccaggctggtctcaaactcctgacctcaagtgatccgtccccctcggcctcccaaagtgctagaattacaggcgtaagccaccgcacccggcctctcctctggactttttacatacgtattctagacctcaaccttgcccaccatagtttgtacttcccctgagcaacgtgacctaggtgaggttaaagttgaggacctccaagttaaaccacctggattcaaactccagctccaacacactagctgtgtgaccttgggggagtcactagaattttctgtgcctcaatttctggatctatgaggcaatgaggacaataaaggtacctacctagcaggggtgttgtggtgactaggtgagttcatgtgtatacagtgctttctcagtgctagctattattcttaatggggtcaccctgtggttcaagtcccttaagtctgagaaaatgtggtctctccttggtgaatcaacttatctgtgttggacattgcaagaaggttggggagtaaggtaaatagacctaactaaatcttatatgaagtccaggaacagtggcttacatttgtaatccagcactttgggaggctgagatgggtggatcacttgaggtcaggagttcgagaccagcctggccaacgtggtaaaaaccccatctctactaaaaatacaaaaactagccagatgtagtgatgcacacctatagtcccagctactcaggaggctgaggcacaagaattacttaaacccgggaggttgcagtgagctgagatcttaccactgcactccagcctgggtgacggagtgagactttgtctcaacaacaacaacaaaaatatttaaaaaattaaataaataaatattatataaaacaaaatctagggaaaatcccttaggggggtcacaggtcaagatgactggaagaaacctataatcacccagaattgattgcacaaaagaatgggcttgcttgtttagggacagccagagaggatgtgctgtgggaaccatttggggagcaaatgagcagctgaactatttatttctgacctccaaagggcccacagtgaccaattcccttccctctggagacttggaatgttttaccctaggaagtctgcatgggaccctgacctgctccaaagctctagtaacgctgaccccaaatcacctggggccaggagcaatgctccccagcttctaaattcccaccctggaagccccaggcagttgacttccatcccccaggctgcaccctctctctcctgacccttcaccaccttgtattaatttcatctttgtctcatattatcatctctctgagccaaggactactcatctctgtctcccacatggtgccaaacactcagcgtatagtaggtgctcagtaaatactggtctgctggggccagacacggtagctcacacctgtaatcccagcactttggcatgccaagttaggcggattgcctgagctcaggagttcgagactagcctgggcaacatggtgaaaacccatctctcctaaaaatacaaaaactagccaggcatggtggcatgcacctgtaatcctagctactcaggaggctgaggcaggagaatcgcttgaacacaggagccagagtttgcagtgagccgagattgcaccactgcactccagcctgggtgacagagtgagactctgtctcaaaaaaaaaaaaaaaaaaaaaaaaaaaaaaatatatatatatatatatatatactggccccttgaaaagggatttggataggaggggcccaagcctggctcctgccactgccctggacaggtcacctaaccccttttgcttgtcgtaaaccagggaagccagcagcacagggaggctaagatgccctcactcagactgattcatgcaatgccagcaatgaaagaaactcaaccccttgtcctgagagtaggcttactcccttctctgattatctgcttcccaagtgcgatgcgtgcagtgtgggccagaggaaggaagtggccaggcctttggcaggcacatttctccatgagcattggtaatgggcatctggattaacacatcagtccatctaaccaccccccaaaacaggactcctcttcctcggctgacctcccaggcttctgaacctgcaattttaataaaatcattgtcataatcacagccgttgtaactgatgttcatagttttctctgtctgtgccaggcgaagtgaggaacagcgaaaactatgtataataatatggagtgacgcaatcaattttagcgtgttcaaagttctgagaagtcttgcccaaaagcaatctgtatagtgttatgtaaaccagcataacctgatttatttgacaatgggataatttttcatagaacatctgttaacatgccacagagttcttttaaacatatttaggaaacagggccttgaggaaggaaaagcataagtgtttattgcgtgtctataactggctctgtgccagatacatggcatgcattttctcaggtaatcttcacaatagcctctgaaagaggtggaactgtccctctgttagtactctagaaatgagaactggctctgacaagcgaggtggtcttcccaagaacacgagcctagctagagtctcttgttgcctttctacagcaaacctgcatttgaattttcctctgctgtggctccttctagttcctgtttattacagagtccatgattctgggagggagaatgggaaaaagatcagcctaccactctgacatcattgagagtttggatttgcaaagcaggcaacataaactcctctcttgcaatttaagcataaatgtgttcaatgtggcctcagtttcctcatctataacatagaactggagtgggagtaggaaagcacggttagaaagatgtaactaaatggtctctctgtccctccacagcatgtacattgtgggcttatgattccgaatctctgggcctgcaatttggacatactgccaccagggggcgatctggactgggattatagccatggcaggctcatctactgtatcctgggttaaagcaacctaaattgattttattggtgttcccttgagtggtacacggatattacagaaattatgaagatggttttgagtcacaatgggcaaatgaggccctgcatgaattgaagtgtgaccaatttttttcactatatgaattaatgcttacgtactacctggcccctgtgcctccttgaaagttaagaatcattgtgaattccgctatctagggacctcaggaacatgaagaacaaggaatgctattgggaaccacgccagtgaaataaaagaccttctttaagttaaaaaaaatctacgcatattttatttactttgccaagattacagcttttctctctctagaacattcaatgtttaattaaaaagggttcctctttctgaggatgaatctttaactgagacaaagtcataaaacatgagacatttgttcccttatgtcaacattgaaattgctcacttaactttagatcagctcaccaacactgtgtttctcagacactcttgctagcatcttagttatctcatcagaaagcattttggcagctctgtcttgtaaagctgcttctgaaaagcactaaattaaatgtaatgtgaagttggatttctgtggcatccttcccattcaccttccatactcatacccataagcaatggactggttttgtgtgtcccttttgaaggctacatcaacagtacatttcctgctgtaggggtcgttctgcagattgtcattttcacccgcaatgatgtattgtgagatcttcctatgctgatacatgcagatgtggttcatttctttccactgccatagatcatcccatttgtccattgtccagctaaagtgcatttaggttgttttacttttttttttttttttttgagatggtgtctcactcagttgcccaggctggagtccagtggcacgatcttggctcactgcaacctccgcctcctgggttcaagtgattctcctgcctcagcctccaagtagctgggactacaggcacctgccaccatgtctggctaatttttttgaatttttagtagagacacggtttcaccacattggccaggctattctcaaaccactgaccacaaacgatgtgcccacctcagcttcccaaagtgctgggattacaagcatgagccactgcacccagctgagaacaagaacttttaatacttgccaggttgttttcctattgtaaactatgctgcaatggagatctttgcacgcactccctatatacatgttcaagggtttgtctaggctgtgtagaaatggaaattgtaggttgtatgatataatttcaattttgctaaatactcacccacggctcttggctcataattcatcaagggtacgaaagtttccatttccctcattctcatctacacttgcgttttaattcttgccaacctgatggattgttttcatttgcatctctgattattggggataatgagcatcttttcaactcttccgtgtggcttctttagtcattaactctttatgttccagccagactgtaaattcctagaaggaaggtctgagtctcaaatgtaaggccctcacagaggacagcccggtccaggcatagactctctgtttcctacctcacctctgtgttcctccttggagccctaccttccaagcttaacaagctacctgcagcttgccaaatacatcatgctgcagtttcatgcataccatgccctctgtctggaatgctgtgcctcttccagtccacctgaacatccttattcatgttccatgattcatctcaagagccacctcctctatgaagcctaccatatgaccggcaccctaccccatcccaggcagagctaaccacgttctcctttgtgcttttgctggccccacgtgaacgtctcaccgcatgtgtaagacttctgagcatctatgtactgatgtatttgtcttctcgccagactctgaactctttgaggacaggcgccatgtcttatttatttttgcacgtccagctcattggtcagggctgggcaggggcatatcatgggtagataagtctctaaggcagcttcttccacatcaatctcctgcagactgcaaagctctgaggtctggactgtattgcatattgcatatgcatattgcatattgtattgcattcatattgctgttttcaccgtgcctaatagggctgagtgtttgtggtgctccgtcaacaggcaccacaaacactcagccctgttaggcactgcactgtcatactacgtacactgcagtacgattgcctggtagagtagaagtgactttggatagaaattcctgggtttgcacccccagcttcctatgcatataatcttgtacaatttccttggcctctccaagcctcagtttcctcatcttcataaagggagtgataacagctctgaggactggtgtaaggatgaaatacagttccgtatataaaccatgtggcacataatcatttgccacgttatcatttctatgtcagaacagcacagagtctgctttagccacaagactttgggtggctcattttttcaggtgtcacatgtgatgggcacatagtagttgatgaagacaaagtctagtgtttccagtgcccagaacagtgtcttgcagaaactaggtacccagtaaagaagttgaactgaactctgcactttgcacataattagatatttgatgaatattaaatcaagtcagattcacttccctgtattgcattctgatccaaccctacctttaagtcattcctggacgggcgtggtggctcacgcctataatcccagcactttgggaggctgaggcgggtggatcacttgagctcaggagttcaagaccagcctggccaacatggtgaaacctcatctctactaaaaatacaaaaattagctggtcatggtggtgcactcctgtaatcccagctactcgggaggctgaggcaggagaatagcttgaacccagaaggcggaggttacagtgagccaagatcacaccactgcactccagcctggacaacagagccagattccatctcaaaaaaaaaaaaaaaagaaaagacaaagaaaaaaaagtaagtaagtcattcccttttgtgggaggaggggcagttgagggagaagtaggaacatgtctcctcttctcccagtagtgattttgattcttcctctcgcttttgatctttcaaaagcaagatgaccaccaggacaaactattattttgaggtcgccaatgaaccattcctgcatacagtaatactcttatgtagtcccctctcacaaagtctgggcttggccatatgtctctttggccacagggacattgacaagccagtgcaaggcttgataaaccattgcacattgaatcttgtcccctgagacggctccttcttgaaacctagtccccattccaaaagaagctcaagtgagccacgaagagaggtcccatgagagagagtgatgatcagccagccccccactgtggttctcatcccagctgaggcactaggcatgggagaggagcaggcgtcttcacagcagatgctatacagaacagaaatgagccgtacctcctgagccctgcctaaattgctcaatcatgagcaaattaaggatcatgtcattttaagcccacaagttttggtggtgttttggaacacagcaaataataaataacccatgggtagagcacggtctgagggtgcaagtcagtgatctcggggtggagtgtgctgcgggcttagagactcatcaggtgaaaagcttcaggatcaactggaaaacagaaccgtctgacctagaacccattatctggggactcttccctggggctccaagcccctatggtctgaggatgcttttggctccttaaacaatgaggagacctcaggctcacattacaggaagtccagaggccggcagcttctggccaagttgatggagcagctctgcgaggccatggaggacccagaatgtgctgcatggtctgcaattcctctggtcataggtgtctggcaggagtggtctgggctgcatggttcctcattcattacatcaggaaagatggatgctctctcagcattcccagctgagaaaagaatttcccagaaggctgcacgcatccacacgtttccttgcatcttattggcccaaattgagtcatatgtgcatgactgaaccaatcacgtgcaagaggtggggttggggtaggggtaaagaatcaccatgagaccaatcaaacccgccactagattggaggaaatgtgtgtggccaactcctctgaagtccgtgtctcgtgggggaggaatggatgtctgggaataattggcatcttctaggaagagcatgtagggtaagatccagcagtgtccactataggaccccctcacatagggcatgtgggagaagccaggcaccctgggcttgagacagagtcatgcccagctctcatgtcctttcctgggataatggatgaaggtacgtgtgtgtgcatgtgtgtgcaggagggaggactagggaatagtttgggaccccagggcttctatcttcccccagttggtctctccaacaccacatatcggcctctactccagtgtgaagaaaggcaccaagcacaggaggactcggacctgagcctttccttattgttagcactttatttgagtagaagacacctctactgtgtcaaaactagtacttggagctcttggatttgctgttttctccatatttctcttccagtgctttctgcaagttcaggttcatagcatttttctggtgccaccgccctacagcgagcaggagaagagccagcacagattagatcatctggcagtctctggagttgcccagaccccagggatgactcgtacctcttccaagtccaccccggctctgtctcctgctctggtttctctctgacccttagagccaacacaccctgctggtggaggacagtccctgcctcccatcacccgcagctcctcacttacccagatcatccgtcttcctgccatgccagtgttctaagtccctcactgatttctcaatgacctctggtgtgtaagaagccttcatgaggctctttgtctcctcagcagcccctgtagaataccatgaagaaaccccaagtgcccaattcagtggcagtcgggtactccatggcttatattgggtgtcagtttcctctacggatggtaaattgtggaacggaaggagagtgggaagggtttcaaagtaaagtcgtttgggttcaaacccagactccattatttatgggtagtatagcctcagagaaatttttaacctctctgagcttcagtgtcttcaactataccaagaaatgagatttttttgcatggttggaaagacaaaattattggacattcatcaagacatctagcaagtggcaactaatacctgtaacttaggaaaacttatctctgttttcaaaattcaaacatgcacaagcagatacgttgcaatgatcaagagtcagcagaaacaccaaaggacaaaatctcccaaattagcaaagatttgaatgatcagatacagaatacaaaataagtatatttaggccgggggcagtggctcacgcctgtaatcccagcactttgggaggccaaggcgggtggatcacgaggtcaggggttcgagaccagcctgaccaacatggtgaaaccccgtctctactaaaaatacaaaaattagctgggcgtggtggcgggctcctgtaatcccagctactcaggaggctgaggtaggagaattgcttgaacccgggaggcggaggttgcagtgagccgagatcgtgccactgcagtccagcctgggcaacagagagagactctgtctcaaacaaacaaacaaacaaacaaaaaacctatatttaatgattgaaaccataagagagaataaaaatataagcaaagagtaagaaaccatccagaaagagcagatagattagtaagagaagcaaacggaatttcagaaatgaaacacataataattgaaaaaaaattaaactccatggcaataagatgcctgggacttgctttgaaataatcttgggtgggagtggatgggtgggagaaaagatgagacaagatcggctatgtattaatcattgttgaggctgagtggtatatgcaacatctatttataaactaagttctcttcttttccataagcttgaaaattgccatcataaaagtttaaaaagaaattcaattaacagataaaatagcagatcaaataaagctgagagaaaatggtaaactggaagatatacctaaagaaattaatattaggatgcaatacaaagaaataaaaagatgtgggctgggcgcggtggctcacgcctgtaatcccagcactttgggaggccgagaatatatatataaattctatatatacatatatctaaatcctatatataatacatatataaattctataaaataataacatgtaagctgaggtggaggtcgggagagtaattaaagttaattaaagttttttttttcttttttttttttttgagacggagtctcgctctgtctccaggctggagtgctgtggctcaatcttggctcactgcaacctccatctcccaggttcaatctactctcctgcctcagcctcctgagtagctgggattacaggcatgcgccaccacacccagctaatttttgtatttttagtagagacggggtttcaccatgttagccaggatggtctggatctcttgaccttgtgatccgcccatctcggcctcccaaagtgctggggttacaggtgtgagccacggcgcccagccaaagttaaagccttctaaggcccttagtgttcaggaaaacacaaatgcctagattaactttataatttgttaattacgcatataaaaatgtcaaaggtaaccactcaaagaataagaggagtagaaaagaacaaatatcagattgagaaaaataagaaagctgatgtaaatccaaaaagagagagaaaaagaagccacaaagaaaaagcagcacaccatcctggctaacacggtgaaaccccgtctctactaaaaatacaaaaaaaaaaattagccgggcgttgtggcaggcgcctgtagtctcagctacttgggaggctgaggcaggagaatggcgtgaacccaggaggcggagcttgcagtgagctgagagcgcgccactgcactccagcctgggcaacagagtgagactccatctcaaaaaaaaagaaaagaaaagaaaagaaaaagcagcacaaatagaaaacgaaaaataagatcatggaaataaacccaaatagtctatatcagtaacgagaatcaatatgaacgaattaaacccattcgttaaaaaccagatgatgacactacagaaaatgttttccaggtatgtatcattgaaggcatatttaaaaggacacaaagagaggataaacatggaagaacagaaaaagatatacccaggcaaacactaaccaaaagcagtctggtctaactatatcaggtgaaatagactgtagggcaacggcacgatgaaaaacaaaaacaattgcaattcattaaggtaatgtaatgattctgaacttgctacattgaaataatctcaaaatagataaggcaaaattgacagaaccacaggacaaatggacaaagctgctattatagagggagatttaaagacacatattttagtaactaatagatcaagcaaagcatattaataaggattagaagatttgtgcagaaattattaacaagcctgttctatagacaaatgcagaatcccttacccaagagattgttattattattattattatcattattttgagagggagtcttgctctgtcaccaggctggagtgcagtggcgcgatctccgctcactataacctccgcctacctccgcctcccgggttcaagcgattcttctgcctcagcctcctgagaagccattacaggcgtgcgccatcacgcctagctaatttttgtatttttagtagagacatgcgccatcatgccagctaatttttgtatttttagtagatatagggtttcaccatattggccaggatgatctcgatctcttgaccttgtgatctgcctggctccgcctcctgagatttttttttttttttttttgagatggagtcttgctctgtcaccaggctggtgtgcagtggcgcaatctcggctcactgcaagctccgcttcccgggttcacgccattctcctgcctcagcctcccgagtagctgggactacaggcgcccgccaccgcgcccggctaattttttgtatttttagtagagacggggtttcaccttgttagccaggatggtctcgatctcctgacctcatgatccacccgcctcggcctcccaaagtgctgggattacaggcgtgagccactgcgcccggcctggagagattattcttaagcacacacagatcatctacaaaaatcaccatctactgggctctaaagcaaatctgaacaatttcaaaggattgaaatcattacagggctgtgttctccaatgacagtcacatcaagctgggagatggaatccaccccaaagacaagagagcaaaccaagaaagaggaagacaccaaatagaggaaatcagaattccaacaatggaaagaagtgaaaaaaagaaaatccttggtaagctggttcagggatccctggatacctggacacagagggaaaaggacaggacgtaagctaccattctgcctgctctgtgactcaaagacacaatgtccaggtgagcccagccaaggttttgatttgtatgtggcttgtccttaccatgggctgaccctctactctcccctcccagccctgctgcatggagcagatgaggaccttcatgttagcccacaggggtgttctgctctgacctccttctgaagctggagccacggtgagttgggaggcagaaaatacacaaagggccactcaccgtggccatattcctgcaggccatcccacatggttcccccgcagccctgtctgtgggaagcctatacacccaggactcacggccatgccaatactctccccacatgaagttcaccaaactctcaggacacccaaagccagactaagacccagagccagctccattttcccccatgctgtttccatggtagtgaataaatttcatgagatctgatggctttataaggggaaacttctttcacttggttcccattctctcttgtcggccaccgtgtaagacgtgcctttcaccttccaccatgatgtgaggcctccccagctacatggaactgtgagtctattaaacctctttttctttataaattacccagtctcaggtatgtttttatcagcagtatgaaaacagactatattatatttaatgatgtaatgttagaatcaagaaggagataaggatgcctgtttttcctgcttatagacaccattgtcctagagaggtcagccagatgctgatataaaggtaagaaaagcctagtgtttaggaatttaaactctagcctctgactggcagggtttaaatcccaattctgaccgtccctatctgtgtggccttaattaagttatttaacttttccatgactcaattattttttatctggaaaaaaaaatgggaattgtagcatttaccacatgggattcatgtgcagaataaaatatatatataaagtactcagagcagtacctggcatatgttaaatactatgcataaatgtagccattattactattcaaaagcactcctaaagaatcaataactaattactggaattaattggtgagctgcataaagcttctggatacgagattaatatacaaaaacaaaaattgcatttgtgtatacggtatcagcagcaaagttagaaaatataattttaaaaagatatcattttcaacagcagcaaaaaaagagattctcctgagtaagtctaacaaaaaaacctgcatgatgtttatagaaaaaaaaaaatcacaaaatgttactgagagatatcgaaggaagacttaaattaatggaggtatataccatattcatatattagaaaattcattataaagctgacaacagcccttaaattgagctgtagattcaatgtatttccaatcaaaatcccaacagggtttttcatggaaatttctgtttattaataacatttgtatgggagagtaaagggcctagaaacccaagacattaactggtgatggtggtggaggggtggtagtgggagtattgcctgaccagatatcaggctacttataatactttggtgattaaaaatgtaatattagaccaatggacagaatagagcctgaaactgatctatgcatgtgtcaaaacctgatggataacagaagtaccactgcaggtcaccgggaggaaagatgagcctattcaataaaaggtactgaggcagtcagtaacccacataaagaaggaattgaaaatgaatccctactggggaaagatttctggtgttgttgttccattattttgagggctgggcacacagatgcccaaggaatgcctgagctcgtcatctcactctttatacagctgggcaagctgcctaaagtttcctcaagcctcagttttactactttcttaaatggctaaaactcacaaaagccatctacagtttttgaaaatgaatccctacttcatactaaaaacaaaaatcaaccccaggtggattaaagagttaaatgtgaaaagcaaaactaaaaattttagaagactgtgtaaaagatgatctacgatttagcataggataggagtccctcaacctgctccccctggcagcttctctaattcagtaaatagccatctcatccttccagttgttcaggtcaaaacgttgaagtcaacgttaattcctctctcaccccaaaatctattcattagcatattcttttctctctgccttatacaaatatccagaatcctactacatcaggccaccttcaccattacctccctgagctgctatattgcacaatggtgccttccaaaatagcgcaggtgcactagcccagcttccaacaccaagccaccatcatctgtcccatctggagttttgcagctgcctcctaccagtttccctgtttctgccccatctccctatgtccattctccccatagcaactggagtgagcccttaacctgagccaaacagggccattctcctgcttaaaatcccggcttggtttctcatctcactccgagtaaagaccttccagcaggcttcacgacccagcctgtttcctctgatgtcttctgcctcactcctgtgcagccataccagcctcaccaacctcaaacagcaagtataaaggctaaccctgggtgggtggaaacagagagggacagatggatgggcacactgacagcactgtgtggcagggtgaagccctgattcatagtgtttgccaatttccagagtgtaaatactactagcatggccaattttaagacagcatttatgtgccagtcagttcagagagacaattgcctcttgtgagctggtgcaatttgctatgagctccagcacacccttggcacagttctacttcccaggtgggatgatgggacatggacatttttaaaaatagattattttacatttatgtagacattatcatacaaagttgtatggaatagctatttggtgaccgatagttgttaaagagagaactggaaggcaggatctggaaggcccggaacagagaacaagcagaactgtattctcgctttcctccctgacaccatcccttctccaagctcagagaaaactccagaaaggcttccagtgggcacctggttcctcaggtgacagggatccgagccaggtggaagaggtttgtcaggccctgggagcactggagagggcctggagtgaggagagaggaaggagccataccagaaacagcctcattttgcaatgaggccaaaccagaatgtggggcagagagaagcccctgcgtgctgtgacaggcatctgagccatccagaagaccctgggaacaggatcatagctagggaggtgacttagtggtcaagaaaagactatgaggctttgaaggcagaaggaacacctgactttgagtcctaggcacaatgcagactactgagagttctaaggcaaatgatctgaaatctgcccgtgaaatggagctaatagcactctccccaccccaaccaaacaggactacactgatccaatggaaaccctgtgtaaatgtcagagcctccaacccacccttcctttcttcccaggtggcgccacctccaggctctggagaagaaaaatgatagcctgacagctactgagtgctcacgacttgcctcggccaagcaccttcatgtggcacttcataaagtcctgccaatgacccagcaagggccatactctcattatcatccccactgtaccgagaaggcagcggaggcttgcagaggttgaggatcccacctaaggtcatacccagctagtgagtggctgagctgagctttgaaccaaagaaacttgatattgtcactgtgaccaaaggtgcctgggatggggctaggggtgtggggagcagcagtcccagttctactgggtcctgggcctcctactggcagattaagaacaagaggtggggagggcgcagtgactcatgcctgtaatcccagcactttgagaggccaaggtgggtgaatcacttgagcccaggagtttgagaccagcctgggcaatatggtgaaaccttgcctctagcaaaaatacaaaaaaaaaaaaacagaaaagaaaaaaattagccaggtatggtggcgcgcatctgtggtcccagctacttatgggggcaggggggtagctgaggtgggagggttgctttcttgagcctgtgaggtggtgatttcagtgagccaagattgtgccactgcaccccagcctgggcaacagagtgagacttcaaaaaacaaaagaagggaaggaaagggaaggggaggggaggggaggggaggggaggggagagaaggggaggggaggggggaggggaggggagggggggatgggaggggagggaccagaggtgcctgactgccaactgggatgaatcatccacacatcaaggacaggggactggatgttcccagcactcgcaagctgacatagaggacacatgggcatgaaataagtgtccttgaagatgtgccctggggtcctagaccccatatggagtggaaaccccaaaggccttccctgcccaatgcctgggagaccatgggtgttcacggccccacccttgccctttgacttgacctcgaaacaagtttgaccgcatgttgtagccgaggtcatagtagtctgagaagacggaggagatttccacaggattctgggtcctgctgggccatgagcttgcccttttctggccctcgaagacttcatcaatagccttttgagcctgagcagggaggcagggatgacagacaggggatggaaaagcagtttcaagccccatatctccctccaactcctcctcccttgaccctgccctccccaccccgatcccacctgtagcctgcagccctcaacctattcacagggctggggagctggggtatacaaaggccccagccccaactcctctcatcatctgcactgctgtgggtggggggcatcaagttaatgatcataaaacctcttccaagcattgagcatctgctacctgcaacattgggacggggggtctctatagggtgccactcttcccaccattttataaatgaggaaagcgggcctcaggagaccaaagatcacccagttcacatggctggcagggcacagagccctggcttgcctcctacaactgaggcaccacacagggcagctctgggtgggtgcttaactttcaatgaggccaactccctcttcataccaatagggaaactgacacacagagaagctgagcccaggtccaggggcaggacacctaggtttgagttccagttctgcaatatatcagctgttgacttcagcaagcctcttctccactctaggcctcagtttccctacatgtaaaatgtgaaggcagggtggaactggatggtctttgaagtggcttccagctctgacacttgctggctcaatgacacttgtgacataagttacagatgggcagaaaacacggatttcttgattccagccagggacaacggtggctgaagagagaaaggacttctcccaaggctgggcagggtggtgagaggtggtgaccacagagtcaacctcaaattgggacaagttcctccaagtggggcagaacatgtcaagactgtgaccttccagacttgctggtggtggggtcactgcactttaagatgacagagtggaaggggagcctaggagaagcctgacccccagcttttgtgacccaagcagatcgtagcccctccttgggacttggttatactatctgttataaaggaagcaataactcctgcctgaccttccacacaatgcagttgctatgagggttga

(The sequence listing continues in the following parts.)

What is claimed is:

1. A method of diagnosing esophageal cancer in a patient, comprising:
(a) detecting the level of expression in a tissue sample of two or more genes from Tables 2-8; wherein differential expression of the genes in Tables 2-8 is indicative of esophageal cancer.

2. A method of detecting the progression of esophageal cancer in a patient, comprising:
(a) detecting the level of expression in a tissue sample of two or more genes from Tables 2-8; wherein differential expression of the genes in Tables 2-8 is indicative of esophageal cancer progression.

3. A method according to claim 2, wherein the progression is the progression of Barrett's esophagus to adenocarcinoma.

4. A method of monitoring the treatment of a patient with esophageal cancer, comprising:
(a) administering a pharmaceutical composition to the patient;
(b) preparing a gene expression profile from a cell or tissue sample from the patient; and
(c) comparing the patient gene expression profile to a gene expression from a cell population selected from the group consisting of normal esophageal cells, cells from Barrett's esophagus and esophageal adenocarcinoma cells.

5. A method of treating a patient with esophageal cancer, comprising:
(a) administering to the patient a pharmaceutical composition, wherein the composition alters the expression of at least one gene in Tables 2-8;
(b) preparing a gene expression profile from a cell or tissue sample from the patient comprising esophageal cancer cells; and
(c) comparing the patient expression profile to a gene expression profile selected from the group consisting of normal esophageal cells, cells from Barrett's esophagus and esophageal adenocarcinoma cells.

6. A method of diagnosing esophageal adenocarcinoma in a patient, comprising:
(a) detecting the level of expression in a tissue sample of two or more genes from Tables 2-8; wherein differential expression of the genes in Tables 2-8 is indicative of esophageal adenocarcinoma.

7. A method of detecting the progression of esophageal adenocarcinoma in a patient, comprising:
(a) detecting the level of expression in a tissue sample of two or more genes from Tables 2-8; wherein differential expression of the genes in Tables 2-8 is indicative of esophageal adenocarcinoma progression.

8. A method of monitoring the treatment of a patient with esophageal adenocarcinoma, comprising:
(a) administering a pharmaceutical composition to the patient;
(b) preparing a gene expression profile from a cell or tissue sample from the patient; and
(c) comparing the patient gene expression profile to a gene expression from a cell population comprising normal esophagealo cells or to a gene expression profile from a cell population comprising esophageal adenocarcinoma cells or to both.

9. A method of treating a patient with esophageal adenocarcinoma, comprising:
(a) administering to the patient a pharmaceutical composition, wherein the composition alters the expression of at least one gene in Tables 2-8;
(b) preparing a gene expression profile from a cell or tissue sample from the patient comprising esophageal adenocarcinoma cells; and
(c) comparing the patient expression profile to a gene expression profile from an untreated cell population comprising esophageal adenocarcinoma cells.

10. A method of screening for an agent capable of modulating the onset or progression of esophageal cancer, comprising:
(a) preparing a first gene expression profile of a cell population comprising esophageal cancer cells, wherein the expression profile determines the expression level of one or more genes from Tables 2-8;
(b) exposing the cell population to the agent;
(c) preparing second gene expression profile of the agent-exposed cell population; and
(d) comparing the first and second gene expression profiles.

11. The method of claim 10, wherein the esophageal cancer is a esophageal adenocarcinoma.

12. A composition comprising at least two oligonucleotides, wherein each of the oligonucleotides comprises a sequence that specifically hybridizes to a gene in Tables 2-8.

13. A composition according to claim 12, wherein the composition comprises at least 3 oligonucleotides.

14. A composition according to claim 12, wherein the composition comprises at least 5 oligonucleotides.

15. A composition according to claim 12, wherein the composition comprises at least 7 oligonucleotides.

16. A composition according to claim 12, wherein the composition comprises at least 10 oligonucleotides.

17. A composition according to any one of claims 12-16, wherein the oligonucleotides are attached to a solid support.

18. A composition according to claim 17, wherein the solid support is selected from a group consisting of a membrane, a glass support, a filter, a tissue culture dish, a polymeric material, a bead and a silica support.

19. A solid support comprising at least two oligonucleotides, wherein each of the oligonucleotides comprises a sequence that specifically hybridizes to a gene in Tables 2-8.

20. A solid support according to claim 19, wherein the oligonucleotides are covalently attached to the solid support.

21. A solid support according to claim 19, wherein the oligonucleotides are non-covalently attached to the solid support.

22. A solid support according to claim 19, wherein the support comprises at least about 10 different oligonucleotides in discrete locations per square centimeter.

23. A solid support according to claim 19, wherein the support comprises at least about 100 different oligonucleotides in discrete locations per square centimeter.

24. A solid support according to claim 19, wherein the support comprises at least about 1000 different oligonucleotides in discrete locations per square centimeter.

25. A solid support according to claim 19, wherein the support comprises at least about 10,000 different oligonucleotides in discrete locations per square centimeter.

26. A computer system comprising:
(a) a database containing information identifying the expression level in esophageal tissue of a set of genes comprising at least two genes in Tables 2-8; and
(b) a user interface to view the information.

27. A computer system of claim 26, wherein the database her comprises sequence information for the genes.

28. A computer system of claim 26, wherein the database further comprises information identifying the expression level for the set of genes in normal esophageal tissue.

29. A computer system of claim 26, wherein the database further comprises information identifying the expression level of the set of genes in esophageal cancer tissue.

30. A computer system of claim 29, wherein the esophageal cancer tissue comprises esophageal adenocarcinoma cells.

31. A computer system of claim 26-30, further comprising records including descriptive information from an external database, which information correlates said genes to records in the external database.

32. A computer system of claim 31, wherein the external database is GenBank.

33. A method of using a computer system of any one of claims 26-30 to present information identifying the expression level in a tissue or cell of at least one gene in Tables 2-8, comprising:
(a) comparing the expression level of at least one gene in Tables 2-8 in the tissue or cell to the level of expression of the gene in the database.

34. A method of claim 33, wherein the expression level of at least two genes are compared.

35. A method of claim 33, wherein the expression level of at least five genes are compared.

36. A method of claim 33, wherein the expression level of at least ten genes are compared.

37. A method of claim 33, further comprising displaying the level of expression of at least one gene in the tissue or cell sample compared to the expression lev l in esophageal cancer.
